United States Patent Application Publication US 2007/0214517 A1 - sequence listing, part 12

SEQ ID NO: 15352 - protein, 160 aa, Zea mays subsp. mays; identical to SEQ ID NO: 14452
  peptide (1)..(160): Ceres Seq. ID no. 13636265
  misc_feature (1)..(23): Homolog of NCBI NO: 7447413 NR Description: xyloglucan endo-1,4-beta-D-glucanase (EC 3.2.1.-) barley >gi|1890577|emb|CAA63663.1| xyloglucan
  misc_feature (1)..(23): Homolog of NCBI NO: 8886867 NR Description: xyloglucan endotransglycosylase XET2 [Asparagus
  misc_feature (1)..(23): Homolog of NCBI NO: 8886865 NR Description: xyloglucan endotransglycosylase XET1 [Asparagus
  misc_feature (1)..(23): Homolog of NCBI NO: 7447412 NR Description: xyloglucan endo-1,4-beta-D-glucanase (EC 3.2.1.-) barley >gi|1890575|emb|CAA63662.1| xyloglucan
  misc_feature (1)..(23): Homolog of NCBI NO: 15242781 NR Description: xyloglucan endotransglycosylase (TCH4)
  misc_feature (1)..(23): Homolog of NCBI NO: 15235997 NR Description: xyloglucan endotransglycosylase (XTR-6)
  misc_feature (1)..(23): Homolog of NCBI NO: 17064792 NR Description: xyloglucan endo-1, 4-beta-D-glucanase (XTR-6)
  misc_feature (1)..(23): Homolog of NCBI NO: 22947852 NR Description: xyloglucan endotransglycosylase [Malus x
  misc_feature (1)..(23): Homolog of NCBI NO: 29500891 NR Description: putative xyloglucan endotransglycosylase [Cucumis >gi|29500899|emb|CAD87533.1| putative xyloglucan
  misc_feature (1)..(21): Homolog of NCBI NO: 28804632 NR Description: xyloglucan endotransglycosylase [Pyrus communis]
  misc_feature (1)..(23): Homolog of NCBI NO: 7447413 NR Description: xyloglucan endo-1,4-beta-D-glucanase (EC 3.2.1.-) barley >gi|1890577|emb|CAA63663.1| xyloglucan
  misc_feature (1)..(23): Homolog of NCBI NO: 8886867 NR Description: xyloglucan endotransglycosylase XET2 [Asparagus
  misc_feature (1)..(23): Homolog of NCBI NO: 8886865 NR Description: xyloglucan endotransglycosylase XET1 [Asparagus
  misc_feature (1)..(23): Homolog of NCBI NO: 7447412 NR Description: xyloglucan endo-1,4-beta-D-glucanase (EC 3.2.1.-) barley >gi|1890575|emb|CAA63662.1| xyloglucan
  misc_feature (1)..(23): Homolog of NCBI NO: 15242781 NR Description: xyloglucan endotransglycosylase (TCH4)
  misc_feature (1)..(23): Homolog of NCBI NO: 15235997 NR Description: xyloglucan endotransglycosylase (XTR-6)
  misc_feature (1)..(23): Homolog of NCBI NO: 17064792 NR Description: xyloglucan endo-1, 4-beta-D-glucanase (XTR-6)
  misc_feature (1)..(23): Homolog of NCBI NO: 22947852 NR Description: xyloglucan endotransglycosylase [Malus x
  misc_feature (1)..(23): Homolog of NCBI NO: 29500891 NR Description: putative xyloglucan endotransglycosylase [Cucumis >gi|29500899|emb|CAD87533.1| putative xyloglucan
  misc_feature (1)..(21): Homolog of NCBI NO: 28804632 NR Description: xyloglucan endotransglycosylase [Pyrus communis]
  misc_feature (1)..(23): Homolog of NCBI NO: 7447413 NR Description: xyloglucan endo-1,4-beta-D-glucanase (EC 3.2.1.-) barley >gi|1890577|emb|CAA63663.1| xyloglucan
  misc_feature (1)..(23): Homolog of NCBI NO: 8886867 NR Description: xyloglucan endotransglycosylase XET2 [Asparagus
  misc_feature (1)..(23): Homolog of NCBI NO: 8886865 NR Description: xyloglucan endotransglycosylase XET1 [Asparagus
  misc_feature (1)..(23): Homolog of NCBI NO: 7447412 NR Description: xyloglucan endo-1,4-beta-D-glucanase (EC 3.2.1.-) barley >gi|1890575|emb|CAA63662.1| xyloglucan
  misc_feature (1)..(23): Homolog of NCBI NO: 15242781 NR Description: xyloglucan endotransglycosylase (TCH4)
  misc_feature (1)..(23): Homolog of NCBI NO: 15235997 NR Description: xyloglucan endotransglycosylase (XTR-6)
  misc_feature (1)..(23): Homolog of NCBI NO: 17064792 NR Description: xyloglucan endo-1, 4-beta-D-glucanase (XTR-6)
  misc_feature (1)..(23): Homolog of NCBI NO: 22947852 NR Description: xyloglucan endotransglycosylase [Malus x
  misc_feature (1)..(23): Homolog of NCBI NO: 29500891 NR Description: putative xyloglucan endotransglycosylase [Cucumis >gi|29500899|emb|CAD87533.1| putative xyloglucan
  misc_feature (1)..(21): Homolog of NCBI NO: 28804632 NR Description: xyloglucan endotransglycosylase [Pyrus communis]

SEQ ID NO: 15353 - DNA, 562 bp, Zea mays subsp. mays
  misc_feature (1)..(562): Ceres Seq. ID no. 13632771
  misc_feature: MA Experiment ID: 108522 Result: Up-regulated in Transcription
  misc_feature: MA Experiment 108522 PARAMETER Experiment Name: Zm_42deg_Heat_P Parameter: Age (day) Value: 8
  misc_feature: MA Experiment 108522 PARAMETER Experiment Name: Zm_42deg_Heat_P Parameter: Organism Value: Zea mays
  misc_feature: MA Experiment 108522 PARAMETER Experiment Name: Zm_42deg_Heat_P Parameter: Plant Line Value: 35A19
  misc_feature: MA Experiment 108522 PARAMETER Experiment Name: Zm_42deg_Heat_P Parameter: Temperature (deg C) Value: 42 vs. 22
  misc_feature: MA Experiment 108522 PARAMETER Experiment Name: Zm_42deg_Heat_P Parameter: Timepoint (hr) Value: 1
  misc_feature: MA Experiment 108522 PARAMETER Experiment Name: Zm_42deg_Heat_P Parameter: Tissue Value: Aerial
  misc_feature: MA Experiment ID: 108523 Result: Up-regulated in Transcription
  misc_feature: MA Experiment 108523 PARAMETER Experiment Name: Zm_42deg_Heat_P Parameter: Age (day) Value: 8
  misc_feature: MA Experiment 108523 PARAMETER Experiment Name: Zm_42deg_Heat_P Parameter: Organism Value: Zea mays
  misc_feature: MA Experiment 108523 PARAMETER Experiment Name: Zm_42deg_Heat_P Parameter: Plant Line Value: 35A19
  misc_feature: MA Experiment 108523 PARAMETER Experiment Name: Zm_42deg_Heat_P Parameter: Temperature (deg C) Value: 42 vs. 22
  misc_feature: MA Experiment 108523 PARAMETER Experiment Name: Zm_42deg_Heat_P Parameter: Timepoint (hr) Value: 6
  misc_feature: MA Experiment 108523 PARAMETER Experiment Name: Zm_42deg_Heat_P Parameter: Tissue Value: Aerial
  misc_feature: MA Experiment ID: 108530 Result: Down-regulated in Transcription
  misc_feature: MA Experiment 108530 PARAMETER Experiment Name: Zm_Imbibed_Seeds_P Parameter: Age (day) Value: 6 vs. 2
  misc_feature: MA Experiment 108530 PARAMETER Experiment Name: Zm_Imbibed_Seeds_P Parameter: Organism Value: Zea mays
  misc_feature: MA Experiment 108530 PARAMETER Experiment Name: Zm_Imbibed_Seeds_P Parameter: Plant Line Value: 35A19
  misc_feature: MA Experiment 108530 PARAMETER Experiment Name: Zm_Imbibed_Seeds_P Parameter: Tissue Value: Aerial vs. Embryo
  misc_feature: MA Experiment ID: 108535 Result: Up-regulated in Transcription
  misc_feature: MA Experiment 108535 PARAMETER Experiment Name: Zm_Meristem_P Parameter: Age (day) Value: 8
  misc_feature: MA Experiment 108535 PARAMETER Experiment Name: Zm_Meristem_P Parameter: Organism Value: Zea mays
  misc_feature: MA Experiment 108535 PARAMETER Experiment Name: Zm_Meristem_P Parameter: Plant Line Value: 35A19
  misc_feature: MA Experiment 108535 PARAMETER Experiment Name: Zm_Meristem_P Parameter: Tissue Value: Root Meristem vs. Above Root Meristem
  misc_feature: MA Experiment ID: 108544 Result: Down-regulated in Transcription
  misc_feature: MA Experiment ID: 20000487 Result: Up-regulated in Transcription
  misc_feature: MA Experiment 20000487 PARAMETER Experiment Name: Zm_50mM_NH4NO3_L_to_H_P Parameter: Organism Value: Zea mays
  misc_feature: MA Experiment 20000487 PARAMETER Experiment Name: Zm_50mM_NH4NO3_L_to_H_P Parameter: Timepoint (hr) Value: 4
  misc_feature: MA Experiment 20000487 PARAMETER Experiment Name: Zm_50mM_NH4NO3_L_to_H_P Parameter: Tissue Value: Leaves
  misc_feature: MA Experiment 20000487 PARAMETER Experiment Name: Zm_50mM_NH4NO3_L_to_H_P Parameter: Treatment Value: 50mM NH4NO3 vs. 100mM Mannitol
  misc_feature: MA Experiment ID: 20000488 Result: Up-regulated in Transcription
  misc_feature: MA Experiment 20000488 PARAMETER Experiment Name: Zm_50mM_NH4NO3_L_to_H_P Parameter: Organism Value: Zea mays
  misc_feature: MA Experiment 20000488 PARAMETER Experiment Name: Zm_50mM_NH4NO3_L_to_H_P Parameter: Timepoint (hr) Value: 8
  misc_feature: MA Experiment 20000488 PARAMETER Experiment Name: Zm_50mM_NH4NO3_L_to_H_P Parameter: Tissue Value: Leaves
  misc_feature: MA Experiment 20000488 PARAMETER Experiment Name: Zm_50mM_NH4NO3_L_to_H_P Parameter: Treatment Value: 50mM NH4NO3 vs. 100mM Mannitol
  misc_feature: MA Experiment ID: 20000492 Result: Up-regulated in Transcription
  misc_feature: MA Experiment 20000492 PARAMETER Experiment Name: Zm_Hybrid_Seed_Dev_P Parameter: DAP Value: 12
  misc_feature: MA Experiment 20000492 PARAMETER Experiment Name: Zm_Hybrid_Seed_Dev_P Parameter: Organism Value: Zea mays
  misc_feature: MA Experiment 20000492 PARAMETER Experiment Name: Zm_Hybrid_Seed_Dev_P Parameter: Plant Line Value: 35A19
  misc_feature: MA Experiment 20000492 PARAMETER Experiment Name: Zm_Hybrid_Seed_Dev_P Parameter: Tissue Value: Fert Kernel vs. Unfert Floret
  misc_feature: MA Experiment ID: 20000534 Result: Down-regulated in Transcription
  misc_feature: MA Experiment 20000534 PARAMETER Experiment Name: Zm_Hybrid_Pollen_P Parameter: Age (day) Value: 8
  misc_feature: MA Experiment 20000534 PARAMETER Experiment Name: Zm_Hybrid_Pollen_P Parameter: Organism Value: Zea mays
  misc_feature: MA Experiment 20000534 PARAMETER Experiment Name: Zm_Hybrid_Pollen_P Parameter: Plant Line Value: 35A19
  misc_feature: MA Experiment 20000534 PARAMETER Experiment Name: Zm_Hybrid_Pollen_P Parameter: Tissue Value: Pollen vs. Aerial
  misc_feature: MA Experiment ID: 20000626 Result: Up-regulated in Transcription
  misc_feature: MA Experiment 20000626 PARAMETER Experiment Name: Zm_Herbicide-Treatments_P Parameter: Timepoint (hr) Value: 12
  misc_feature: MA Experiment 20000626 PARAMETER Experiment Name: Zm_Herbicide-Treatments_P Parameter: Tissue Value: Aerial
  misc_feature: MA Experiment 20000626 PARAMETER Experiment Name: Zm_Herbicide-Treatments_P Parameter: Treatment Value: Roundup vs. No Treatment
  misc_feature: MA Experiment ID: 20001612 Result: Up-regulated in Transcription
  misc_feature: MA Experiment 20001612 PARAMETER Experiment Name: Zm_50ppm_KNO3_L-to-H_P Parameter: Age (day) Value: 19
  misc_feature: MA Experiment 20001612 PARAMETER Experiment Name: Zm_50ppm_KNO3_L-to-H_P Parameter: Organism Value: Zea mays
  misc_feature: MA Experiment 20001612 PARAMETER Experiment Name: Zm_50ppm_KNO3_L-to-H_P Parameter: Plant Line Value: 35A19
  misc_feature: MA Experiment 20001612 PARAMETER Experiment Name: Zm_50ppm_KNO3_L-to-H_P Parameter: Timepoint (hr) Value: 8
  misc_feature: MA Experiment 20001612 PARAMETER Experiment Name: Zm_50ppm_KNO3_L-to-H_P Parameter: Tissue Value: Roots
  misc_feature: MA Experiment 20001612 PARAMETER Experiment Name: Zm_50ppm_KNO3_L-to-H_P Parameter: Treatment Value: 50ppm KNO3 vs. 50ppm KCl
agaatctaccgtcgaccagaagagccctagaaaaccctagtagcatccacaattccacataacctcgcccgcgccgcctcccccacgagacgccttcttgctctcgcttccggtgacgcccgccacttcctccccgacgagatgacgaaacgcaccaagaaggcaggaatcgttggcaaatatggtaccaggtatggtgccagtttacgtaaacagatcaagaagatggaggtctcgcagcactccaaatacttctgtgagttctgtggcaagtttgccgtgaagaggaaagcagttggtatctggggatgcaaggactgtgggaaggttaaggccggtggcgcctacacaatgaacactgctagtgcggtcactgtgagaagcacaatccggcgcctgcgggagcagaccgaagcatgattgcgggcagcttgaaaaggagtacctggatttttggtagtcagccaagagccgtgancccatttnnntttttagctaaatgaacannnaatgtttatctatctgtagtgaccactttgtactcatggtttgtcatgctaaa

SEQ ID NO: 15354 - protein, 92 aa, Zea mays subsp. mays; identical to SEQ ID NO: 11541
  peptide (1)..(92): Ceres Seq. ID no. 13632772
  misc_feature (1)..(92): Homolog of NCBI NO: 34911166 NR Description: putative 60S ribosomal protein L37a [Oryza sativa
  misc_feature (1)..(91): Homolog of NCBI NO: 6831607 NR Description: 60S ribosomal protein L37a
  misc_feature (1)..(92): Homolog of NCBI NO: 6831602 NR Description: 60S RIBOSOMAL PROTEIN L37A
  misc_feature (1)..(92): Homolog of NCBI NO: 15228411 NR Description: 60S ribosomal protein L37a (RPL37aB) [Arabidopsis >gi|20139844|sp|Q9SRK6|R37A_ARATH 60S ribosomal protein L37a
  misc_feature (1)..(91): Homolog of NCBI NO: 18411538 NR Description: 60S ribosomal protein L37a (RPL37aC) [Arabidopsis >gi|19347788|gb|AAL86345.1| unknown protein [Arabidopsis >gi|21436265|gb|AAM51271.1| unknown protein [Arabidopsis
  misc_feature (1)..(91): Homolog of NCBI NO: 1173045 NR Description: 60S RIBOSOMAL PROTEIN L37A >gi|421866|pir||S34661
  misc_feature (6)..(91): Homolog of NCBI NO: 11358898 NR Description: translation initiation factor eIF-4 gamma homolog
  misc_feature (1)..(92): Homolog of NCBI NO: 6093889 NR Description: 60S RIBOSOMAL PROTEIN L37A
  misc_feature (1)..(88): Homolog of NCBI NO: 7441206 NR Description: ribosomal protein L37a [similarity] - slime mold
  misc_feature (1)..(89): Homolog of NCBI NO: 33637090 NR Description: N1 [Toxoplasma gondii]

SEQ ID NO: 15355 - protein, 64 aa, Zea mays subsp. mays; identical to SEQ ID NO: 11542
  peptide (1)..(64): Ceres Seq. ID no. 13632773
  misc_feature (1)..(64): Homolog of NCBI NO: 34911166 NR Description: putative 60S ribosomal protein L37a [Oryza sativa
  misc_feature (1)..(63): Homolog of NCBI NO: 6831607 NR Description: 60S ribosomal protein L37a
  misc_feature (1)..(64): Homolog of NCBI NO: 6831602 NR Description: 60S RIBOSOMAL PROTEIN L37A
  misc_feature (1)..(64): Homolog of NCBI NO: 15228411 NR Description: 60S ribosomal protein L37a (RPL37aB) [Arabidopsis >gi|20139844|sp|Q9SRK6|R37A_ARATH 60S ribosomal protein L37a
  misc_feature (1)..(63): Homolog of NCBI NO: 18411538 NR Description: 60S ribosomal protein L37a (RPL37aC) [Arabidopsis >gi|19347788|gb|AAL86345.1| unknown protein [Arabidopsis >gi|21436265|gb|AAM51271.1| unknown protein [Arabidopsis
  misc_feature (1)..(63): Homolog of NCBI NO: 1173045 NR Description: 60S RIBOSOMAL PROTEIN L37A >gi|421866|pir||S34661
  misc_feature (1)..(63): Homolog of NCBI NO: 11358898 NR Description: translation initiation factor eIF-4 gamma homolog
  misc_feature (1)..(64): Homolog of NCBI NO: 6093889 NR Description: 60S RIBOSOMAL PROTEIN L37A
  misc_feature (1)..(60): Homolog of NCBI NO: 7441206 NR Description: ribosomal protein L37a [similarity] - slime mold
  misc_feature (1)..(61): Homolog of NCBI NO: 33637090 NR Description: N1 [Toxoplasma gondii]

SEQ ID NO: 15356 - DNA, 1932 bp, Zea mays subsp. mays; identical to SEQ ID NO: 5189
  misc_feature (1)..(1932): Ceres Seq. ID no. 13637288
  misc_feature: MA Experiment ID: 108522 Result: Up-regulated in Transcription
  misc_feature: MA Experiment 108522 PARAMETER Experiment Name: Zm_42deg_Heat_P Parameter: Age (day) Value: 8
  misc_feature: MA Experiment 108522 PARAMETER Experiment Name: Zm_42deg_Heat_P Parameter: Organism Value: Zea mays
  misc_feature: MA Experiment 108522 PARAMETER Experiment Name: Zm_42deg_Heat_P Parameter: Plant Line Value: 35A19
  misc_feature: MA Experiment 108522 PARAMETER Experiment Name: Zm_42deg_Heat_P Parameter: Temperature (deg C) Value: 42 vs. 22
  misc_feature: MA Experiment 108522 PARAMETER Experiment Name: Zm_42deg_Heat_P Parameter: Timepoint (hr) Value: 1
  misc_feature: MA Experiment 108522 PARAMETER Experiment Name: Zm_42deg_Heat_P Parameter: Tissue Value: Aerial

SEQ ID NO: 15357 - protein, 538 aa, Zea mays subsp. mays; identical to SEQ ID NO: 5190
  peptide (1)..(538): Ceres Seq. ID no. 13637289
  misc_feature (22)..(538): Homolog of NCBI NO: 14550104 NR Description: histone deacetylase HDA101 [Zea mays]
  misc_feature (22)..(538): Homolog of NCBI NO: 3023947 NR Description: Probable histone deacetylase (RPD3 homolog)
  misc_feature (22)..(537): Homolog of NCBI NO: 31324093 NR Description: histone deacetylase HDAC1 [Oryza sativa (japonica
  misc_feature (22)..(527): Homolog of NCBI NO: 31324097 NR Description: histone deacetylase HDAC3 [Oryza sativa (japonica
  misc_feature (22)..(503): Homolog of NCBI NO: 12698880 NR Description: histone deacetylase HD1 [Oryza sativa]
  misc_feature (29)..(527): Homolog of NCBI NO: 15233694 NR Description: Histone deacetylase [Arabidopsis thaliana]
  misc_feature (29)..(527): Homolog of NCBI NO: 2318131 NR Description: histone deacetylase [Arabidopsis thaliana]
  misc_feature (29)..(527): Homolog of NCBI NO: 9022439 NR Description: histone deacetylase [Mesembryanthemum
  misc_feature (41)..(505): Homolog of NCBI NO: 13128860 NR Description: histone deacetylase 1; reduced potassium
  misc_feature (41)..(505): Homolog of NCBI NO: 30583783 NR Description: Homo sapiens histone deacetylase 1 [synthetic
  misc_feature (29)..(527): Homolog of NCBI NO: 15233694 NR Description: Histone deacetylase [Arabidopsis thaliana]
  misc_feature (29)..(527): Homolog of NCBI NO: 2318131 NR Description: histone deacetylase [Arabidopsis thaliana]
  misc_feature (29)..(527): Homolog of NCBI NO: 9022439 NR Description: histone deacetylase [Mesembryanthemum
  misc_feature (41)..(505): Homolog of NCBI NO: 13128860 NR Description: histone deacetylase 1; reduced potassium
  misc_feature (41)..(505): Homolog of NCBI NO: 30583783 NR Description: Homo sapiens histone deacetylase 1 [synthetic
  misc_feature (22)..(538): Homolog of NCBI NO: 14550104 NR Description: histone deacetylase HDA101 [Zea mays]
  misc_feature (22)..(538): Homolog of NCBI NO: 3023947 NR Description: Probable histone deacetylase (RPD3 homolog)
  misc_feature (22)..(537): Homolog of NCBI NO: 31324093 NR Description: histone deacetylase HDAC1 [Oryza sativa (japonica
  misc_feature (22)..(527): Homolog of NCBI NO: 31324097 NR Description: histone deacetylase HDAC3 [Oryza sativa (japonica
  misc_feature (22)..(503): Homolog of NCBI NO: 12698880 NR Description: histone deacetylase HD1 [Oryza sativa]
  misc_feature (22)..(538): Homolog of NCBI NO: 14550104 NR Description: histone deacetylase HDA101 [Zea mays]
  misc_feature (22)..(538): Homolog of NCBI NO: 3023947 NR Description: Probable histone deacetylase (RPD3 homolog)
  misc_feature (22)..(537): Homolog of NCBI NO: 31324093 NR Description: histone deacetylase HDAC1 [Oryza sativa (japonica
  misc_feature (22)..(527): Homolog of NCBI NO: 31324097 NR Description: histone deacetylase HDAC3 [Oryza sativa (japonica
  misc_feature (22)..(503): Homolog of NCBI NO: 12698880 NR Description: histone deacetylase HD1 [Oryza sativa]
  misc_feature (29)..(527): Homolog of NCBI NO: 15233694 NR Description: Histone deacetylase [Arabidopsis thaliana]
  misc_feature (29)..(527): Homolog of NCBI NO: 2318131 NR Description: histone deacetylase [Arabidopsis thaliana]
  misc_feature (29)..(527): Homolog of NCBI NO: 9022439 NR Description: histone deacetylase [Mesembryanthemum
  misc_feature (41)..(505): Homolog of NCBI NO: 13128860 NR Description: histone deacetylase 1; reduced potassium
  misc_feature (41)..(505): Homolog of NCBI NO: 30583783 NR Description: Homo sapiens histone deacetylase 1 [synthetic

SEQ ID NO: 15358 - protein, 517 aa, Zea mays subsp. mays; identical to SEQ ID NO: 5191
  peptide (1)..(517): Ceres Seq. ID no. 13637290
  misc_feature (1)..(517): Homolog of NCBI NO: 14550104 NR Description: histone deacetylase HDA101 [Zea mays]
  misc_feature (1)..(517): Homolog of NCBI NO: 3023947 NR Description: Probable histone deacetylase (RPD3 homolog)
  misc_feature (1)..(516): Homolog of NCBI NO: 31324093 NR Description: histone deacetylase HDAC1 [Oryza sativa (japonica
  misc_feature (1)..(506): Homolog of NCBI NO: 31324097 NR Description: histone deacetylase HDAC3 [Oryza sativa (japonica
  misc_feature (1)..(482): Homolog of NCBI NO: 12698880 NR Description: histone deacetylase HD1 [Oryza sativa]
  misc_feature (8)..(506): Homolog of NCBI NO: 15233694 NR Description: Histone deacetylase [Arabidopsis thaliana]
  misc_feature (8)..(506): Homolog of NCBI NO: 2318131 NR Description: histone deacetylase [Arabidopsis thaliana]
  misc_feature (8)..(506): Homolog of NCBI NO: 9022439 NR Description: histone deacetylase [Mesembryanthemum
  misc_feature (20)..(484): Homolog of NCBI NO: 13128860 NR Description: histone deacetylase 1; reduced potassium
  misc_feature (20)..(484): Homolog of NCBI NO: 30583783 NR Description: Homo sapiens histone deacetylase 1 [synthetic
  misc_feature (1)..(517): Homolog of NCBI NO: 14550104 NR Description: histone deacetylase HDA101 [Zea mays]
  misc_feature (1)..(517): Homolog of NCBI NO: 3023947 NR Description: Probable histone deacetylase (RPD3 homolog)
  misc_feature (1)..(516): Homolog of NCBI NO: 31324093 NR Description: histone deacetylase HDAC1 [Oryza sativa (japonica
  misc_feature (1)..(506): Homolog of NCBI NO: 31324097 NR Description: histone deacetylase HDAC3 [Oryza sativa (japonica
  misc_feature (1)..(482): Homolog of NCBI NO: 12698880 NR Description: histone deacetylase HD1 [Oryza sativa]
  misc_feature (8)..(506): Homolog of NCBI NO: 15233694 NR Description: Histone deacetylase [Arabidopsis thaliana]
  misc_feature (8)..(506): Homolog of NCBI NO: 2318131 NR Description: histone deacetylase [Arabidopsis thaliana]
  misc_feature (8)..(506): Homolog of NCBI NO: 9022439 NR Description: histone deacetylase [Mesembryanthemum
  misc_feature (20)..(484): Homolog of NCBI NO: 13128860 NR Description: histone deacetylase 1; reduced potassium
  misc_feature (20)..(484): Homolog of NCBI NO: 30583783 NR Description: Homo sapiens histone deacetylase 1 [synthetic
  misc_feature (1)..(517): Homolog of NCBI NO: 14550104 NR Description: histone deacetylase HDA101 [Zea mays]
  misc_feature (1)..(517): Homolog of NCBI NO: 3023947 NR Description: Probable histone deacetylase (RPD3 homolog)
  misc_feature (1)..(516): Homolog of NCBI NO: 31324093 NR Description: histone deacetylase HDAC1 [Oryza sativa (japonica
  misc_feature (1)..(506): Homolog of NCBI NO: 31324097 NR Description: histone deacetylase HDAC3 [Oryza sativa (japonica
  misc_feature (1)..(482): Homolog of NCBI NO: 12698880 NR Description: histone deacetylase HD1 [Oryza sativa]
  misc_feature (8)..(506): Homolog of NCBI NO: 15233694 NR Description: Histone deacetylase [Arabidopsis thaliana]
  misc_feature (8)..(506): Homolog of NCBI NO: 2318131 NR Description: histone deacetylase [Arabidopsis thaliana]
  misc_feature (8)..(506): Homolog of NCBI NO: 9022439 NR Description: histone deacetylase [Mesembryanthemum
  misc_feature (20)..(484): Homolog of NCBI NO: 13128860 NR Description: histone deacetylase 1; reduced potassium
  misc_feature (20)..(484): Homolog of NCBI NO: 30583783 NR Description: Homo sapiens histone deacetylase 1 [synthetic

SEQ ID NO: 15359 - protein, 474 aa, Zea mays subsp. mays; identical to SEQ ID NO: 5192
  peptide (1)..(474): Ceres Seq. ID no. 13637291
  misc_feature (1)..(474): Homolog of NCBI NO: 14550104 NR Description: histone deacetylase HDA101 [Zea mays]
  misc_feature (1)..(474): Homolog of NCBI NO: 3023947 NR Description: Probable histone deacetylase (RPD3 homolog)
  misc_feature (1)..(473): Homolog of NCBI NO: 31324093 NR Description: histone deacetylase HDAC1 [Oryza sativa (japonica
  misc_feature (1)..(463): Homolog of NCBI NO: 31324097 NR Description: histone deacetylase HDAC3 [Oryza sativa (japonica
  misc_feature (1)..(439): Homolog of NCBI NO: 12698880 NR Description: histone deacetylase HD1 [Oryza sativa]
  misc_feature (1)..(463): Homolog of NCBI NO: 15233694 NR Description: Histone deacetylase [Arabidopsis thaliana]
  misc_feature (1)..(463): Homolog of NCBI NO: 2318131 NR Description: histone deacetylase [Arabidopsis thaliana]
  misc_feature (1)..(463): Homolog of NCBI NO: 9022439 NR Description: histone deacetylase [Mesembryanthemum
  misc_feature (1)..(441): Homolog of NCBI NO: 13128860 NR Description: histone deacetylase 1; reduced potassium
  misc_feature (1)..(441): Homolog of NCBI NO: 30583783 NR Description: Homo sapiens histone deacetylase 1 [synthetic
  misc_feature (1)..(474): Homolog of NCBI NO: 14550104 NR Description: histone deacetylase HDA101 [Zea mays]
  misc_feature (1)..(474): Homolog of NCBI NO: 3023947 NR Description: Probable histone deacetylase (RPD3 homolog)
  misc_feature (1)..(473): Homolog of NCBI NO: 31324093 NR Description: histone deacetylase HDAC1 [Oryza sativa (japonica
  misc_feature (1)..(463): Homolog of NCBI NO: 31324097 NR Description: histone deacetylase HDAC3 [Oryza sativa (japonica
  misc_feature (1)..(439): Homolog of NCBI NO: 12698880 NR Description: histone deacetylase HD1 [Oryza sativa]
  misc_feature (1)..(463): Homolog of NCBI NO: 15233694 NR Description: Histone deacetylase [Arabidopsis thaliana]
  misc_feature (1)..(463): Homolog of NCBI NO: 2318131 NR Description: histone deacetylase [Arabidopsis thaliana]
  misc_feature (1)..(463): Homolog of NCBI NO: 9022439 NR Description: histone deacetylase [Mesembryanthemum
  misc_feature (1)..(441): Homolog of NCBI NO: 13128860 NR Description: histone deacetylase 1; reduced potassium
  misc_feature (1)..(441): Homolog of NCBI NO: 30583783 NR Description: Homo sapiens histone deacetylase 1 [synthetic
  misc_feature (1)..(474): Homolog of NCBI NO: 14550104 NR Description: histone deacetylase HDA101 [Zea mays]
  misc_feature (1)..(474): Homolog of NCBI NO: 3023947 NR Description: Probable histone deacetylase (RPD3 homolog)
  misc_feature (1)..(473): Homolog of NCBI NO: 31324093 NR Description: histone deacetylase HDAC1 [Oryza sativa (japonica
  misc_feature (1)..(463): Homolog of NCBI NO: 31324097 NR Description: histone deacetylase HDAC3 [Oryza sativa (japonica
  misc_feature (1)..(439): Homolog of NCBI NO: 12698880 NR Description: histone deacetylase HD1 [Oryza sativa]
  misc_feature (1)..(463): Homolog of NCBI NO: 15233694 NR Description: Histone deacetylase [Arabidopsis thaliana]
  misc_feature (1)..(463): Homolog of NCBI NO: 2318131 NR Description: histone deacetylase [Arabidopsis thaliana]
  misc_feature (1)..(463): Homolog of NCBI NO: 9022439 NR Description: histone deacetylase [Mesembryanthemum
  misc_feature (1)..(441): Homolog of NCBI NO: 13128860 NR Description: histone deacetylase 1; reduced potassium
  misc_feature (1)..(441): Homolog of NCBI NO: 30583783 NR Description: Homo sapiens histone deacetylase 1 [synthetic

SEQ ID NO: 15360 - DNA, 2430 bp, Zea mays subsp. mays
  misc_feature (1)..(2430): Ceres Seq. ID no. 15180086
  misc_feature: MA Experiment ID: 108527 Result: Down-regulated in Transcription
  misc_feature: MA Experiment 108527 PARAMETER Experiment Name: Zm_5mM_NO_P Parameter: Age (day) Value: 8
  misc_feature: MA Experiment 108527 PARAMETER Experiment Name: Zm_5mM_NO_P Parameter: Organism Value: Zea mays
  misc_feature: MA Experiment 108527 PARAMETER Experiment Name: Zm_5mM_NO_P Parameter: Plant Line Value: 35A19
  misc_feature: MA Experiment 108527 PARAMETER Experiment Name: Zm_5mM_NO_P Parameter: Timepoint (hr) Value: 6
  misc_feature: MA Experiment 108527 PARAMETER Experiment Name: Zm_5mM_NO_P Parameter: Tissue Value: Aerial
  misc_feature: MA Experiment 108527 PARAMETER Experiment Name: Zm_5mM_NO_P Parameter: Treatment Value: 5mM NO vs. No Treatment
  misc_feature: MA Experiment ID: 20000488 Result: Down-regulated in Transcription
  misc_feature: MA Experiment 20000488 PARAMETER Experiment Name: Zm_50mM_NH4NO3_L_to_H_P Parameter: Organism Value: Zea mays
  misc_feature: MA Experiment 20000488 PARAMETER Experiment Name: Zm_50mM_NH4NO3_L_to_H_P Parameter: Timepoint (hr) Value: 8
  misc_feature: MA Experiment 20000488 PARAMETER Experiment Name: Zm_50mM_NH4NO3_L_to_H_P Parameter: Tissue Value: Leaves
  misc_feature: MA Experiment 20000488 PARAMETER Experiment Name: Zm_50mM_NH4NO3_L_to_H_P Parameter: Treatment Value: 50mM NH4NO3 vs. 100mM Mannitol
aaaaaaaaccgagtcgagtccacagtccacaccaccaccgcgaggtccactaaaaaaacaagagcattaccggcaccaatcaatcaggctggcagtggagtgacagcggcggcaacaccacgcccacgcggcgccggagccgatcccccgatggatctcccgccgctctcccaccaggccctcttcgccgtcgtccgatccgccgacgcgcccgccgtccgcgcggtcctggccgacgccgaggcgtcggccacctccttggccgcgctcgccgccgctcagacggacgccggggaaaccgcgctgtacgttgccgcggaggccggcagcgaggaggtcgtgcgcctcctcctccctctctacgacttcgaggcagccaccgtccgctcacgccttgacctcgacgccttccatgtcgccgccaagcagggccacaccggggttgtgaaagagttcttggggcggtgcccagggctttgctcagtctgtgactcttccaacactagtcccctctactcggctgctgtcaaggatcacttggatgtggtaaatgctatactggacactgatgatagctgcataaagattgtgcggaagaatgggaaaacatccctacatactgctgcaagaattggataccatcgtattgtcaaagcactcatagagagagatccaggaatcgttccgatcaatgataggaagggacaaactgcacttcacatggctgtgaagggcaaaaatacagatgtagtggaagagttattgatggctgatgtttccattctcaatgtgagggacaagaaaggaaatactgctttgcacatagctacacggaaatggaggccccagaatatctcaatgtgaaaaacatgtcgtatgtaagccatggtggtttcttagtggagcagagcatctattggaagagcaaccatatatctaagaacacacgaccatcttataaagcactataaagacattagttgctgctgctattaactgtctgccactagtcttactaagtcattgcaacggcgcaggaatgtatctggatgctaatatctcggtatcactattgtggaagtgtggctgacttctcaacacactattctagcagtccagcccaccccacataggccttaaagtattatataaatgatgcttgtgtgttaaaggaagatcaaaaatagccatccagaaactcacagaacgatggggtgcttttctattttatggagtatttacgattagtgttctaacttctaagttaccttactctcaaactccgaacatatgtttatattatttgtgggaattgttcatacttgattccaaacatgctttgctctgacttgccaactttattttaccttactagtcactattgttttcagatggtacagcttcttcttagctatgaatcacttgaagttaatgctatcaacagtcaaaatgaaacagctatggatttggctgacaaagttccttatggtgagtctaaaacggaaataatagagtggctgacagaagctggtgcaaagaatgccagaaatgttgggaaaattgatgaggcatcagaactgaggagaactgtgagcgatatcaagcacaatgttcaggcacagcttagcgagaatgctaaaaccaacaaacgagtgactgggattcgcaaagagttgcagaaactgcatagagaagctatccaaaacaccatcaattcagtcaccttggtagcgaccctgattgcctccattgccttcgtcgccatattcaatctgccaggtcaatacttccaggatgtgaatagtgggggagacattggtgaggctgaaatagccaagcttaccggtttccgtgtcttctgccttctgaacgctactgctctcttcatctccctcgcggtggtcgtggtgcagatcaccttggttgcctgggaaactggtgcccagaagcaagttatcaagatcgtgaataagctcatgtggacggcatgccttagcacgggtgtggcttttatctcgctggcctatgttgtagttggcccgcagcatgcctggatggccttcacggcatcagccatcggagggccgatcatgattggaactttcctgttcctagcctatcttctgttgcgcccacggttcaagttcggcgaagacagacagcgccgcatcaagagggcaagcggcagcaaatccttctcctggtcaatccatgatgggttttcagatctggaagccttctctgatcatgagaagaggatctatgccctgtaggagggtgtaacagtaactactcccacaagaggcaactgggagagtacaaatggttcatgtatatatttggtttagccgttttagcctagccgctgttagacctttctccccatgtacaatatctaataatgaagagctgcagctattgtaaagtgct

SEQ ID NO: 15361 - protein, 312 aa, Zea mays subsp. mays
  peptide (1)..(312): Ceres Seq. ID no. 15180087
  misc_feature (19)..(312): Homolog of NCBI NO: 21537142 NR Description: unknown [Arabidopsis thaliana]
  misc_feature (19)..(312): Homolog of NCBI NO: 18379277 NR Description: ankyrin repeat protein family [Arabidopsis
  misc_feature (19)..(312): Homolog of NCBI NO: 15225141 NR Description: ankyrin repeat protein family [Arabidopsis
  misc_feature (19)..(312): Homolog of NCBI NO: 15222993 NR Description: ankyrin repeat protein family [Arabidopsis
  misc_feature (19)..(312): Homolog of NCBI NO: 15220595 NR Description: ankyrin repeat protein family [Arabidopsis
  misc_feature (20)..(312): Homolog of NCBI NO: 24796797 NR Description: putative ankyrin repeat containing protein [Oryza
  misc_feature (19)..(312): Homolog of NCBI NO: 34908074 NR Description: P0506B12.26 [Oryza sativa (japonica
  misc_feature (19)..(312): Homolog of NCBI NO: 15238604 NR Description: ankyrin repeat protein family [Arabidopsis
  misc_feature (19)..(300): Homolog of NCBI NO: 15230470 NR Description: ankyrin repeat protein family [Arabidopsis
  misc_feature (13)..(300): Homolog of NCBI NO: 15795155 NR Description: ankyrin-like protein [Arabidopsis thaliana]
MLCSDLPTLFYLTSHYCFQMVQLLLSYESLEVNAINSQNETAMDLADKVPYGESKTEIIEWLTEAGAKNARNVGKIDEASELRRTVSDIKHNVQAQLSENAKTNKRVTGIRKELQKLHREAIQNTINSVTLVATLIASIAFVAIFNLPGQYFQDVNSGGDIGEAEIAKLTGFRVFCLLNATALFISLAVVVVQITLVAWETGAQKQVIKIVNKLMWTACLSTGVAFISLAYVVVGPQHAWMAFTASAIGGPIMIGTFLFLAYLLLRPRFKFGEDRQRRIKRASGSKSFSWSIHDGFSDLEAFSDHEKRIYAL

SEQ ID NO: 15362 - protein, 293 aa, Zea mays subsp. mays; identical to SEQ ID NO: 3352
  peptide (1)..(293): Ceres Seq. ID no. 15180088
  misc_feature (1)..(293): Homolog of NCBI NO: 21537142 NR Description: unknown [Arabidopsis thaliana]
  misc_feature (1)..(293): Homolog of NCBI NO: 18379277 NR Description: ankyrin repeat protein family [Arabidopsis
  misc_feature (1)..(293): Homolog of NCBI NO: 15225141 NR Description: ankyrin repeat protein family [Arabidopsis
  misc_feature (1)..(293): Homolog of NCBI NO: 15222993 NR Description: ankyrin repeat protein family [Arabidopsis
  misc_feature (1)..(293): Homolog of NCBI NO: 15220595 NR Description: ankyrin repeat protein family [Arabidopsis
  misc_feature (1)..(293): Homolog of NCBI NO: 24796797 NR Description: putative ankyrin repeat containing protein [Oryza
  misc_feature (1)..(293): Homolog of NCBI NO: 34908074 NR Description: P0506B12.26 [Oryza sativa (japonica
  misc_feature (1)..(293): Homolog of NCBI NO: 15238604 NR Description: ankyrin repeat protein family [Arabidopsis
  misc_feature (1)..(281): Homolog of NCBI NO: 15230470 NR Description: ankyrin repeat protein family [Arabidopsis
  misc_feature (1)..(281): Homolog of NCBI NO: 15795155 NR Description: ankyrin-like protein [Arabidopsis thaliana]

SEQ ID NO: 15363 - protein, 287 aa, Zea mays subsp. mays
  peptide (1)..(287): Ceres Seq. ID no. 15180089
  misc_feature (166)..(196): Pfam Name: Ankyrin repeat Pfam Description: Ankyrin repeat
  misc_feature (56)..(287): Homolog of NCBI NO: 21537142 NR Description: unknown [Arabidopsis thaliana]
  misc_feature (56)..(287): Homolog of NCBI NO: 18379277 NR Description: ankyrin repeat protein family [Arabidopsis
  misc_feature (101)..(278): Homolog of NCBI NO: 18379277 NR Description: ankyrin repeat protein family [Arabidopsis
  misc_feature (101)..(278): Homolog of NCBI NO: 21537142 NR Description: unknown [Arabidopsis thaliana]
  misc_feature (87)..(281): Homolog of NCBI NO: 15225141 NR Description: ankyrin repeat protein family [Arabidopsis
  misc_feature (61)..(287): Homolog of NCBI NO: 15222993 NR Description: ankyrin repeat protein family [Arabidopsis
  misc_feature (87)..(281): Homolog of NCBI NO: 15220595 NR Description: ankyrin repeat protein family [Arabidopsis
  misc_feature (60)..(281): Homolog of NCBI NO: 24796797 NR Description: putative ankyrin repeat containing protein [Oryza
  misc_feature (61)..(287): Homolog of NCBI NO: 34908074 NR Description: P0506B12.26 [Oryza sativa (japonica
  misc_feature (61)..(281): Homolog of NCBI NO: 15238604 NR Description: ankyrin repeat protein family [Arabidopsis
KKNRVESTVHTTTARSTKKTRALPAPINQAGSGVTAAATPRPRGAGADPPMDLPPLSHQALFAVVRSADAPAVRAVLADAEASATSLAALAAAQTDAGETALYVAAEAGSEEVVRLLLPLYDFEAATVRSRLDLDAFHVAAKQGHTGVVKEFLGRCPGLCSVCDSSNTSPLYSAAVKDHLDVVNAILDTDDSCIKIVRKNGKTSLHTAARIGYHRIVKALIERDPGIVPINDRKGQTALHMAVKGKNTDVVEELLMADVSILNVRDKKGNTALHIATRKWRPQNISM

SEQ ID NO: 15364 - DNA, 537 bp, Zea mays subsp. mays
  misc_feature (1)..(537): Ceres Seq. ID no. 15176189
  misc_feature: MA Experiment ID: 108515 Result: Down-regulated in Transcription
  misc_feature: MA Experiment 108515 PARAMETER Experiment Name: Zm_2mM_SA_P Parameter: Age (day) Value: 8
  misc_feature: MA Experiment 108515 PARAMETER Experiment Name: Zm_2mM_SA_P Parameter: Organism Value: Zea mays
  misc_feature: MA Experiment 108515 PARAMETER Experiment Name: Zm_2mM_SA_P Parameter: Plant Line Value: 35A19
  misc_feature: MA Experiment 108515 PARAMETER Experiment Name: Zm_2mM_SA_P Parameter: Timepoint (hr) Value: 12
  misc_feature: MA Experiment 108515 PARAMETER Experiment Name: Zm_2mM_SA_P Parameter: Tissue Value: Aerial
  misc_feature: MA Experiment 108515 PARAMETER Experiment Name: Zm_2mM_SA_P Parameter: Treatment Value: 2mM SA vs. No Treatment
  misc_feature: MA Experiment ID: 108532 Result: Up-regulated in Transcription
  misc_feature: MA Experiment 108532 PARAMETER Experiment Name: Zm_20uM_KNO3_H-to-L_P Parameter: Age (day) Value: 11
  misc_feature: MA Experiment 108532 PARAMETER Experiment Name: Zm_20uM_KNO3_H-to-L_P Parameter: Organism Value: Zea mays
  misc_feature: MA Experiment 108532 PARAMETER Experiment Name: Zm_20uM_KNO3_H-to-L_P Parameter: Plant Line Value: 35A19
  misc_feature: MA Experiment 108532 PARAMETER Experiment Name: Zm_20uM_KNO3_H-to-L_P Parameter: Timepoint (hr) Value: 16
  misc_feature: MA Experiment 108532 PARAMETER Experiment Name: Zm_20uM_KNO3_H-to-L_P Parameter: Tissue Value: Roots
  misc_feature: MA Experiment 108532 PARAMETER Experiment Name: Zm_20uM_KNO3_H-to-L_P Parameter: Treatment Value: 20uM KNO3 vs. 60mM KNO3
  misc_feature: MA Experiment ID: 108535 Result: Down-regulated in Transcription
  misc_feature: MA Experiment 108535 PARAMETER Experiment Name: Zm_Meristem_P Parameter: Age (day) Value: 8
  misc_feature: MA Experiment 108535 PARAMETER Experiment Name: Zm_Meristem_P Parameter: Organism Value: Zea mays
  misc_feature: MA Experiment 108535 PARAMETER Experiment Name: Zm_Meristem_P Parameter: Plant Line Value: 35A19
  misc_feature: MA Experiment 108535 PARAMETER Experiment Name: Zm_Meristem_P Parameter: Tissue Value: Root Meristem vs. Above Root Meristem
  misc_feature: MA Experiment ID: 108536 Result: Up-regulated in Transcription
  misc_feature: MA Experiment 108536 PARAMETER Experiment Name: Zm_Meristem_P Parameter: Age (day) Value: 8
  misc_feature: MA Experiment 108536 PARAMETER Experiment Name: Zm_Meristem_P Parameter: Organism Value: Zea mays
  misc_feature: MA Experiment 108536 PARAMETER Experiment Name: Zm_Meristem_P Parameter: Plant Line Value: 35A19
  misc_feature: MA Experiment 108536 PARAMETER Experiment Name: Zm_Meristem_P Parameter: Tissue Value: Shoot Meristem vs. Above Shoot Meristem
  misc_feature: MA Experiment ID: 108543 Result: Up-regulated in Transcription
  misc_feature: MA Experiment ID: 108544 Result: Up-regulated in Transcription
  misc_feature: MA Experiment ID: 108545 Result: Down-regulated in Transcription
  misc_feature: MA Experiment 108545 PARAMETER Experiment Name: Zm_Imbibed_Seeds_P Parameter: Age (day) Value: 3 vs. 2
  misc_feature: MA Experiment 108545 PARAMETER Experiment Name: Zm_Imbibed_Seeds_P Parameter: Organism Value: Zea mays
  misc_feature: MA Experiment 108545 PARAMETER Experiment Name: Zm_Imbibed_Seeds_P Parameter: Plant Line Value: 35A19
  misc_feature: MA Experiment 108545 PARAMETER Experiment Name: Zm_Imbibed_Seeds_P Parameter: Tissue Value: Aerial vs. Embryo
  misc_feature: MA Experiment ID: 20000108 Result: Down-regulated in Transcription
  misc_feature: MA Experiment 20000108 PARAMETER Experiment Name: Zm_Root-Tips_P Parameter: Age (day) Value: 12
  misc_feature: MA Experiment 20000108 PARAMETER Experiment Name: Zm_Root-Tips_P Parameter: Organism Value: Zea mays
  misc_feature: MA Experiment 20000108 PARAMETER Experiment Name: Zm_Root-Tips_P Parameter: Tissue Value: Root tips vs. Root mid region    35
  misc_feature: MA Experiment 20000108 PARAMETER Experiment Name: Zm_Root-Tips_P Parameter: Tissue Value: Root tips vs. Root mid region   Sequence Listing-Misc Features (4)
  misc_feature: MA Experiment ID: 20000480 Result: Up-regulated in Transcription
  misc_feature: MA Experiment 20000480 PARAMETER Experiment Name: Zm_Drought_P Parameter: Age (day) Value: 11
  misc_feature: MA Experiment 20000480 PARAMETER Experiment Name: Zm_Drought_P Parameter: Organism Value: Zea mays
  misc_feature: MA Experiment 20000480 PARAMETER Experiment Name: Zm_Drought_P Parameter: Plant Line Value: 35A19
  misc_feature: MA Experiment 20000480 PARAMETER Experiment Name: Zm_Drought_P Parameter: Timepoint (hr) Value: 72
  misc_feature: MA Experiment 20000480 PARAMETER Experiment Name: Zm_Drought_P Parameter: Tissue Value: Aerial
  misc_feature: MA Experiment 20000480 PARAMETER Experiment Name: Zm_Drought_P Parameter: Treatment Value: Drought vs. No Drought
  misc_feature: MA Experiment ID: 20000535 Result: Down-regulated in Transcription
  misc_feature: MA Experiment 20000535 PARAMETER Experiment Name: Zm_Hybrid_Seed_Dev_P Parameter: DAP Value: 30 vs. 12
  misc_feature: MA Experiment 20000535 PARAMETER Experiment Name: Zm_Hybrid_Seed_Dev_P Parameter: Organism Value: Zea mays
  misc_feature: MA Experiment 20000535 PARAMETER Experiment Name: Zm_Hybrid_Seed_Dev_P Parameter: Plant Line Value: 35A19
  misc_feature: MA Experiment 20000535 PARAMETER Experiment Name: Zm_Hybrid_Seed_Dev_P Parameter: Tissue Value: Embryo vs. Unfert Floret
aaccagaacagtccctccctcggcctatccggctactcagcaccaagaacagacggccaagtgcactcgcgcctttatataaaggaatccaccagcagcattagctttggtttcttctccttgtatgcacacaaacccatcgcagggcattctcgagcatagcttctctgcctctctctcccctcctctcctctcgtccactcctttgtccaaagcttcgagatggctcagcagcagaaggtggtggtcagggttccaaccatgacagatgacaagatcaagcagaaggccatcgaagctgttgcggacatttacggtattgactccatagcagcggatctgaaggagaacaagatgaccatcataggcgagatggatgcagtagcgattgccaagaagttaaagaagattggaaagattgacattgtgtctgttggacctgcaaaagaagaaaagaaggaagaaaagaaagaggagaaaaagaaggaaaagaaagaagagaagaaagaggagaagaaagaagagaagaaagaagag

SEQ ID NO: 15365 - protein, 105 aa, Zea mays subsp. mays
  peptide (1)..(105): Ceres Seq. ID no. 15176190
  misc_feature (1)..(104): Pfam Name: Ubiquitin carboxyl-terminal hydrolase Pfam Description: Ubiquitin carboxyl-terminal hydrolase
  misc_feature (1)..(104): Homolog of NCBI NO: 37535864 NR Description: hypothetical protein [Oryza sativa (japonica group)] >gi|22758342|gb|AAN05546.1| hypothetical protein [Oryza
  misc_feature (5)..(104): Homolog of NCBI NO: 21554550 NR Description: unknown [Arabidopsis thaliana]
  misc_feature (5)..(104): Homolog of NCBI NO: 18420713 NR Description: heavy-metal-associated domain-containing protein
  misc_feature (5)..(104): Homolog of NCBI NO: 26452654 NR Description: unknown protein [Arabidopsis thaliana]
  misc_feature (1)..(87): Homolog of NCBI NO: 32489836 NR Description: OSJNBb0039L24.19 [Oryza sativa (japonica
  misc_feature (40)..(104): Homolog of NCBI NO: 10176843 NR Description: gene_id:MRO11.20~unknown protein [Arabidopsis
  misc_feature (5)..(104): Homolog of NCBI NO: 13543783 NR Description: Unknown (protein for MGC:7642) [Mus musculus]
MAQQQKVVVRVPTMTDDKIKQKAIEAVADIYGIDSIAADLKENKMTIIGEMDAVAIAKKLKKIGKIDIVSVGPAKEEKKEEKKEEKKKEKKEEKKEEKKEEKKEE

SEQ ID NO: 15366 - protein, 92 aa, Zea mays subsp. mays
  peptide (1)..(92): Ceres Seq. ID no. 15176191
  misc_feature (1)..(91): Pfam Name: Ubiquitin carboxyl-terminal hydrolase Pfam Description: Ubiquitin carboxyl-terminal hydrolase
  misc_feature (1)..(91): Homolog of NCBI NO: 37535864 NR Description: hypothetical protein [Oryza sativa (japonica group)] >gi|22758342|gb|AAN05546.1| hypothetical protein [Oryza
  misc_feature (1)..(91): Homolog of NCBI NO: 21554550 NR Description: unknown [Arabidopsis thaliana]
  misc_feature (1)..(91): Homolog of NCBI NO: 18420713 NR Description: heavy-metal-associated domain-containing protein
  misc_feature (1)..(91): Homolog of NCBI NO: 26452654 NR Description: unknown protein [Arabidopsis thaliana]
  misc_feature (1)..(74): Homolog of NCBI NO: 32489836 NR Description: OSJNBb0039L24.19 [Oryza sativa (japonica
  misc_feature (27)..(91): Homolog of NCBI NO: 10176843 NR Description: gene_id:MRO11.20~unknown protein [Arabidopsis
  misc_feature (1)..(91): Homolog of NCBI NO: 13543783 NR Description: Unknown (protein for MGC:7642) [Mus musculus]
MTDDKIKQKAIEAVADIYGIDSIAADLKENKMTIIGEMDAVAIAKKLKKIGKIDIVSVGPAKEEKKEEKKEEKKKEKKEEKKEEKKEEKKEE

SEQ ID NO: 15367 - protein, 61 aa, Zea mays subsp. mays
  peptide (1)..(61): Ceres Seq. ID no. 15176192
  misc_feature (1)..(60): Pfam Name: Ubiquitin carboxyl-terminal hydrolase Pfam Description: Ubiquitin carboxyl-terminal hydrolase
  misc_feature (1)..(60): Homolog of NCBI NO: 37535864 NR Description: hypothetical protein [Oryza sativa (japonica group)] >gi|22758342|gb|AAN05546.1| hypothetical protein [Oryza
  misc_feature (1)..(60): Homolog of NCBI NO: 21554550 NR Description: unknown [Arabidopsis thaliana]
  misc_feature (1)..(60): Homolog of NCBI NO: 18420713 NR Description: heavy-metal-associated domain-containing protein
  misc_feature (1)..(60): Homolog of NCBI NO: 26452654 NR Description: unknown protein [Arabidopsis thaliana]
  misc_feature (1)..(43): Homolog of NCBI NO: 32489836 NR Description: OSJNBb0039L24.19 [Oryza sativa (japonica
  misc_feature (1)..(60): Homolog of NCBI NO: 10176843 NR Description: gene_id:MRO11.20~unknown protein [Arabidopsis
  misc_feature (1)..(60): Homolog of NCBI NO: 13543783 NR Description: Unknown (protein for MGC:7642) [Mus musculus]
MTIIGEMDAVAIAKKLKKIGKIDIVSVGPAKEEKKEEKKEEKKKEKKEEKKEEKKEEKKEE

SEQ ID NO: 15368 - DNA, 1396 bp, Zea mays subsp. mays; identical to SEQ ID NO: 14449
  misc_feature (1)..(1396): Ceres Seq. ID no. 13636262
  misc_feature: MA Experiment ID: 108504 Result: Down-regulated in Transcription
  misc_feature: MA Experiment 108504 PARAMETER Experiment Name: Zm_Drought_P Parameter: Age (day) Value: 8
  misc_feature: MA Experiment 108504 PARAMETER Experiment Name: Zm_Drought_P Parameter: Organism Value: Zea mays
  misc_feature: MA Experiment 108504 PARAMETER Experiment Name: Zm_Drought_P Parameter: Plant Line Value: 35A19
  misc_feature: MA Experiment 108504 PARAMETER Experiment Name: Zm_Drought_P Parameter: Timepoint (hr) Value: 12
  misc_feature: MA Experiment 108504 PARAMETER Experiment Name: Zm_Drought_P Parameter: Tissue Value: Aerial
  misc_feature: MA Experiment 108504 PARAMETER Experiment Name: Zm_Drought_P Parameter: Treatment Value: Drought vs. No Drought
  misc_feature: MA Experiment ID: 108522 Result: Up-regulated in Transcription
  misc_feature: MA Experiment 108522 PARAMETER Experiment Name: Zm_42deg_Heat_P Parameter: Age (day) Value: 8
  misc_feature: MA Experiment 108522 PARAMETER Experiment Name: Zm_42deg_Heat_P Parameter: Organism Value: Zea mays
  misc_feature: MA Experiment 108522 PARAMETER Experiment Name: Zm_42deg_Heat_P Parameter: Plant Line Value: 35A19
  misc_feature: MA Experiment 108522 PARAMETER Experiment Name: Zm_42deg_Heat_P Parameter: Temperature (deg C) Value: 42 vs. 22
  misc_feature: MA Experiment 108522 PARAMETER Experiment Name: Zm_42deg_Heat_P Parameter: Timepoint (hr) Value: 1
  misc_feature: MA Experiment 108522 PARAMETER Experiment Name: Zm_42deg_Heat_P Parameter: Tissue Value: Aerial
  misc_feature: MA Experiment ID: 108523 Result: Up-regulated in Transcription
  misc_feature: MA Experiment 108523 PARAMETER Experiment Name: Zm_42deg_Heat_P Parameter: Age (day) Value: 8
  misc_feature: MA Experiment 108523 PARAMETER Experiment Name: Zm_42deg_Heat_P Parameter: Organism Value: Zea mays
  misc_feature: MA Experiment 108523 PARAMETER Experiment Name: Zm_42deg_Heat_P Parameter: Plant Line Value: 35A19
  misc_feature: MA Experiment 108523 PARAMETER Experiment Name: Zm_42deg_Heat_P Parameter: Temperature (deg C) Value: 42 vs. 22
  misc_feature: MA Experiment 108523 PARAMETER Experiment Name: Zm_42deg_Heat_P Parameter: Timepoint (hr) Value: 6
  misc_feature: MA Experiment 108523 PARAMETER Experiment Name: Zm_42deg_Heat_P Parameter: Tissue Value: Aerial
  misc_feature: MA Experiment ID: 108529 Result: Down-regulated in Transcription
  misc_feature: MA Experiment 108529 PARAMETER Experiment Name: Zm_Imbibed_Seeds_P Parameter: Age (day) Value: 5 vs. 2
  misc_feature: MA Experiment 108529 PARAMETER Experiment Name: Zm_Imbibed_Seeds_P Parameter: Organism Value: Zea mays
  misc_feature: MA Experiment 108529 PARAMETER Experiment Name: Zm_Imbibed_Seeds_P Parameter: Plant Line Value: 35A19
  misc_feature: MA Experiment 108529 PARAMETER Experiment Name: Zm_Imbibed_Seeds_P Parameter: Tissue Value: Roots vs. Embryo
  misc_feature: MA Experiment ID: 108533 Result: Up-regulated in Transcription
  misc_feature: MA Experiment 108533 PARAMETER Experiment Name: Zm_4deg_Cold_P Parameter: Age (hr) Value: 8
  misc_feature: MA Experiment 108533 PARAMETER Experiment Name: Zm_4deg_Cold_P Parameter: Organism Value: Zea mays
  misc_feature: MA Experiment 108533 PARAMETER Experiment Name: Zm_4deg_Cold_P Parameter: Plant Line Value: 35A19
  misc_feature: MA Experiment 108533 PARAMETER Experiment Name: Zm_4deg_Cold_P Parameter: Temperature (deg C) Value: 4 vs. 22
  misc_feature: MA Experiment 108533 PARAMETER Experiment Name: Zm_4deg_Cold_P Parameter: Timepoint (hr) Value: 1
  misc_feature: MA Experiment 108533 PARAMETER Experiment Name: Zm_4deg_Cold_P Parameter: Tissue Value: Aerial
  misc_feature: MA Experiment ID: 108534 Result: Up-regulated in Transcription
  misc_feature: MA Experiment 108534 PARAMETER Experiment Name: Zm_4deg_Cold_P Parameter: Age (hr) Value: 8
  misc_feature: MA Experiment 108534 PARAMETER Experiment Name: Zm_4deg_Cold_P Parameter: Organism Value: Zea mays
  misc_feature: MA Experiment 108534 PARAMETER Experiment Name: Zm_4deg_Cold_P Parameter: Plant Line Value: 35A19
  misc_feature: MA Experiment 108534 PARAMETER Experiment Name: Zm_4deg_Cold_P Parameter: Temperature (deg C) Value: 4 vs. 22
  misc_feature: MA Experiment 108534 PARAMETER Experiment Name: Zm_4deg_Cold_P Parameter: Timepoint (hr) Value: 6
  misc_feature: MA Experiment 108534 PARAMETER Experiment Name: Zm_4deg_Cold_P Parameter: Tissue Value: Aerial
  misc_feature: MA Experiment ID: 108543 Result: Up-regulated in Transcription
  misc_feature: MA Experiment ID: 108599 Result: Down-regulated in Transcription
  misc_feature: MA Experiment 108599 PARAMETER Experiment Name: Zm_RT1_P Parameter: Age (day) Value: 11
  misc_feature: MA Experiment 108599 PARAMETER Experiment Name: Zm_RT1_P Parameter: Organism Value: Zea mays
  misc_feature: MA Experiment 108599 PARAMETER Experiment Name: Zm_RT1_P Parameter: Plant Line Value: rt1 mut vs. rt1 wt
  misc_feature: MA Experiment 108599 PARAMETER Experiment Name: Zm_RT1_P Parameter: Tissue Value: Roots
  misc_feature: MA Experiment ID: 20000478 Result: Down-regulated in Transcription
  misc_feature: MA Experiment 20000478 PARAMETER Experiment Name: Zm_5mM_SA_P Parameter: Age (day) Value: 11
  misc_feature: MA Experiment 20000478 PARAMETER Experiment Name: Zm_5mM_SA_P Parameter: Organism Value: Zea mays
  misc_feature: MA Experiment 20000478 PARAMETER Experiment Name: Zm_5mM_SA_P Parameter: Plant Line Value: 35A19
  misc_feature: MA Experiment 20000478 PARAMETER Experiment Name: Zm_5mM_SA_P Parameter: Timepoint (hr) Value: 72
  misc_feature: MA Experiment 20000478 PARAMETER Experiment Name: Zm_5mM_SA_P Parameter: Tissue Value: Aerial
  misc_feature: MA Experiment 20000478 PARAMETER Experiment Name: Zm_5mM_SA_P Parameter: Treatment Value: 5mM SA vs. No Treatment
  misc_feature: MA Experiment ID: 20000488 Result: Down-regulated in Transcription
  misc_feature: MA Experiment 20000488 PARAMETER Experiment Name: Zm_50mM_NH4NO3_L_to_H_P Parameter: Organism Value: Zea mays
  misc_feature: MA Experiment 20000488 PARAMETER Experiment Name: Zm_50mM_NH4NO3_L_to_H_P Parameter: Timepoint (hr) Value: 8
  misc_feature: MA Experiment 20000488 PARAMETER Experiment Name: Zm_50mM_NH4NO3_L_to_H_P Parameter: Tissue Value: Leaves
  misc_feature: MA Experiment 20000488 PARAMETER Experiment Name: Zm_50mM_NH4NO3_L_to_H_P Parameter: Treatment Value: 50mM NH4NO3 vs. 100mM Mannitol
  misc_feature: MA Experiment ID: 20000533 Result: Down-regulated in Transcription
  misc_feature: MA Experiment 20000533 PARAMETER Experiment Name: Zm_0.001percent_MeJA_P Parameter: Age (day) Value: 11
  misc_feature: MA Experiment 20000533 PARAMETER Experiment Name: Zm_0.001percent_MeJA_P Parameter: Organism Value: Zea mays
  misc_feature: MA Experiment 20000533 PARAMETER Experiment Name: Zm_0.001percent_MeJA_P Parameter: Plant Line Value: 35A19
  misc_feature: MA Experiment 20000533 PARAMETER Experiment Name: Zm_0.001percent_MeJA_P Parameter: Timepoint (hr) Value: 72
  misc_feature: MA Experiment 20000533 PARAMETER Experiment Name: Zm_0.001percent_MeJA_P Parameter: Tissue Value: Aerial
  misc_feature: MA Experiment 20000533 PARAMETER Experiment Name: Zm_0.001percent_MeJA_P Parameter: Treatment Value: 0.001percent MeJA vs. No Treatment
  misc_feature: MA Experiment ID: 20000535 Result: Up-regulated in Transcription
  misc_feature: MA Experiment 20000535 PARAMETER Experiment Name: Zm_Hybrid_Seed_Dev_P Parameter: DAP Value: 30 vs. 12
  misc_feature: MA Experiment 20000535 PARAMETER Experiment Name: Zm_Hybrid_Seed_Dev_P Parameter: Organism Value: Zea mays
  misc_feature: MA Experiment 20000535 PARAMETER Experiment Name: Zm_Hybrid_Seed_Dev_P Parameter: Plant Line Value: 35A19
  misc_feature: MA Experiment 20000535 PARAMETER Experiment Name: Zm_Hybrid_Seed_Dev_P Parameter: Tissue Value: Embryo vs. Unfert Floret
  misc_feature: MA Experiment ID: 20001605 Result: Up-regulated in Transcription
  misc_feature: MA Experiment 20001605 PARAMETER Experiment Name: Zm_50ppm_KNO3_L-to-H_P Parameter: Age (day) Value: 19
  misc_feature: MA Experiment 20001605 PARAMETER Experiment Name: Zm_50ppm_KNO3_L-to-H_P Parameter: Organism Value: Zea mays
  misc_feature: MA Experiment 20001605 PARAMETER Experiment Name: Zm_50ppm_KNO3_L-to-H_P Parameter: Plant Line Value: 35A19
  misc_feature: MA Experiment 20001605 PARAMETER Experiment Name: Zm_50ppm_KNO3_L-to-H_P Parameter: Timepoint (hr) Value: 4
  misc_feature: MA Experiment 20001605 PARAMETER Experiment Name: Zm_50ppm_KNO3_L-to-H_P Parameter: Tissue Value: Shoots
  misc_feature: MA Experiment 20001605 PARAMETER Experiment Name: Zm_50ppm_KNO3_L-to-H_P Parameter: Treatment Value: 50ppm KNO3 vs. 50ppm KCl

SEQ ID NO: 15369 - protein, 233 aa, Zea mays subsp. mays; identical to SEQ ID NO: 14450
  peptide (1)..(233): Ceres Seq. ID no. 13636263
  misc_feature (27)..(96): Pfam Name: Glycosyl hydrolases family 16 Pfam Description: Glycosyl hydrolases family 16
  misc_feature (27)..(96): Pfam Name: Glycosyl hydrolases family 16 Pfam Description: Glycosyl hydrolases family 16
  misc_feature (27)..(96): Pfam Name: Glycosyl hydrolases family 16 Pfam Description: Glycosyl hydrolases family 16
  misc_feature (26)..(96): Homolog of NCBI NO: 29500891 NR Description: putative xyloglucan endotransglycosylase [Cucumis >gi|29500899|emb|CAD87533.1| putative xyloglucan
  misc_feature (12)..(96): Homolog of NCBI NO: 7447413 NR Description: xyloglucan endo-1,4-beta-D-glucanase (EC 3.2.1.-) barley >gi|1890577|emb|CAA63663.1| xyloglucan
  misc_feature (5)..(81): Homolog of NCBI NO: 14330332 NR Description: Xet1 protein [Festuca pratensis]
  misc_feature (9)..(96): Homolog of NCBI NO: 8886867 NR Description: xyloglucan endotransglycosylase XET2 [Asparagus
  misc_feature (1)..(96): Homolog of NCBI NO: 8886865 NR Description: xyloglucan endotransglycosylase XET1 [Asparagus
  misc_feature (5)..(81): Homolog of NCBI NO: 14330332 NR Description: Xet1 protein [Festuca pratensis]
  misc_feature (1)..(96): Homolog of NCBI NO: 8886865 NR Description: xyloglucan endotransglycosylase XET1 [Asparagus
  misc_feature (9)..(96): Homolog of NCBI NO: 8886867 NR Description: xyloglucan endotransglycosylase XET2 [Asparagus
  misc_feature (5)..(81): Homolog of NCBI NO: 14330332 NR Description: Xet1 protein [Festuca pratensis]
  misc_feature (12)..(96): Homolog of NCBI NO: 7447413 NR Description: xyloglucan endo-1,4-beta-D-glucanase (EC 3.2.1.-) barley >gi|1890577|emb|CAA63663.1| xyloglucan
  misc_feature (26)..(96): Homolog of NCBI NO: 29500891 NR Description: putative xyloglucan endotransglycosylase [Cucumis >gi|29500899|emb|CAD87533.1| putative xyloglucan
  misc_feature (7)..(96): Homolog of NCBI NO: 22947852 NR Description: xyloglucan endotransglycosylase [Malus x
  misc_feature (1)..(96): Homolog of NCBI NO: 17064792 NR Description: xyloglucan endo-1, 4-beta-D-glucanase (XTR-6)
  misc_feature (1)..(96): Homolog of NCBI NO: 15235997 NR Description: xyloglucan endotransglycosylase (XTR-6)
  misc_feature (6)..(96): Homolog of NCBI NO: 15242781 NR Description: xyloglucan endotransglycosylase (TCH4)
  misc_feature (9)..(96): Homolog of NCBI NO: 7447412 NR Description: xyloglucan endo-1,4-beta-D-glucanase (EC 3.2.1.-) barley >gi|1890575|emb|CAA63662.1| xyloglucan
  misc_feature (26)..(96): Homolog of NCBI NO: 29500891 NR Description: putative xyloglucan endotransglycosylase [Cucumis >gi|29500899|emb|CAD87533.1| putative xyloglucan
  misc_feature (7)..(96): Homolog of NCBI NO: 22947852 NR Description: xyloglucan endotransglycosylase [Malus x
  misc_feature (1)..(96): Homolog of NCBI NO: 17064792 NR Description: xyloglucan endo-1, 4-beta-D-glucanase (XTR-6)
  misc_feature (1)..(96): Homolog of NCBI NO: 15235997 NR Description: xyloglucan endotransglycosylase (XTR-6)
  misc_feature (6)..(96): Homolog of NCBI NO: 15242781 NR Description: xyloglucan endotransglycosylase (TCH4)
  misc_feature (9)..(96): Homolog of NCBI NO: 7447412 NR Description: xyloglucan endo-1,4-beta-D-glucanase (EC 3.2.1.-) barley >gi|1890575|emb|CAA63662.1| xyloglucan
  misc_feature (1)..(96): Homolog of NCBI NO: 8886865 NR Description: xyloglucan endotransglycosylase XET1 [Asparagus
  misc_feature (9)..(96): Homolog of NCBI NO: 8886867 NR Description: xyloglucan endotransglycosylase XET2 [Asparagus
  misc_feature (12)..(96): Homolog of NCBI NO: 7447413 NR Description: xyloglucan endo-1,4-beta-D-glucanase (EC 3.2.1.-) barley >gi|1890577|emb|CAA63663.1| xyloglucan
  misc_feature (9)..(96): Homolog of NCBI NO: 7447412 NR Description: xyloglucan endo-1,4-beta-D-glucanase (EC 3.2.1.-) barley >gi|1890575|emb|CAA63662.1| xyloglucan
  misc_feature (6)..(96): Homolog of NCBI NO: 15242781 NR Description: xyloglucan endotransglycosylase (TCH4)
  misc_feature (1)..(96): Homolog of NCBI NO: 15235997 NR Description: xyloglucan endotransglycosylase (XTR-6)
  misc_feature (1)..(96): Homolog of NCBI NO: 17064792 NR Description: xyloglucan endo-1, 4-beta-D-glucanase (XTR-6)
  misc_feature (7)..(96): Homolog of NCBI NO: 22947852 NR Description: xyloglucan endotransglycosylase [Malus x

SEQ ID NO: 15370 - protein, 201 aa, Zea mays subsp. mays; identical to SEQ ID NO: 14451
  peptide (1)..(201): Ceres Seq. ID no. 13636264
  misc_feature (1)..(64): Pfam Name: Glycosyl hydrolases family 16 Pfam Description: Glycosyl hydrolases family 16
  misc_feature (1)..(64): Pfam Name: Glycosyl hydrolases family 16 Pfam Description: Glycosyl hydrolases family 16
  misc_feature (1)..(64): Pfam Name: Glycosyl hydrolases family 16 Pfam Description: Glycosyl hydrolases family 16
  misc_feature (1)..(64): Homolog of NCBI NO: 7447413 NR Description: xyloglucan endo-1,4-beta-D-glucanase (EC 3.2.1.-) barley >gi|1890577|emb|CAA63663.1| xyloglucan
  misc_feature (1)..(49): Homolog of NCBI NO: 14330332 NR Description: Xet1 protein [Festuca pratensis]
  misc_feature (1)..(64): Homolog of NCBI NO: 8886867 NR Description: xyloglucan endotransglycosylase XET2 [Asparagus
  misc_feature (1)..(64): Homolog of NCBI NO: 8886865 NR Description: xyloglucan endotransglycosylase XET1 [Asparagus
  misc_feature (1)..(64): Homolog of NCBI NO: 7447412 NR Description: xyloglucan endo-1,4-beta-D-glucanase (EC 3.2.1.-) barley >gi|1890575|emb|CAA63662.1| xyloglucan
  misc_feature (1)..(49): Homolog of NCBI NO: 14330332 NR Description: Xet1 protein [Festuca pratensis]
  misc_feature (1)..(64): Homolog of NCBI NO: 8886865 NR Description: xyloglucan endotransglycosylase XET1 [Asparagus
  misc_feature (1)..(64): Homolog of NCBI NO: 8886867 NR Description: xyloglucan endotransglycosylase XET2 [Asparagus
  misc_feature (1)..(49): Homolog of NCBI NO: 14330332 NR Description: Xet1 protein [Festuca pratensis]
  misc_feature (1)..(64): Homolog of NCBI NO: 7447413 NR Description: xyloglucan endo-1,4-beta-D-glucanase (EC 3.2.1.-) barley >gi|1890577|emb|CAA63663.1| xyloglucan
  misc_feature (1)..(64): Homolog of NCBI NO: 29500891 NR Description: putative xyloglucan endotransglycosylase [Cucumis >gi|29500899|emb|CAD87533.1| putative xyloglucan
  misc_feature (1)..(64): Homolog of NCBI NO: 22947852 NR Description: xyloglucan endotransglycosylase [Malus x
  misc_feature (1)..(64): Homolog of NCBI NO: 17064792 NR Description: xyloglucan endo-1, 4-beta-D-glucanase (XTR-6)
  misc_feature (1)..(64): Homolog of NCBI NO: 15235997 NR Description: xyloglucan endotransglycosylase (XTR-6)
  misc_feature (1)..(64): Homolog of NCBI NO: 15242781 NR Description: xyloglucan endotransglycosylase (TCH4)
  misc_feature (1)..(64): Homolog of NCBI NO: 7447412 NR Description: xyloglucan endo-1,4-beta-D-glucanase (EC 3.2.1.-) barley >gi|1890575|emb|CAA63662.1| xyloglucan
  misc_feature (1)..(64): Homolog of NCBI NO: 29500891 NR Description: putative xyloglucan endotransglycosylase [Cucumis >gi|29500899|emb|CAD87533.1| putative xyloglucan
  misc_feature (1)..(64): Homolog of NCBI NO: 22947852 NR Description: xyloglucan endotransglycosylase [Malus x
  misc_feature (1)..(64): Homolog of NCBI NO: 17064792 NR Description: xyloglucan endo-1, 4-beta-D-glucanase (XTR-6)
  misc_feature (1)..(64): Homolog of NCBI NO: 15235997 NR Description: xyloglucan endotransglycosylase (XTR-6)
  misc_feature (1)..(64): Homolog of NCBI NO: 15242781 NR Description: xyloglucan endotransglycosylase (TCH4)
  misc_feature (1)..(64): Homolog of NCBI NO: 7447412 NR Description: xyloglucan endo-1,4-beta-D-glucanase (EC 3.2.1.-) barley >gi|1890575|emb|CAA63662.1| xyloglucan
  misc_feature (1)..(64): Homolog of NCBI NO: 8886865 NR Description: xyloglucan endotransglycosylase XET1 [Asparagus
  misc_feature (1)..(64): Homolog of NCBI NO: 8886867 NR Description: xyloglucan endotransglycosylase XET2 [Asparagus
  misc_feature (1)..(64): Homolog of NCBI NO: 7447413 NR Description: xyloglucan endo-1,4-beta-D-glucanase (EC 3.2.1.-) barley >gi|1890577|emb|CAA63663.1| xyloglucan
  misc_feature (1)..(64): Homolog of NCBI NO: 15242781 NR Description: xyloglucan endotransglycosylase (TCH4)
  misc_feature (1)..(64): Homolog of NCBI NO: 15235997 NR Description: xyloglucan endotransglycosylase (XTR-6)
  misc_feature (1)..(64): Homolog of NCBI NO: 17064792 NR Description: xyloglucan endo-1, 4-beta-D-glucanase (XTR-6)
  misc_feature (1)..(64): Homolog of NCBI NO: 22947852 NR Description: xyloglucan endotransglycosylase [Malus x
  misc_feature (1)..(64): Homolog of NCBI NO: 29500891 NR Description: putative xyloglucan endotransglycosylase [Cucumis >gi|29500899|emb|CAD87533.1| putative xyloglucan

SEQ ID NO: 15371 - protein, 160 aa, Zea mays subsp. mays; identical to SEQ ID NO: 14452
  peptide (1)..(160): Ceres Seq. ID no. 13636265
  misc_feature (1)..(23): Homolog of NCBI NO: 7447413 NR Description: xyloglucan endo-1,4-beta-D-glucanase (EC 3.2.1.-) barley >gi|1890577|emb|CAA63663.1| xyloglucan
  misc_feature (1)..(23): Homolog of NCBI NO: 8886867 NR Description: xyloglucan endotransglycosylase XET2 [Asparagus
  misc_feature (1)..(23): Homolog of NCBI NO: 8886865 NR Description: xyloglucan endotransglycosylase XET1 [Asparagus
  misc_feature (1)..(23): Homolog of NCBI NO: 7447412 NR Description: xyloglucan endo-1,4-beta-D-glucanase (EC 3.2.1.-) barley >gi|1890575|emb|CAA63662.1| xyloglucan
  misc_feature (1)..(23): Homolog of NCBI NO: 15242781 NR Description: xyloglucan endotransglycosylase (TCH4)
  misc_feature (1)..(23): Homolog of NCBI NO: 15235997 NR Description: xyloglucan endotransglycosylase (XTR-6)
  misc_feature (1)..(23): Homolog of NCBI NO: 17064792 NR Description: xyloglucan endo-1, 4-beta-D-glucanase (XTR-6)
  misc_feature (1)..(23): Homolog of NCBI NO: 22947852 NR Description: xyloglucan endotransglycosylase [Malus x
  misc_feature (1)..(23): Homolog of NCBI NO: 29500891 NR Description: putative xyloglucan endotransglycosylase [Cucumis >gi|29500899|emb|CAD87533.1| putative xyloglucan
  misc_feature (1)..(21): Homolog of NCBI NO: 28804632 NR Description: xyloglucan endotransglycosylase [Pyrus communis]
  misc_feature (1)..(23): Homolog of NCBI NO: 7447413 NR Description: xyloglucan endo-1,4-beta-D-glucanase (EC 3.2.1.-) barley >gi|1890577|emb|CAA63663.1| xyloglucan
  misc_feature (1)..(23): Homolog of NCBI NO: 8886867 NR Description: xyloglucan endotransglycosylase XET2 [Asparagus
  misc_feature (1)..(23): Homolog of NCBI NO: 8886865 NR Description: xyloglucan endotransglycosylase XET1 [Asparagus
  misc_feature (1)..(23): Homolog of NCBI NO: 7447412 NR Description: xyloglucan endo-1,4-beta-D-glucanase (EC 3.2.1.-) barley >gi|1890575|emb|CAA63662.1| xyloglucan
  misc_feature (1)..(23): Homolog of NCBI NO: 15242781 NR Description: xyloglucan endotransglycosylase (TCH4)
  misc_feature (1)..(23): Homolog of NCBI NO: 15235997 NR Description: xyloglucan endotransglycosylase (XTR-6)
  misc_feature (1)..(23): Homolog of NCBI NO: 17064792 NR Description: xyloglucan endo-1, 4-beta-D-glucanase (XTR-6)
  misc_feature (1)..(23): Homolog of NCBI NO: 22947852 NR Description: xyloglucan endotransglycosylase [Malus x
  misc_feature (1)..(23): Homolog of NCBI NO: 29500891 NR Description: putative xyloglucan endotransglycosylase [Cucumis >gi|29500899|emb|CAD87533.1| putative xyloglucan
  misc_feature (1)..(21): Homolog of NCBI NO: 28804632 NR Description: xyloglucan endotransglycosylase [Pyrus communis]
  misc_feature (1)..(23): Homolog of NCBI NO: 7447413 NR Description: xyloglucan endo-1,4-beta-D-glucanase (EC 3.2.1.-) barley >gi|1890577|emb|CAA63663.1| xyloglucan
  misc_feature (1)..(23): Homolog of NCBI NO: 8886867 NR Description: xyloglucan endotransglycosylase XET2 [Asparagus
  misc_feature (1)..(23): Homolog of NCBI NO: 8886865 NR Description: xyloglucan endotransglycosylase XET1 [Asparagus
  misc_feature (1)..(23): Homolog of NCBI NO: 7447412 NR Description: xyloglucan endo-1,4-beta-D-glucanase (EC 3.2.1.-) barley >gi|1890575|emb|CAA63662.1| xyloglucan
  misc_feature (1)..(23): Homolog of NCBI NO: 15242781 NR Description: xyloglucan endotransglycosylase (TCH4)
  misc_feature (1)..(23): Homolog of NCBI NO: 15235997 NR Description: xyloglucan endotransglycosylase (XTR-6)
  misc_feature (1)..(23): Homolog of NCBI NO: 17064792 NR Description: xyloglucan endo-1, 4-beta-D-glucanase (XTR-6)
  misc_feature (1)..(23): Homolog of NCBI NO: 22947852 NR Description: xyloglucan endotransglycosylase [Malus x
  misc_feature (1)..(23): Homolog of NCBI NO: 29500891 NR Description: putative xyloglucan endotransglycosylase [Cucumis >gi|29500899|emb|CAD87533.1| putative xyloglucan
  misc_feature (1)..(21): Homolog of NCBI NO: 28804632 NR Description: xyloglucan endotransglycosylase [Pyrus communis]

SEQ ID NO: 15372 - DNA, 553 bp, Zea mays subsp. mays
  misc_feature (1)..(553): Ceres Seq. ID no. 13631750
  misc_feature: MA Experiment ID: 108504 Result: Down-regulated in Transcription
  misc_feature: MA Experiment 108504 PARAMETER Experiment Name: Zm_Drought_P Parameter: Age (day) Value: 8
  misc_feature: MA Experiment 108504 PARAMETER Experiment Name: Zm_Drought_P Parameter: Organism Value: Zea mays
  misc_feature: MA Experiment 108504 PARAMETER Experiment Name: Zm_Drought_P Parameter: Plant Line Value: 35A19
  misc_feature: MA Experiment 108504 PARAMETER Experiment Name: Zm_Drought_P Parameter: Timepoint (hr) Value: 12
  misc_feature: MA Experiment 108504 PARAMETER Experiment Name: Zm_Drought_P Parameter: Tissue Value: Aerial
  misc_feature: MA Experiment 108504 PARAMETER Experiment Name: Zm_Drought_P Parameter: Treatment Value: Drought vs. No Drought
  misc_feature: MA Experiment ID: 108515 Result: Down-regulated in Transcription
  misc_feature: MA Experiment 108515 PARAMETER Experiment Name: Zm_2mM_SA_P Parameter: Age (day) Value: 8
  misc_feature: MA Experiment 108515 PARAMETER Experiment Name: Zm_2mM_SA_P Parameter: Organism Value: Zea mays
  misc_feature: MA Experiment 108515 PARAMETER Experiment Name: Zm_2mM_SA_P Parameter: Plant Line Value: 35A19
  misc_feature: MA Experiment 108515 PARAMETER Experiment Name: Zm_2mM_SA_P Parameter: Timepoint (hr) Value: 12
  misc_feature: MA Experiment 108515 PARAMETER Experiment Name: Zm_2mM_SA_P Parameter: Tissue Value: Aerial
  misc_feature: MA Experiment 108515 PARAMETER Experiment Name: Zm_2mM_SA_P Parameter: Treatment Value: 2mM SA vs. No Treatment
  misc_feature: MA Experiment ID: 108523 Result: Down-regulated in Transcription
  misc_feature: MA Experiment 108523 PARAMETER Experiment Name: Zm_42deg_Heat_P Parameter: Age (day) Value: 8
  misc_feature: MA Experiment 108523 PARAMETER Experiment Name: Zm_42deg_Heat_P Parameter: Organism Value: Zea mays
  misc_feature: MA Experiment 108523 PARAMETER Experiment Name: Zm_42deg_Heat_P Parameter: Plant Line Value: 35A19
  misc_feature: MA Experiment 108523 PARAMETER Experiment Name: Zm_42deg_Heat_P Parameter: Temperature (deg C) Value: 42 vs. 22
  misc_feature: MA Experiment 108523 PARAMETER Experiment Name: Zm_42deg_Heat_P Parameter: Timepoint (hr) Value: 6
  misc_feature: MA Experiment 108523 PARAMETER Experiment Name: Zm_42deg_Heat_P Parameter: Tissue Value: Aerial
  misc_feature: MA Experiment ID: 108535 Result: Up-regulated in Transcription
  misc_feature: MA Experiment 108535 PARAMETER Experiment Name: Zm_Meristem_P Parameter: Age (day) Value: 8
  misc_feature: MA Experiment 108535 PARAMETER Experiment Name: Zm_Meristem_P Parameter: Organism Value: Zea mays
  misc_feature: MA Experiment 108535 PARAMETER Experiment Name: Zm_Meristem_P Parameter: Plant Line Value: 35A19
  misc_feature: MA Experiment 108535 PARAMETER Experiment Name: Zm_Meristem_P Parameter: Tissue Value: Root Meristem vs. Above Root Meristem
  misc_feature: MA Experiment ID: 108543 Result: Up-regulated in Transcription
  misc_feature: MA Experiment ID: 108544 Result: Down-regulated in Transcription
  misc_feature: MA Experiment ID: 108556 Result: Down-regulated in Transcription
  misc_feature: MA Experiment 108556 PARAMETER Experiment Name: Zm_Drought_P Parameter: Age (day) Value: 9
  misc_feature: MA Experiment 108556 PARAMETER Experiment Name: Zm_Drought_P Parameter: Organism Value: Zea mays
  misc_feature: MA Experiment 108556 PARAMETER Experiment Name: Zm_Drought_P Parameter: Plant Line Value: 35A19
  misc_feature: MA Experiment 108556 PARAMETER Experiment Name: Zm_Drought_P Parameter: Timepoint (hr) Value: 24
  misc_feature: MA Experiment 108556 PARAMETER Experiment Name: Zm_Drought_P Parameter: Tissue Value: Aerial
  misc_feature: MA Experiment 108556 PARAMETER Experiment Name: Zm_Drought_P Parameter: Treatment Value: Drought vs. No Drought
  misc_feature: MA Experiment ID: 108597 Result: Down-regulated in Transcription
  misc_feature: MA Experiment 108597 PARAMETER Experiment Name: Zm_100uM_ABA_P Parameter: Age (day) Value: 9
  misc_feature: MA Experiment 108597 PARAMETER Experiment Name: Zm_100uM_ABA_P Parameter: Organism Value: Zea mays
  misc_feature: MA Experiment 108597 PARAMETER Experiment Name: Zm_100uM_ABA_P Parameter: Plant Line Value: 35A19
  misc_feature: MA Experiment 108597 PARAMETER Experiment Name: Zm_100uM_ABA_P Parameter: Timepoint (hr) Value: 24
  misc_feature: MA Experiment 108597 PARAMETER Experiment Name: Zm_100uM_ABA_P Parameter: Tissue Value: Aerial
  misc_feature: MA Experiment 108597 PARAMETER Experiment Name: Zm_100uM_ABA_P Parameter: Treatment Value: 100uM ABA vs. No Treatment
  misc_feature: MA Experiment ID: 20000477 Result: Down-regulated in Transcription
  misc_feature: MA Experiment 20000477 PARAMETER Experiment Name: Zm_5mM_SA_P Parameter: Age (day) Value: 10
  misc_feature: MA Experiment 20000477 PARAMETER Experiment Name: Zm_5mM_SA_P Parameter: Organism Value: Zea mays
  misc_feature: MA Experiment 20000477 PARAMETER Experiment Name: Zm_5mM_SA_P Parameter: Plant Line Value: 35A19
  misc_feature: MA Experiment 20000477 PARAMETER Experiment Name: Zm_5mM_SA_P Parameter: Timepoint (hr) Value: 48
  misc_feature: MA Experiment 20000477 PARAMETER Experiment Name: Zm_5mM_SA_P Parameter: Tissue Value: Aerial
  misc_feature: MA Experiment 20000477 PARAMETER Experiment Name: Zm_5mM_SA_P Parameter: Treatment Value: 5mM SA vs. No Treatment
  misc_feature: MA Experiment ID: 20000480 Result: Down-regulated in Transcription
  misc_feature: MA Experiment 20000480 PARAMETER Experiment Name: Zm_Drought_P Parameter: Age (day) Value: 11
  misc_feature: MA Experiment 20000480 PARAMETER Experiment Name: Zm_Drought_P Parameter: Organism Value: Zea mays
  misc_feature: MA Experiment 20000480 PARAMETER Experiment Name: Zm_Drought_P Parameter: Plant Line Value: 35A19
  misc_feature: MA Experiment 20000480 PARAMETER Experiment Name: Zm_Drought_P Parameter: Timepoint (hr) Value: 72
  misc_feature: MA Experiment 20000480 PARAMETER Experiment Name: Zm_Drought_P Parameter: Tissue Value: Aerial
  misc_feature: MA Experiment 20000480 PARAMETER Experiment Name: Zm_Drought_P Parameter: Treatment Value: Drought vs. No Drought
  misc_feature: MA Experiment ID: 20000626 Result: Down-regulated in Transcription
  misc_feature: MA Experiment 20000626 PARAMETER Experiment Name: Zm_Herbicide-Treatments_P Parameter: Timepoint (hr) Value: 12
  misc_feature: MA Experiment 20000626 PARAMETER Experiment Name: Zm_Herbicide-Treatments_P Parameter: Tissue Value: Aerial
  misc_feature: MA Experiment 20000626 PARAMETER Experiment Name: Zm_Herbicide-Treatments_P Parameter: Treatment Value: Roundup vs. No Treatment
  misc_feature: MA Experiment ID: 20000632 Result: Down-regulated in Transcription
  misc_feature: MA Experiment 20000632 PARAMETER Experiment Name: Zm_Herbicide-Treatments_P Parameter: Timepoint (hr) Value: 4
  misc_feature: MA Experiment 20000632 PARAMETER Experiment Name: Zm_Herbicide-Treatments_P Parameter: Tissue Value: Aerial
  misc_feature: MA Experiment 20000632 PARAMETER Experiment Name: Zm_Herbicide-Treatments_P Parameter: Treatment Value: Glean vs. No Treatment
  misc_feature: MA Experiment ID: 20001614 Result: Up-regulated in Transcription
  misc_feature: MA Experiment 20001614 PARAMETER Experiment Name: Zm_50ppm_KNO3_L-to-H_P Parameter: Age (day) Value: 21
  misc_feature: MA Experiment 20001614 PARAMETER Experiment Name: Zm_50ppm_KNO3_L-to-H_P Parameter: Organism Value: Zea mays
  misc_feature: MA Experiment 20001614 PARAMETER Experiment Name: Zm_50ppm_KNO3_L-to-H_P Parameter: Plant Line Value: 35A19
  misc_feature: MA Experiment 20001614 PARAMETER Experiment Name: Zm_50ppm_KNO3_L-to-H_P Parameter: Timepoint (hr) Value: 48
  misc_feature: MA Experiment 20001614 PARAMETER Experiment Name: Zm_50ppm_KNO3_L-to-H_P Parameter: Tissue Value: Roots
  misc_feature: MA Experiment 20001614 PARAMETER Experiment Name: Zm_50ppm_KNO3_L-to-H_P Parameter: Treatment Value: 50ppm KNO3 vs. 50ppm KCl
atcggagtctcctagttgtgctcaaatcccacaatcttcttgtagcacaccactgtcttcgtccaactcggcggcgatgtctgggcgcggcaagggcggcaaggggctgggcaagggtggtgcgaaacgccaccgtaaggttctccgcgacaacatccagggtatcacgaagccggcaatccggaggctggcgaggaggagcgacgtgaagcgtatctccgggcttatctacgaggagacccgcggcgtgctcaagatcttcctcgagaatgtcatccgcgacgcgggcacctacaccgagcacgctcgccgcaagaccgtcaccgccatggatgttgtggacgccctcaagcggcaggggcgcactctgtacgggttcggtgggtgagcgcatctcttccctcgtctgcagcggctgccggtggcgtttcctcagttccctctgccttgcttggcttgatgtagagagttatcagattaaaatatctctgatgtgcttcgttattgggtggaatcatgtgtcccagcagtgctgggaaatcgagatcaagat

SEQ ID NO: 15373 - protein, 128 aa, Zea mays subsp. mays
  peptide (1)..(128): Ceres Seq. ID no. 13631751
  misc_feature (20)..(128): Homolog of NCBI NO: 34876368 NR Description: similar to germinal histone H4 gene [Rattus
  misc_feature (26)..(128): Homolog of NCBI NO: 15226944 NR Description: histone H4 [Arabidopsis thaliana] histone H4 [Arabidopsis thaliana] >gi|15232318|ref|NP_190941.1|
  misc_feature (20)..(128): Homolog of NCBI NO: 17540668 NR Description: Histone H4 family member [Caenorhabditis elegans]
  misc_feature (26)..(128): Homolog of NCBI NO: 462243 NR Description: Histone H4 >gi|421921|pir||S32769 histone H4 - >gi|297150|emb|CAA48923.1| histone H4 [Lycopersicon esculentum] histone H4 [Lycopersicon esculentum] >gi|2746721|gb|AAB94924.1|
  misc_feature (26)..(128): Homolog of NCBI NO: 1806283 NR Description: Histone H4 homologue [Sesbania rostrata]
  misc_feature (26)..(128): Homolog of NCBI NO: 4504301 NR Description: H4 histone family, member A [Homo sapiens] H4 histone family, member B [Homo sapiens] H4 histone family, member C [Homo sapiens]
  misc_feature (26)..(128): Homolog of NCBI NO: 27692960 NR Description: Similar to germinal histone H4 gene [Mus musculus]
  misc_feature (26)..(128): Homolog of NCBI NO: 27692935 NR Description: Hist1h4i protein [Mus musculus]
  misc_feature (26)..(128): Homolog of NCBI NO: 37590121 NR Description: Hist1h4h protein [Mus musculus]
  misc_feature (26)..(128): Homolog of NCBI NO: 17352498 NR Description: histone H4; Bicoid interacting protein 2; histone melanogaster] >gi|17975542|ref|NP_524352.1| Histone H4
SESPSCAQIPQSSCSTPLSSSNSAAMSGRGKGGKGLGKGGAKRHRKVLRDNIQGITKPAIRRLARRSDVKRISGLIYEETRGVLKIFLENVIRDAGTYTEHARRKTVTAMDVVDALKRQGRTLYGFGG

SEQ ID NO: 15374 - protein, 103 aa, Zea mays subsp. mays
  peptide (1)..(103): Ceres Seq. ID no. 13631752
  misc_feature (1)..(103): Homolog of NCBI NO: 34876368 NR Description: similar to germinal histone H4 gene [Rattus
  misc_feature (1)..(103): Homolog of NCBI NO: 15226944 NR Description: histone H4 [Arabidopsis thaliana] histone H4 [Arabidopsis thaliana] >gi|15232318|ref|NP_190941.1|
  misc_feature (1)..(103): Homolog of NCBI NO: 17540668 NR Description: Histone H4 family member [Caenorhabditis elegans]
  misc_feature (1)..(103): Homolog of NCBI NO: 462243 NR Description: Histone H4 >gi|421921|pir||S32769 histone H4 - >gi|297150|emb|CAA48923.1| histone H4 [Lycopersicon esculentum] histone H4 [Lycopersicon esculentum] >gi|2746721|gb|AAB94924.1|
  misc_feature (1)..(103): Homolog of NCBI NO: 1806283 NR Description: Histone H4 homologue [Sesbania rostrata]
  misc_feature (1)..(103): Homolog of NCBI NO: 4504301 NR Description: H4 histone family, member A [Homo sapiens] H4 histone family, member B [Homo sapiens] H4 histone family, member C [Homo sapiens]
  misc_feature (1)..(103): Homolog of NCBI NO: 27692960 NR Description: Similar to germinal histone H4 gene [Mus musculus]
  misc_feature (1)..(103): Homolog of NCBI NO: 27692935 NR Description: Hist1h4i protein [Mus musculus]
  misc_feature (1)..(103): Homolog of NCBI NO: 37590121 NR Description: Hist1h4h protein [Mus musculus]
  misc_feature (1)..(103): Homolog of NCBI NO: 17352498 NR Description: histone H4; Bicoid interacting protein 2; histone melanogaster] >gi|17975542|ref|NP_524352.1| Histone H4
MSGRGKGGKGLGKGGAKRHRKVLRDNIQGITKPAIRRLARRSDVKRISGLIYEETRGVLKIFLENVIRDAGTYTEHARRKTVTAMDVVDALKRQGRTLYGFGG

SEQ ID NO: 15375 - protein, 94 aa, Zea mays subsp. mays
  peptide (1)..(94): Ceres Seq. ID no. 13631753
MSSATRAPTPSTLAARPSPPWMLWTPSSGRGALCTGSVGERISSLVCSGCRWRFLSSLCLAWLDVESYQIKISLMCFVIGWNHVSQQCWEIEIK

SEQ ID NO: 15376 - DNA, 1211 bp, Zea mays subsp. mays
  misc_feature (1)..(1211): Ceres Seq. ID no. 13636562
  misc_feature: MA Experiment ID: 108535 Result: Up-regulated in Transcription
  misc_feature: MA Experiment 108535 PARAMETER Experiment Name: Zm_Meristem_P Parameter: Age (day) Value: 8
  misc_feature: MA Experiment 108535 PARAMETER Experiment Name: Zm_Meristem_P Parameter: Organism Value: Zea mays
  misc_feature: MA Experiment 108535 PARAMETER Experiment Name: Zm_Meristem_P Parameter: Plant Line Value: 35A19
  misc_feature: MA Experiment 108535 PARAMETER Experiment Name: Zm_Meristem_P Parameter: Tissue Value: Root Meristem vs. Above Root Meristem
  misc_feature: MA Experiment ID: 108544 Result: Down-regulated in Transcription
  misc_feature: MA Experiment ID: 20000488 Result: Up-regulated in Transcription
  misc_feature: MA Experiment 20000488 PARAMETER Experiment Name: Zm_50mM_NH4NO3_L_to_H_P Parameter: Organism Value: Zea mays
  misc_feature: MA Experiment 20000488 PARAMETER Experiment Name: Zm_50mM_NH4NO3_L_to_H_P Parameter: Timepoint (hr) Value: 8
  misc_feature: MA Experiment 20000488 PARAMETER Experiment Name: Zm_50mM_NH4NO3_L_to_H_P Parameter: Tissue Value: Leaves
  misc_feature: MA Experiment 20000488 PARAMETER Experiment Name: Zm_50mM_NH4NO3_L_to_H_P Parameter: Treatment Value: 50mM NH4NO3 vs. 100mM Mannitol
  misc_feature: MA Experiment ID: 20000535 Result: Up-regulated in Transcription
  misc_feature: MA Experiment 20000535 PARAMETER Experiment Name: Zm_Hybrid_Seed_Dev_P Parameter: DAP Value: 30 vs. 12
  misc_feature: MA Experiment 20000535 PARAMETER Experiment Name: Zm_Hybrid_Seed_Dev_P Parameter: Organism Value: Zea mays
  misc_feature: MA Experiment 20000535 PARAMETER Experiment Name: Zm_Hybrid_Seed_Dev_P Parameter: Plant Line Value: 35A19
  misc_feature: MA Experiment 20000535 PARAMETER Experiment Name: Zm_Hybrid_Seed_Dev_P Parameter: Tissue Value: Embryo vs. Unfert Floret
  misc_feature: MA Experiment ID: 20001606 Result: Up-regulated in Transcription
  misc_feature: MA Experiment 20001606 PARAMETER Experiment Name: Zm_50ppm_KNO3_L-to-H_P Parameter: Age (day) Value: 19
  misc_feature: MA Experiment 20001606 PARAMETER Experiment Name: Zm_50ppm_KNO3_L-to-H_P Parameter: Organism Value: Zea mays
  misc_feature: MA Experiment 20001606 PARAMETER Experiment Name: Zm_50ppm_KNO3_L-to-H_P Parameter: Plant Line Value: 35A19
  misc_feature: MA Experiment 20001606 PARAMETER Experiment Name: Zm_50ppm_KNO3_L-to-H_P Parameter: Timepoint (hr) Value: 8
  misc_feature: MA Experiment 20001606 PARAMETER Experiment Name: Zm_50ppm_KNO3_L-to-H_P Parameter: Tissue Value: Shoots
  misc_feature: MA Experiment 20001606 PARAMETER Experiment Name: Zm_50ppm_KNO3_L-to-H_P Parameter: Treatment Value: 50ppm KNO3 vs. 50ppm KCl
acaccttccctcggtcccttccatctcctagccgccgccgccgccgccgctgcccaaaaccctacctaccctcttcttcccctcactctcctttcatctccattctaatggcggcccaacccgtccggcgaagctgctagtgcttgtatctactatcttcatcaggtacttcgcgatcctactgaagtattccccgccgccgctgccatggccaccctcaaccctttcgaactccttggcgccgacgacaacgacgacccgacgcagctgattgcggcggcggcggctgctgctcagaaagccgaggcgaagaagtccgccgtggcgcctgctgggaaggctgcccagcctgcggcgaccaccaagttcccgaccaagcccgctcctccctcgcagacggttcgggatgcacgcggcggtggctcatcagctcgtggaggctttggccgtggtgaacgtggccgtggcagaggtggacggggatatggccagaaccgtggcttcagtggtgacaatggcaatgagttccagggaggttatggtggcggaggctatggggatggtgctgtaactgggtggatctgcaaggatgctactgcaaatgaggaggaagaaaaggaagaggacaaggagatgactctggaggaatttgagaaaataagagaggagaagaggaaagcactacttgcattgaaggctgaggagaggaaagttgaagttgacaaggatttgcagtctctgcagccactttcaaacaagaaagaaaatgatgaagttttcattaagctgggttctgacaaggataagaagaaggaaaatgcttgagcgtgatgagcgtgccaagaagtcggtgagcatcaacgagttcctgaaacctgctgaaggagaaaggtactacggcggccgtggccgtggaaggggccgtggggatcgtggtggttttagaggcggatacagagggggatacagtcgtggcccagctgctgctgctccatccattgaggatcaagctcagttcccaagccttggtgggaagtgaagggcgcccagctgctgctgtcaccgagcgttgtgttgtctgctgttgtcatatttaaattttgtccgacgttaaatttctgtgccacggtttaaacggaacaaataatgatgttgcatgtggctatctttagttatgtggtacttgacgttgaataccggagttgttgttt

SEQ ID NO: 15377 - protein, 205 aa, Zea mays subsp. mays
  peptide (1)..(205): Ceres Seq. ID no. 13636563
  misc_feature (78)..(205): Pfam Name: Hyaluronan / mRNA binding family Pfam Description: Hyaluronan / mRNA binding family
  misc_feature (1)..(121): Homolog of NCBI NO: 34910712 NR Description: putative nuclear RNA binding protein A [Oryza
  misc_feature (1)..(118): Homolog of NCBI NO: 39725276 NR Description: salt tolerance protein 1 [Beta vulgaris]
  misc_feature (127)..(205): Homolog of NCBI NO: 39725276 NR Description: salt tolerance protein 1 [Beta vulgaris]
  misc_feature (78)..(205): Homolog of NCBI NO: 34910712 NR Description: putative nuclear RNA binding protein A [Oryza
  misc_feature (1)..(117): Homolog of NCBI NO: 39725278 NR Description: salt tolerance protein 2 [Beta vulgaris]
  misc_feature (127)..(205): Homolog of NCBI NO: 39725278 NR Description: salt tolerance protein 2 [Beta vulgaris]
  misc_feature (1)..(141): Homolog of NCBI NO: 6492266 NR Description: nuclear RNA binding protein A [Spinacia oleracea]
  misc_feature (127)..(205): Homolog of NCBI NO: 6492266 NR Description: nuclear RNA binding protein A [Spinacia oleracea]
  misc_feature (69)..(204): Homolog of NCBI NO: 34912396 NR Description: putative putative nuclear RNA binding protein A
  misc_feature (1)..(121): Homolog of NCBI NO: 34912396 NR Description: putative putative nuclear RNA binding protein A
MATLNPFELLGADDNDDPTQLIAAAAAAAQKAEAKKSAVAPAGKAAQPAATTKFPTKPAPPSQTVRDARGGGSSARGGFGRGERGRGRGGRGYGQNRGFSGDNGNEFQGGYGGGGYGDGAVTGWICKDATANEEEEKEEDKEMTLEEFEKIREEKRKALLALKAEERKVEVDKDLQSLQPLSNKKENDEVFIKLGSDKDKKKENA

SEQ ID NO: 15378 - DNA, 1346 bp, Zea mays subsp. mays; identical to SEQ ID NO: 1190
  misc_feature (1)..(1346): Ceres Seq. ID no. 12633565
  misc_feature: MA Experiment ID: 108529 Result: Down-regulated in Transcription
  misc_feature: MA Experiment 108529 PARAMETER Experiment Name: Zm_Imbibed_Seeds_P Parameter: Age (day) Value: 5 vs. 2
  misc_feature: MA Experiment 108529 PARAMETER Experiment Name: Zm_Imbibed_Seeds_P Parameter: Organism Value: Zea mays
  misc_feature: MA Experiment 108529 PARAMETER Experiment Name: Zm_Imbibed_Seeds_P Parameter: Plant Line Value: 35A19
  misc_feature: MA Experiment 108529 PARAMETER Experiment Name: Zm_Imbibed_Seeds_P Parameter: Tissue Value: Roots vs. Embryo
  misc_feature: MA Experiment ID: 20000478 Result: Down-regulated in Transcription
  misc_feature: MA Experiment 20000478 PARAMETER Experiment Name: Zm_5mM_SA_P Parameter: Age (day) Value: 11
  misc_feature: MA Experiment 20000478 PARAMETER Experiment Name: Zm_5mM_SA_P Parameter: Organism Value: Zea mays
  misc_feature: MA Experiment 20000478 PARAMETER Experiment Name: Zm_5mM_SA_P Parameter: Plant Line Value: 35A19
  misc_feature: MA Experiment 20000478 PARAMETER Experiment Name: Zm_5mM_SA_P Parameter: Timepoint (hr) Value: 72
  misc_feature: MA Experiment 20000478 PARAMETER Experiment Name: Zm_5mM_SA_P Parameter: Tissue Value: Aerial
  misc_feature: MA Experiment 20000478 PARAMETER Experiment Name: Zm_5mM_SA_P Parameter: Treatment Value: 5mM SA vs. No Treatment
  misc_feature: MA Experiment ID: 20000479 Result: Down-regulated in Transcription
  misc_feature: MA Experiment 20000479 PARAMETER Experiment Name: Zm_Drought_P Parameter: Age (day) Value: 10
  misc_feature: MA Experiment 20000479 PARAMETER Experiment Name: Zm_Drought_P Parameter: Organism Value: Zea mays
  misc_feature: MA Experiment 20000479 PARAMETER Experiment Name: Zm_Drought_P Parameter: Plant Line Value: 35A19
  misc_feature: MA Experiment 20000479 PARAMETER Experiment Name: Zm_Drought_P Parameter: Timepoint (hr) Value: 48
  misc_feature: MA Experiment 20000479 PARAMETER Experiment Name: Zm_Drought_P Parameter: Tissue Value: Aerial
  misc_feature: MA Experiment 20000479 PARAMETER Experiment Name: Zm_Drought_P Parameter: Treatment Value: Drought vs. No Drought
  misc_feature: MA Experiment ID: 20000480 Result: Down-regulated in Transcription
  misc_feature: MA Experiment 20000480 PARAMETER Experiment Name: Zm_Drought_P Parameter: Age (day) Value: 11
  misc_feature: MA Experiment 20000480 PARAMETER Experiment Name: Zm_Drought_P Parameter: Organism Value: Zea mays
  misc_feature: MA Experiment 20000480 PARAMETER Experiment Name: Zm_Drought_P Parameter: Plant Line Value: 35A19
  misc_feature: MA Experiment 20000480 PARAMETER Experiment Name: Zm_Drought_P Parameter: Timepoint (hr) Value: 72
  misc_feature: MA Experiment 20000480 PARAMETER Experiment Name: Zm_Drought_P Parameter: Tissue Value: Aerial
  misc_feature: MA Experiment 20000480 PARAMETER Experiment Name: Zm_Drought_P Parameter: Treatment Value: Drought vs. No Drought

SEQ ID NO: 15379 - protein, 266 aa, Zea mays subsp. mays; identical to SEQ ID NO: 1191
  peptide (1)..(266): Ceres Seq. ID no. 12633566
  misc_feature (1)..(264): Homolog of NCBI NO: 34895744 NR Description: P0019D06.30 [Oryza sativa (japonica
  misc_feature (1)..(262): Homolog of NCBI NO: 18408931 NR Description: expressed protein; protein id: At3g49720.1, by cDNA: 35598. [Arabidopsis thaliana] >gi|11285664|pir||T46038
  misc_feature (1)..(262): Homolog of NCBI NO: 21593192 NR Description: unknown [Arabidopsis thaliana]
  misc_feature (1)..(262): Homolog of NCBI NO: 18424995 NR Description: putative protein; protein id: At5g65810.1,
  misc_feature (96)..(262): Homolog of NCBI NO: 16649137 NR Description: Unknown protein [Arabidopsis thaliana]
  misc_feature (1)..(216): Homolog of NCBI NO: 9758568 NR Description: emb|CAB66910.1~gene_id:K22J17.2~similar to

SEQ ID NO: 15380 - protein, 185 aa, Zea mays subsp. mays; identical to SEQ ID NO: 1192
  peptide (1)..(185): Ceres Seq. ID no. 12633567
  misc_feature (1)..(183): Homolog of NCBI NO: 34895744 NR Description: P0019D06.30 [Oryza sativa (japonica
  misc_feature (1)..(181): Homolog of NCBI NO: 18408931 NR Description: expressed protein; protein id: At3g49720.1, by cDNA: 35598. [Arabidopsis thaliana] >gi|11285664|pir||T46038
  misc_feature (1)..(181): Homolog of NCBI NO: 21593192 NR Description: unknown [Arabidopsis thaliana]
  misc_feature (1)..(181): Homolog of NCBI NO: 18424995 NR Description: putative protein; protein id: At5g65810.1,
  misc_feature (15)..(181): Homolog of NCBI NO: 16649137 NR Description: Unknown protein [Arabidopsis thaliana]
  misc_feature (1)..(135): Homolog of NCBI NO: 9758568 NR Description: emb|CAB66910.1~gene_id:K22J17.2~similar to

SEQ ID NO: 15381 - protein, 171 aa, Zea mays subsp. mays; identical to SEQ ID NO: 1193
  peptide (1)..(171): Ceres Seq. ID no. 12633568
  misc_feature (1)..(169): Homolog of NCBI NO: 34895744 NR Description: P0019D06.30 [Oryza sativa (japonica
  misc_feature (1)..(167): Homolog of NCBI NO: 18408931 NR Description: expressed protein; protein id: At3g49720.1, by cDNA: 35598. [Arabidopsis thaliana] >gi|11285664|pir||T46038
  misc_feature (1)..(167): Homolog of NCBI NO: 21593192 NR Description: unknown [Arabidopsis thaliana]
  misc_feature (1)..(167): Homolog of NCBI NO: 18424995 NR Description: putative protein; protein id: At5g65810.1,
  misc_feature (1)..(167): Homolog of NCBI NO: 16649137 NR Description: Unknown protein [Arabidopsis thaliana]
  misc_feature (1)..(121): Homolog of NCBI NO: 9758568 NR Description: emb|CAB66910.1~gene_id:K22J17.2~similar to

SEQ ID NO: 15382 - DNA, 388 bp, Zea mays subsp. mays
  misc_feature (1)..(388): Ceres Seq. ID no. 13636823
  misc_feature: MA Experiment ID: 108522 Result: Up-regulated in Transcription
  misc_feature: MA Experiment 108522 PARAMETER Experiment Name: Zm_42deg_Heat_P Parameter: Age (day) Value: 8
  misc_feature: MA Experiment 108522 PARAMETER Experiment Name: Zm_42deg_Heat_P Parameter: Organism Value: Zea mays
  misc_feature: MA Experiment 108522 PARAMETER Experiment Name: Zm_42deg_Heat_P Parameter: Plant Line Value: 35A19
  misc_feature: MA Experiment 108522 PARAMETER Experiment Name: Zm_42deg_Heat_P Parameter: Temperature (deg C) Value: 42 vs. 22
  misc_feature: MA Experiment 108522 PARAMETER Experiment Name: Zm_42deg_Heat_P Parameter: Timepoint (hr) Value: 1
  misc_feature: MA Experiment 108522 PARAMETER Experiment Name: Zm_42deg_Heat_P Parameter: Tissue Value: Aerial
aagcaaatcgtaaaccgctacaaaaccgtcaaataggaaaaagtaatttgtgtttgtttagtttgttaagaagaatccgatggagtcgtcaccagcagcagcagcgaagccggcgagaggcacaggaggaaggaaaggaggtgatcggaagaagagtgtttccaagtccgtcaaggctggtcttcagtttcccgtcggtcgtatctctcgttacttgaagaaaggtcgttacgcgatcaggtacggcgccggtgctcccgtctacctcgccgccgtcctcgagtaccnnnnnngccgaggttctggagcttgctgggaacgcagcgagggacaacaagaagaacaggataaacccgaggcatctctgcttggcgataaggaacgatga

SEQ ID NO: 15383 - protein, 102 aa, Zea mays subsp. mays
  peptide (1)..(102): Ceres Seq. ID no. 13636824
  misc_feature (7)..(69): Pfam Name: Core histone H2A/H2B/H3/H4 Pfam Description: Core histone H2A/H2B/H3/H4
  misc_feature (1)..(69): Homolog of NCBI NO: 5777792 NR Description: histone H2A [Brassica napus]
  misc_feature (1)..(69): Homolog of NCBI NO: 15241016 NR Description: histone H2A, putative [Arabidopsis thaliana] AT5g27670/F15A18_130 [Arabidopsis thaliana]
  misc_feature (8)..(69): Homolog of NCBI NO: 122003 NR Description: HISTONE H2A >gi|82089|pir||JQ1182 histone H2A.1 -
  misc_feature (8)..(69): Homolog of NCBI NO: 122007 NR Description: Histone H2A >gi|100161|pir||S11498 histone H2A -
  misc_feature (7)..(69): Homolog of NCBI NO: 122006 NR Description: HISTONE H2A >gi|81906|pir||JQ1183 histone H2A -
  misc_feature (7)..(69): Homolog of NCBI NO: 27529852 NR Description: H2A histone [Nicotiana tabacum]
  misc_feature (7)..(69): Homolog of NCBI NO: 729669 NR Description: Histone H2A >gi|2118992|pir||S60474 histone H2A -
  misc_feature (1)..(69): Homolog of NCBI NO: 34914498 NR Description: putative histone H2A [Oryza sativa (japonica group)] >gi|13873032|dbj|BAB44136.1| putative histone H2A [Oryza
  misc_feature (17)..(69): Homolog of NCBI NO: 1076776 NR Description: histone H2A.2 - wheat >gi|536888|dbj|BAA07276.1| H2A [Triticum aestivum] >gi|1095224|prf||2108279A histone
  misc_feature (17)..(69): Homolog of NCBI NO: 2130104 NR Description: histone H2A.9 - wheat >gi|536894|dbj|BAA07279.1| H2A [Triticum aestivum] >gi|1095225|prf||2108279B histone
  misc_feature (70)..(70): Xaa is any aa, unknown or other
  misc_feature (71)..(71): Xaa is any aa, unknown or other
  misc_feature (72)..(72): Xaa is any aa, unknown or other
MESSPAAAAKPARGTGGRKGGDRKKSVSKSVKAGLQFPVGRISRYLKKGRYAIRYGAGAPVYLAAVLEYXXXRGSGACWERSEGQQEEQDKPEASLLGDKER

SEQ ID NO: 15384 - protein, 71 aa, Zea mays subsp. mays
  peptide (1)..(71): Ceres Seq. ID no. 13636825
  misc_feature (55)..(71): Homolog of NCBI NO: 31240521 NR Description: ENSANGP00000008789 [Anopheles gambiae]
ANRKPLQNRQIGKSNLCLFSLLRRIRWSRHQQQQRSRREAQEEGKEVIGRRVFPSPSRLVFSFPSVVSLVT

SEQ ID NO: 15385 - DNA, 1401 bp, Zea mays subsp. mays; identical to SEQ ID NO: 11475
  misc_feature (1)..(1401): Ceres Seq. ID no. 13636633
  misc_feature: MA Experiment ID: 108504 Result: Down-regulated in Transcription
  misc_feature: MA Experiment 108504 PARAMETER Experiment Name: Zm_Drought_P Parameter: Age (day) Value: 8
  misc_feature: MA Experiment 108504 PARAMETER Experiment Name: Zm_Drought_P Parameter: Organism Value: Zea mays
  misc_feature: MA Experiment 108504 PARAMETER Experiment Name: Zm_Drought_P Parameter: Plant Line Value: 35A19
  misc_feature: MA Experiment 108504 PARAMETER Experiment Name: Zm_Drought_P Parameter: Timepoint (hr) Value: 12
  misc_feature: MA Experiment 108504 PARAMETER Experiment Name: Zm_Drought_P Parameter: Tissue Value: Aerial
  misc_feature: MA Experiment 108504 PARAMETER Experiment Name: Zm_Drought_P Parameter: Treatment Value: Drought vs. No Drought
  misc_feature: MA Experiment ID: 108515 Result: Up-regulated in Transcription
  misc_feature: MA Experiment 108515 PARAMETER Experiment Name: Zm_2mM_SA_P Parameter: Age (day) Value: 8
  misc_feature: MA Experiment 108515 PARAMETER Experiment Name: Zm_2mM_SA_P Parameter: Organism Value: Zea mays
  misc_feature: MA Experiment 108515 PARAMETER Experiment Name: Zm_2mM_SA_P Parameter: Plant Line Value: 35A19
  misc_feature: MA Experiment 108515 PARAMETER Experiment Name: Zm_2mM_SA_P Parameter: Timepoint (hr) Value: 12
  misc_feature: MA Experiment 108515 PARAMETER Experiment Name: Zm_2mM_SA_P Parameter: Tissue Value: Aerial
  misc_feature: MA Experiment 108515 PARAMETER Experiment Name: Zm_2mM_SA_P Parameter: Treatment Value: 2mM SA vs. No Treatment
  misc_feature: MA Experiment ID: 108523 Result: Down-regulated in Transcription
  misc_feature: MA Experiment 108523 PARAMETER Experiment Name: Zm_42deg_Heat_P Parameter: Age (day) Value: 8
  misc_feature: MA Experiment 108523 PARAMETER Experiment Name: Zm_42deg_Heat_P Parameter: Organism Value: Zea mays
  misc_feature: MA Experiment 108523 PARAMETER Experiment Name: Zm_42deg_Heat_P Parameter: Plant Line Value: 35A19
  misc_feature: MA Experiment 108523 PARAMETER Experiment Name: Zm_42deg_Heat_P Parameter: Temperature (deg C) Value: 42 vs. 22
  misc_feature: MA Experiment 108523 PARAMETER Experiment Name: Zm_42deg_Heat_P Parameter: Timepoint (hr) Value: 6
  misc_feature: MA Experiment 108523 PARAMETER Experiment Name: Zm_42deg_Heat_P Parameter: Tissue Value: Aerial
  misc_feature: MA Experiment ID: 108529 Result: Down-regulated in Transcription
  misc_feature: MA Experiment 108529 PARAMETER Experiment Name: Zm_Imbibed_Seeds_P Parameter: Age (day) Value: 5 vs. 2
  misc_feature: MA Experiment 108529 PARAMETER Experiment Name: Zm_Imbibed_Seeds_P Parameter: Organism Value: Zea mays
  misc_feature: MA Experiment 108529 PARAMETER Experiment Name: Zm_Imbibed_Seeds_P Parameter: Plant Line Value: 35A19
  misc_feature: MA Experiment 108529 PARAMETER Experiment Name: Zm_Imbibed_Seeds_P Parameter: Tissue Value: Roots vs. Embryo
  misc_feature: MA Experiment ID: 108530 Result: Down-regulated in Transcription
  misc_feature: MA Experiment 108530 PARAMETER Experiment Name: Zm_Imbibed_Seeds_P Parameter: Age (day) Value: 6 vs. 2
  misc_feature: MA Experiment 108530 PARAMETER Experiment Name: Zm_Imbibed_Seeds_P Parameter: Organism Value: Zea mays
  misc_feature: MA Experiment 108530 PARAMETER Experiment Name: Zm_Imbibed_Seeds_P Parameter: Plant Line Value: 35A19
  misc_feature: MA Experiment 108530 PARAMETER Experiment Name: Zm_Imbibed_Seeds_P Parameter: Tissue Value: Aerial vs. Embryo
  misc_feature: MA Experiment ID: 108556 Result: Down-regulated in Transcription
  misc_feature: MA Experiment 108556 PARAMETER Experiment Name: Zm_Drought_P Parameter: Age (day) Value: 9
  misc_feature: MA Experiment 108556 PARAMETER Experiment Name: Zm_Drought_P Parameter: Organism Value: Zea mays
  misc_feature: MA Experiment 108556 PARAMETER Experiment Name: Zm_Drought_P Parameter: Plant Line Value: 35A19
  misc_feature: MA Experiment 108556 PARAMETER Experiment Name: Zm_Drought_P Parameter: Timepoint (hr) Value: 24
  misc_feature: MA Experiment 108556 PARAMETER Experiment Name: Zm_Drought_P Parameter: Tissue Value: Aerial
  misc_feature: MA Experiment 108556 PARAMETER Experiment Name: Zm_Drought_P Parameter: Treatment Value: Drought vs. No Drought
  misc_feature: MA Experiment ID: 108559 Result: Down-regulated in Transcription
  misc_feature: MA Experiment 108559 PARAMETER Experiment Name: Zm_5mM_NO_P Parameter: Age (day) Value: 8
  misc_feature: MA Experiment 108559 PARAMETER Experiment Name: Zm_5mM_NO_P Parameter: Organism Value: Zea mays
  misc_feature: MA Experiment 108559 PARAMETER Experiment Name: Zm_5mM_NO_P Parameter: Plant Line Value: 35A19
  misc_feature: MA Experiment 108559 PARAMETER Experiment Name: Zm_5mM_NO_P Parameter: Timepoint (hr) Value: 12
  misc_feature: MA Experiment 108559 PARAMETER Experiment Name: Zm_5mM_NO_P Parameter: Tissue Value: Aerial
  misc_feature: MA Experiment 108559 PARAMETER Experiment Name: Zm_5mM_NO_P Parameter: Treatment Value: 5mM NO vs. No Treatment
  misc_feature: MA Experiment ID: 108597 Result: Down-regulated in Transcription
  misc_feature: MA Experiment 108597 PARAMETER Experiment Name: Zm_100uM_ABA_P Parameter: Age (day) Value: 9
  misc_feature: MA Experiment 108597 PARAMETER Experiment Name: Zm_100uM_ABA_P Parameter: Organism Value: Zea mays
  misc_feature: MA Experiment 108597 PARAMETER Experiment Name: Zm_100uM_ABA_P Parameter: Plant Line Value: 35A19
  misc_feature: MA Experiment 108597 PARAMETER Experiment Name: Zm_100uM_ABA_P Parameter: Timepoint (hr) Value: 24
  misc_feature: MA Experiment 108597 PARAMETER Experiment Name: Zm_100uM_ABA_P Parameter: Tissue Value: Aerial
  misc_feature: MA Experiment 108597 PARAMETER Experiment Name: Zm_100uM_ABA_P Parameter: Treatment Value: 100uM ABA vs. No Treatment
  misc_feature: MA Experiment ID: 20000478 Result: Down-regulated in Transcription
  misc_feature: MA Experiment 20000478 PARAMETER Experiment Name: Zm_5mM_SA_P Parameter: Age (day) Value: 11
  misc_feature: MA Experiment 20000478 PARAMETER Experiment Name: Zm_5mM_SA_P Parameter: Organism Value: Zea mays
  misc_feature: MA Experiment 20000478 PARAMETER Experiment Name: Zm_5mM_SA_P Parameter: Plant Line Value: 35A19
  misc_feature: MA Experiment 20000478 PARAMETER Experiment Name: Zm_5mM_SA_P Parameter: Timepoint (hr) Value: 72
  misc_feature: MA Experiment 20000478 PARAMETER Experiment Name: Zm_5mM_SA_P Parameter: Tissue Value: Aerial
  misc_feature: MA Experiment 20000478 PARAMETER Experiment Name: Zm_5mM_SA_P Parameter: Treatment Value: 5mM SA vs. No Treatment
  misc_feature: MA Experiment ID: 20000480 Result: Down-regulated in Transcription
  misc_feature: MA Experiment 20000480 PARAMETER Experiment Name: Zm_Drought_P Parameter: Age (day) Value: 11
  misc_feature: MA Experiment 20000480 PARAMETER Experiment Name: Zm_Drought_P Parameter: Organism Value: Zea mays
  misc_feature: MA Experiment 20000480 PARAMETER Experiment Name: Zm_Drought_P Parameter: Plant Line Value: 35A19
  misc_feature: MA Experiment 20000480 PARAMETER Experiment Name: Zm_Drought_P Parameter: Timepoint (hr) Value: 72
  misc_feature: MA Experiment 20000480 PARAMETER Experiment Name: Zm_Drought_P Parameter: Tissue Value: Aerial
  misc_feature: MA Experiment 20000480 PARAMETER Experiment Name: Zm_Drought_P Parameter: Treatment Value: Drought vs. No Drought
  misc_feature: MA Experiment ID: 20000487 Result: Down-regulated in Transcription
  misc_feature: MA Experiment 20000487 PARAMETER Experiment Name: Zm_50mM_NH4NO3_L_to_H_P Parameter: Organism Value: Zea mays
  misc_feature: MA Experiment 20000487 PARAMETER Experiment Name: Zm_50mM_NH4NO3_L_to_H_P Parameter: Timepoint (hr) Value: 4
  misc_feature: MA Experiment 20000487 PARAMETER Experiment Name: Zm_50mM_NH4NO3_L_to_H_P Parameter: Tissue Value: Leaves
  misc_feature: MA Experiment 20000487 PARAMETER Experiment Name: Zm_50mM_NH4NO3_L_to_H_P Parameter: Treatment Value: 50mM NH4NO3 vs. 100mM Mannitol
  misc_feature: MA Experiment ID: 20000535 Result: Up-regulated in Transcription
  misc_feature: MA Experiment 20000535 PARAMETER Experiment Name: Zm_Hybrid_Seed_Dev_P Parameter: DAP Value: 30 vs. 12
  misc_feature: MA Experiment 20000535 PARAMETER Experiment Name: Zm_Hybrid_Seed_Dev_P Parameter: Organism Value: Zea mays
  misc_feature: MA Experiment 20000535 PARAMETER Experiment Name: Zm_Hybrid_Seed_Dev_P Parameter: Plant Line Value: 35A19
  misc_feature: MA Experiment 20000535 PARAMETER Experiment Name: Zm_Hybrid_Seed_Dev_P Parameter: Tissue Value: Embryo vs. Unfert Floret
  misc_feature: MA Experiment ID: 20000627 Result: Up-regulated in Transcription
  misc_feature: MA Experiment 20000627 PARAMETER Experiment Name: Zm_Herbicide-Treatments_P Parameter: Timepoint (hr) Value: 12
  misc_feature: MA Experiment 20000627 PARAMETER Experiment Name: Zm_Herbicide-Treatments_P Parameter: Tissue Value: Aerial
  misc_feature: MA Experiment 20000627 PARAMETER Experiment Name: Zm_Herbicide-Treatments_P Parameter: Treatment Value: Finale vs. No Treatment
  misc_feature: MA Experiment ID: 20000632 Result: Down-regulated in Transcription
  misc_feature: MA Experiment 20000632 PARAMETER Experiment Name: Zm_Herbicide-Treatments_P Parameter: Timepoint (hr) Value: 4
  misc_feature: MA Experiment 20000632 PARAMETER Experiment Name: Zm_Herbicide-Treatments_P Parameter: Tissue Value: Aerial
  misc_feature: MA Experiment 20000632 PARAMETER Experiment Name: Zm_Herbicide-Treatments_P Parameter: Treatment Value: Glean vs. No Treatment

SEQ ID NO: 15386 - protein, 393 aa, Zea mays subsp. mays; identical to SEQ ID NO: 11476
  peptide (1)..(393): Ceres Seq. ID no. 15220370
  misc_feature (150)..(379): Pfam Name: O-methyltransferase Pfam Description: O-methyltransferase
  misc_feature (150)..(379): Pfam Name: O-methyltransferase Pfam Description: O-methyltransferase
  misc_feature (150)..(393): Homolog of NCBI NO: 4098238 NR Description: o-methyltransferase [Triticum aestivum]
  misc_feature (145)..(393): Homolog of NCBI NO: 1353193 NR Description: O-METHYLTRANSFERASE ZRP4 (OMT)
  misc_feature (147)..(393): Homolog of NCBI NO: 37530600 NR Description: putative o-methyltransferase ZRP4 [Oryza sativa
  misc_feature (150)..(393): Homolog of NCBI NO: 37530606 NR Description: putative o-methyltransferase ZRP4 [Oryza sativa
  misc_feature (142)..(393): Homolog of NCBI NO: 22093735 NR Description: putative o-methyltransferase [Oryza sativa
  misc_feature (145)..(393): Homolog of NCBI NO: 1353193 NR Description: O-METHYLTRANSFERASE ZRP4 (OMT)
  misc_feature (150)..(393): Homolog of NCBI NO: 37530606 NR Description: putative o-methyltransferase ZRP4 [Oryza sativa
  misc_feature (142)..(393): Homolog of NCBI NO: 16903138 NR Description: chavicol O-methyltransferase [Ocimum basilicum]
  misc_feature (142)..(393): Homolog of NCBI NO: 38175602 NR Description: putative catechol O-methyltransferase [Oryza
  misc_feature (142)..(393): Homolog of NCBI NO: 20514367 NR Description: orcinol O-methyltransferase [Rosa hybrid cultivar]
  misc_feature (138)..(393): Homolog of NCBI NO: 6177792 NR Description: O-methyltransferase [Pyrus pyrifolia]
  misc_feature (150)..(393): Homolog of NCBI NO: 34909608 NR Description: putative o-methyltransferase [Oryza sativa
  misc_feature (142)..(393): Homolog of NCBI NO: 22093735 NR Description: putative o-methyltransferase [Oryza sativa
  misc_feature (147)..(393): Homolog of NCBI NO: 37530600 NR Description: putative o-methyltransferase ZRP4 [Oryza sativa
  misc_feature (150)..(393): Homolog of NCBI NO: 4098238 NR Description: o-methyltransferase [Triticum aestivum]
  misc_feature (150)..(393): Homolog of NCBI NO: 34909608 NR Description: putative o-methyltransferase [Oryza sativa
  misc_feature (138)..(393): Homolog of NCBI NO: 6177792 NR Description: O-methyltransferase [Pyrus pyrifolia]
  misc_feature (142)..(393): Homolog of NCBI NO: 20514367 NR Description: orcinol O-methyltransferase [Rosa hybrid cultivar]
  misc_feature (142)..(393): Homolog of NCBI NO: 38175602 NR Description: putative catechol O-methyltransferase [Oryza
  misc_feature (142)..(393): Homolog of NCBI NO: 16903138 NR Description: chavicol O-methyltransferase [Ocimum basilicum]

SEQ ID NO: 15387 - protein, 232 aa, Zea mays subsp. mays; identical to SEQ ID NO: 11477
  peptide (1)..(232): Ceres Seq. ID no. 15220371
  misc_feature (1)..(218): Pfam Name: O-methyltransferase Pfam Description: O-methyltransferase
  misc_feature (1)..(218): Pfam Name: O-methyltransferase Pfam Description: O-methyltransferase
  misc_feature (1)..(232): Homolog of NCBI NO: 4098238 NR Description: o-methyltransferase [Triticum aestivum]
  misc_feature (1)..(232): Homolog of NCBI NO: 1353193 NR Description: O-METHYLTRANSFERASE ZRP4 (OMT)
  misc_feature (1)..(232): Homolog of NCBI NO: 37530600 NR Description: putative o-methyltransferase ZRP4 [Oryza sativa
  misc_feature (1)..(232): Homolog of NCBI NO: 37530606 NR Description: putative o-methyltransferase ZRP4 [Oryza sativa
  misc_feature (1)..(232): Homolog of NCBI NO: 22093735 NR Description: putative o-methyltransferase [Oryza sativa
  misc_feature (1)..(232): Homolog of NCBI NO: 1353193 NR Description: O-METHYLTRANSFERASE ZRP4 (OMT)
  misc_feature (1)..(232): Homolog of NCBI NO: 37530606 NR Description: putative o-methyltransferase ZRP4 [Oryza sativa
  misc_feature (1)..(232): Homolog of NCBI NO: 16903138 NR Description: chavicol O-methyltransferase [Ocimum basilicum]
  misc_feature (1)..(232): Homolog of NCBI NO: 38175602 NR Description: putative catechol O-methyltransferase [Oryza
  misc_feature (1)..(232): Homolog of NCBI NO: 20514367 NR Description: orcinol O-methyltransferase [Rosa hybrid cultivar]
  misc_feature (1)..(232): Homolog of NCBI NO: 6177792 NR Description: O-methyltransferase [Pyrus pyrifolia]
  misc_feature (1)..(232): Homolog of NCBI NO: 34909608 NR Description: putative o-methyltransferase [Oryza sativa
  misc_feature (1)..(232): Homolog of NCBI NO: 22093735 NR Description: putative o-methyltransferase [Oryza sativa
  misc_feature (1)..(232): Homolog of NCBI NO: 37530600 NR Description: putative o-methyltransferase ZRP4 [Oryza sativa
  misc_feature (1)..(232): Homolog of NCBI NO: 4098238 NR Description: o-methyltransferase [Triticum aestivum]
  misc_feature (1)..(232): Homolog of NCBI NO: 34909608 NR Description: putative o-methyltransferase [Oryza sativa
  misc_feature (1)..(232): Homolog of NCBI NO: 6177792 NR Description: O-methyltransferase [Pyrus pyrifolia]
  misc_feature (1)..(232): Homolog of NCBI NO: 20514367 NR Description: orcinol O-methyltransferase [Rosa hybrid cultivar]
  misc_feature (1)..(232): Homolog of NCBI NO: 38175602 NR Description: putative catechol O-methyltransferase [Oryza
  misc_feature (1)..(232): Homolog of NCBI NO: 16903138 NR Description: chavicol O-methyltransferase [Ocimum basilicum]

SEQ ID NO: 15388 - protein, 228 aa, Zea mays subsp. mays; identical to SEQ ID NO: 11478
  peptide (1)..(228): Ceres Seq. ID no. 15220372
  misc_feature (1)..(214): Pfam Name: O-methyltransferase Pfam Description: O-methyltransferase
  misc_feature (1)..(214): Pfam Name: O-methyltransferase Pfam Description: O-methyltransferase
  misc_feature (1)..(228): Homolog of NCBI NO: 4098238 NR Description: o-methyltransferase [Triticum aestivum]
  misc_feature (1)..(228): Homolog of NCBI NO: 1353193 NR Description: O-METHYLTRANSFERASE ZRP4 (OMT)
  misc_feature (1)..(228): Homolog of NCBI NO: 37530600 NR Description: putative o-methyltransferase ZRP4 [Oryza sativa
  misc_feature (1)..(228): Homolog of NCBI NO: 37530606 NR Description: putative o-methyltransferase ZRP4 [Oryza sativa
  misc_feature (1)..(228): Homolog of NCBI NO: 22093735 NR Description: putative o-methyltransferase [Oryza sativa
  misc_feature (1)..(228): Homolog of NCBI NO: 1353193 NR Description: O-METHYLTRANSFERASE ZRP4 (OMT)
  misc_feature (1)..(228): Homolog of NCBI NO: 37530606 NR Description: putative o-methyltransferase ZRP4 [Oryza sativa
  misc_feature (1)..(228): Homolog of NCBI NO: 16903138 NR Description: chavicol O-methyltransferase [Ocimum basilicum]
  misc_feature (1)..(228): Homolog of NCBI NO: 38175602 NR Description: putative catechol O-methyltransferase [Oryza
  misc_feature (1)..(228): Homolog of NCBI NO: 20514367 NR Description: orcinol O-methyltransferase [Rosa hybrid cultivar]
  misc_feature (1)..(228): Homolog of NCBI NO: 6177792 NR Description: O-methyltransferase [Pyrus pyrifolia]
  misc_feature (1)..(228): Homolog of NCBI NO: 34909608 NR Description: putative o-methyltransferase [Oryza sativa
  misc_feature (1)..(228): Homolog of NCBI NO: 22093735 NR Description: putative o-methyltransferase [Oryza sativa
  misc_feature (1)..(228): Homolog of NCBI NO: 37530600 NR Description: putative o-methyltransferase ZRP4 [Oryza sativa
  misc_feature (1)..(228): Homolog of NCBI NO: 4098238 NR Description: o-methyltransferase [Triticum aestivum]
  misc_feature (1)..(228): Homolog of NCBI NO: 34909608 NR Description: putative o-methyltransferase [Oryza sativa
  misc_feature (1)..(228): Homolog of NCBI NO: 6177792 NR Description: O-methyltransferase [Pyrus pyrifolia]
  misc_feature (1)..(228): Homolog of NCBI NO: 20514367 NR Description: orcinol O-methyltransferase [Rosa hybrid cultivar]
  misc_feature (1)..(228): Homolog of NCBI NO: 38175602 NR Description: putative catechol O-methyltransferase [Oryza
  misc_feature (1)..(228): Homolog of NCBI NO: 16903138 NR Description: chavicol O-methyltransferase [Ocimum basilicum]

SEQ ID NO: 15389 - DNA, 717 bp, Zea mays subsp. mays
  misc_feature (1)..(717): Ceres Seq. ID no. 13628146
  misc_feature: MA Experiment ID: 108515 Result: Down-regulated in Transcription
  misc_feature: MA Experiment 108515 PARAMETER Experiment Name: Zm_2mM_SA_P Parameter: Age (day) Value: 8
  misc_feature: MA Experiment 108515 PARAMETER Experiment Name: Zm_2mM_SA_P Parameter: Organism Value: Zea mays
  misc_feature: MA Experiment 108515 PARAMETER Experiment Name: Zm_2mM_SA_P Parameter: Plant Line Value: 35A19
  misc_feature: MA Experiment 108515 PARAMETER Experiment Name: Zm_2mM_SA_P Parameter: Timepoint (hr) Value: 12
  misc_feature: MA Experiment 108515 PARAMETER Experiment Name: Zm_2mM_SA_P Parameter: Tissue Value: Aerial
  misc_feature: MA Experiment 108515 PARAMETER Experiment Name: Zm_2mM_SA_P Parameter: Treatment Value: 2mM SA vs. No Treatment
  misc_feature: MA Experiment ID: 108523 Result: Down-regulated in Transcription
  misc_feature: MA Experiment 108523 PARAMETER Experiment Name: Zm_42deg_Heat_P Parameter: Age (day) Value: 8
  misc_feature: MA Experiment 108523 PARAMETER Experiment Name: Zm_42deg_Heat_P Parameter: Organism Value: Zea mays
  misc_feature: MA Experiment 108523 PARAMETER Experiment Name: Zm_42deg_Heat_P Parameter: Plant Line Value: 35A19
  misc_feature: MA Experiment 108523 PARAMETER Experiment Name: Zm_42deg_Heat_P Parameter: Temperature (deg C) Value: 42 vs. 22
  misc_feature: MA Experiment 108523 PARAMETER Experiment Name: Zm_42deg_Heat_P Parameter: Timepoint (hr) Value: 6
  misc_feature: MA Experiment 108523 PARAMETER Experiment Name: Zm_42deg_Heat_P Parameter: Tissue Value: Aerial
  misc_feature: MA Experiment ID: 108535 Result: Up-regulated in Transcription
  misc_feature: MA Experiment 108535 PARAMETER Experiment Name: Zm_Meristem_P Parameter: Age (day) Value: 8
  misc_feature: MA Experiment 108535 PARAMETER Experiment Name: Zm_Meristem_P Parameter: Organism Value: Zea mays
  misc_feature: MA Experiment 108535 PARAMETER Experiment Name: Zm_Meristem_P Parameter: Plant Line Value: 35A19
  misc_feature: MA Experiment 108535 PARAMETER Experiment Name: Zm_Meristem_P Parameter: Tissue Value: Root Meristem vs. Above Root Meristem
  misc_feature: MA Experiment ID: 108544 Result: Down-regulated in Transcription
  misc_feature: MA Experiment ID: 108597 Result: Down-regulated in Transcription
  misc_feature: MA Experiment 108597 PARAMETER Experiment Name: Zm_100uM_ABA_P Parameter: Age (day) Value: 9
  misc_feature: MA Experiment 108597 PARAMETER Experiment Name: Zm_100uM_ABA_P Parameter: Organism Value: Zea mays
  misc_feature: MA Experiment 108597 PARAMETER Experiment Name: Zm_100uM_ABA_P Parameter: Plant Line Value: 35A19
  misc_feature: MA Experiment 108597 PARAMETER Experiment Name: Zm_100uM_ABA_P Parameter: Timepoint (hr) Value: 24
  misc_feature: MA Experiment 108597 PARAMETER Experiment Name: Zm_100uM_ABA_P Parameter: Tissue Value: Aerial
  misc_feature: MA Experiment 108597 PARAMETER Experiment Name: Zm_100uM_ABA_P Parameter: Treatment Value: 100uM ABA vs. No Treatment
  misc_feature: MA Experiment ID: 20000477 Result: Down-regulated in Transcription
  misc_feature: MA Experiment 20000477 PARAMETER Experiment Name: Zm_5mM_SA_P Parameter: Age (day) Value: 10
  misc_feature: MA Experiment 20000477 PARAMETER Experiment Name: Zm_5mM_SA_P Parameter: Organism Value: Zea mays
  misc_feature: MA Experiment 20000477 PARAMETER Experiment Name: Zm_5mM_SA_P Parameter: Plant Line Value: 35A19
  misc_feature: MA Experiment 20000477 PARAMETER Experiment Name: Zm_5mM_SA_P Parameter: Timepoint (hr) Value: 48
  misc_feature: MA Experiment 20000477 PARAMETER Experiment Name: Zm_5mM_SA_P Parameter: Tissue Value: Aerial
  misc_feature: MA Experiment 20000477 PARAMETER Experiment Name: Zm_5mM_SA_P Parameter: Treatment Value: 5mM SA vs. No Treatment
  misc_feature: MA Experiment ID: 20000478 Result: Down-regulated in Transcription
  misc_feature: MA Experiment 20000478 PARAMETER Experiment Name: Zm_5mM_SA_P Parameter: Age (day) Value: 11
  misc_feature: MA Experiment 20000478 PARAMETER Experiment Name: Zm_5mM_SA_P Parameter: Organism Value: Zea mays
  misc_feature: MA Experiment 20000478 PARAMETER Experiment Name: Zm_5mM_SA_P Parameter: Plant Line Value: 35A19
  misc_feature: MA Experiment 20000478 PARAMETER Experiment Name: Zm_5mM_SA_P Parameter: Timepoint (hr) Value: 72
  misc_feature: MA Experiment 20000478 PARAMETER Experiment Name: Zm_5mM_SA_P Parameter: Tissue Value: Aerial
  misc_feature: MA Experiment 20000478 PARAMETER Experiment Name: Zm_5mM_SA_P Parameter: Treatment Value: 5mM SA vs. No Treatment
  misc_feature: MA Experiment ID: 20000479 Result: Down-regulated in Transcription
  misc_feature: MA Experiment 20000479 PARAMETER Experiment Name: Zm_Drought_P Parameter: Age (day) Value: 10
  misc_feature: MA Experiment 20000479 PARAMETER Experiment Name: Zm_Drought_P Parameter: Organism Value: Zea mays
  misc_feature: MA Experiment 20000479 PARAMETER Experiment Name: Zm_Drought_P Parameter: Plant Line Value: 35A19
  misc_feature: MA Experiment 20000479 PARAMETER Experiment Name: Zm_Drought_P Parameter: Timepoint (hr) Value: 48
  misc_feature: MA Experiment 20000479 PARAMETER Experiment Name: Zm_Drought_P Parameter: Tissue Value: Aerial
  misc_feature: MA Experiment 20000479 PARAMETER Experiment Name: Zm_Drought_P Parameter: Treatment Value: Drought vs. No Drought
  misc_feature: MA Experiment ID: 20000632 Result: Down-regulated in Transcription
  misc_feature: MA Experiment 20000632 PARAMETER Experiment Name: Zm_Herbicide-Treatments_P Parameter: Timepoint (hr) Value: 4
  misc_feature: MA Experiment 20000632 PARAMETER Experiment Name: Zm_Herbicide-Treatments_P Parameter: Tissue Value: Aerial
  misc_feature: MA Experiment 20000632 PARAMETER Experiment Name: Zm_Herbicide-Treatments_P Parameter: Treatment Value: Glean vs. No Treatment
  misc_feature: MA Experiment ID: 20000633 Result: Down-regulated in Transcription
  misc_feature: MA Experiment 20000633 PARAMETER Experiment Name: Zm_Herbicide-Treatments_P Parameter: Timepoint (hr) Value: 4
  misc_feature: MA Experiment 20000633 PARAMETER Experiment Name: Zm_Herbicide-Treatments_P Parameter: Tissue Value: Aerial
  misc_feature: MA Experiment 20000633 PARAMETER Experiment Name: Zm_Herbicide-Treatments_P Parameter: Treatment Value: Trimec vs. No Treatment
ccaactacggtaactcgtctgctcgcatttcctcccaatccatcccgcctccaaacccgaactccaagtcgccccgcatcgatggcgcccaaggccgagaagaagcccgcggcgaagaagccggcggaggaggagcccgctgccgagaaggcgccggccgggaagaagcccaaggcggagaagcgtgtcccagcaggcaagtccgccggcaaggagggcggcgagggaaagaggggccggaagaagggcaagaagagcgtggagacctacaagatctacatcttcaaggtgctgaagcaggtgcacccggacatcggcatctcctctaaggccatgtccatcatgaactccttcatcaacgacatcttcgagaagctcgccgccgaggccgccaagctcgcgcggtacaacaagaagcccaccatcacctcccgtgagatccagacctccgtgcgcctcgtcctccccggggagctcgccaagcacgccgtctccgagggcaccaaggccgtcaccaagttcacctcgtcctaggctgcgtggcctccgcttgcaggcttccctcgtatgttcgcgtgtcttgctgtagttaggtgctgctgtgtctggtctcctccggtagcaactgttatctgatggaacagtaacaatgcttattgaatccagctagttgcttatttgtggatcctctctctttgttgttggccacctttatct

SEQ ID NO: 15390 - protein, 177 aa, Zea mays subsp. mays
  peptide (1)..(177): Ceres Seq. ID no. 13628147
  misc_feature (53)..(176): Pfam Name: Core histone H2A/H2B/H3/H4 Pfam Description: Core histone H2A/H2B/H3/H4
  misc_feature (28)..(177): Homolog of NCBI NO: 399854 NR Description: Histone H2B.2 >gi|283042|pir||S28049 histone H2B
  misc_feature (28)..(177): Homolog of NCBI NO: 3913804 NR Description: Histone H2B.3 >gi|577825|emb|CAA49584.1| H2B
  misc_feature (28)..(177): Homolog of NCBI NO: 122022 NR Description: Histone H2B >gi|283025|pir||S22323 histone H2B -
  misc_feature (28)..(177): Homolog of NCBI NO: 399853 NR Description: Histone H2B.1 >gi|283041|pir||S28048 histone H2B
  misc_feature (28)..(177): Homolog of NCBI NO: 1708107 NR Description: Histone H2B >gi|7439752|pir||T02077 histone H2B -
  misc_feature (28)..(177): Homolog of NCBI NO: 34895904 NR Description: putative histone H2B [Oryza sativa (japonica group)] >gi|9663991|dbj|BAB03632.1| putative histone H2B [Oryza
  misc_feature (6)..(177): Homolog of NCBI NO: 34876159 NR Description: similar to Histone H2B 291B [Rattus norvegicus]
  misc_feature (6)..(174): Homolog of NCBI NO: 15223150 NR Description: histone H2B family [Arabidopsis thaliana] T23G18.3 [Arabidopsis thaliana]
  misc_feature (115)..(165): Homolog of NCBI NO: 30923862 NR Description: CG40461-PA [Drosophila melanogaster]
PTTVTRLLAFPPNPSRLQTRTPSRPASMAPKAEKKPAAKKPAEEEPAAEKAPAGKKPKAEKRVPAGKSAGKEGGEGKRGRKKGKKSVETYKIYIFKVLKQVHPDIGISSKAMSIMNSFINDIFEKLAAEAAKLARYNKKPTITSREIQTSVRLVLPGELAKHAVSEGTKAVTKFTSS

SEQ ID NO: 15391 - protein, 150 aa, Zea mays subsp. mays
  peptide (1)..(150): Ceres Seq. ID no. 13628148
  misc_feature (26)..(149): Pfam Name: Core histone H2A/H2B/H3/H4 Pfam Description: Core histone H2A/H2B/H3/H4
  misc_feature (1)..(150): Homolog of NCBI NO: 122022 NR Description: Histone H2B >gi|283025|pir||S22323 histone H2B -
  misc_feature (1)..(150): Homolog of NCBI NO: 399853 NR Description: Histone H2B.1 >gi|283041|pir||S28048 histone H2B
  misc_feature (1)..(150): Homolog of NCBI NO: 1708107 NR Description: Histone H2B >gi|7439752|pir||T02077 histone H2B -
  misc_feature (1)..(150): Homolog of NCBI NO: 34895904 NR Description: putative histone H2B [Oryza sativa (japonica group)] >gi|9663991|dbj|BAB03632.1| putative histone H2B [Oryza
  misc_feature (1)..(150): Homolog of NCBI NO: 3913804 NR Description: Histone H2B.3 >gi|577825|emb|CAA49584.1| H2B
  misc_feature (1)..(150): Homolog of NCBI NO: 399854 NR Description: Histone H2B.2 >gi|283042|pir||S28049 histone H2B
  misc_feature (1)..(150): Homolog of NCBI NO: 34876159 NR Description: similar to Histone H2B 291B [Rattus norvegicus]
  misc_feature (1)..(147): Homolog of NCBI NO: 15223150 NR Description: histone H2B family [Arabidopsis thaliana] T23G18.3 [Arabidopsis thaliana]
  misc_feature (88)..(138): Homolog of NCBI NO: 30923862 NR Description: CG40461-PA [Drosophila melanogaster]
MAPKAEKKPAAKKPAEEEPAAEKAPAGKKPKAEKRVPAGKSAGKEGGEGKRGRKKGKKSVETYKIYIFKVLKQVHPDIGISSKAMSIMNSFINDIFEKLAAEAAKLARYNKKPTITSREIQTSVRLVLPGELAKHAVSEGTKAVTKFTSS

SEQ ID NO: 15392 - protein, 108 aa, Zea mays subsp. mays
  peptide (1)..(108): Ceres Seq. ID no. 13628149
  misc_feature (76)..(108): Homolog of NCBI NO: 17505204 NR Description: histone 1, H2bc; H2B histone family, member S musculus] >gi|12837582|dbj|BAB23873.1| unnamed protein product
NYGNSSARISSQSIPPPNPNSKSPRIDGAQGREEARGEEAGGGGARCREGAGREEAQGGEACPSRQVRRQGGRRGKEGPEEGQEERGDLQDLHLQGAEAGAPGHRHLL

SEQ ID NO: 15393 - DNA, 998 bp, Zea mays subsp. mays
  misc_feature (1)..(998): Ceres Seq. ID no. 13636513
  misc_feature: MA Experiment ID: 108528 Result: Up-regulated in Transcription
  misc_feature: MA Experiment 108528 PARAMETER Experiment Name: Zm_Imbibed_Seeds_P Parameter: Age (day) Value: 5 vs. 2
  misc_feature: MA Experiment 108528 PARAMETER Experiment Name: Zm_Imbibed_Seeds_P Parameter: Organism Value: Zea mays
  misc_feature: MA Experiment 108528 PARAMETER Experiment Name: Zm_Imbibed_Seeds_P Parameter: Plant Line Value: 35A19
  misc_feature: MA Experiment 108528 PARAMETER Experiment Name: Zm_Imbibed_Seeds_P Parameter: Tissue Value: Aerial vs. Embryo
  misc_feature: MA Experiment ID: 108530 Result: Up-regulated in Transcription
  misc_feature: MA Experiment 108530 PARAMETER Experiment Name: Zm_Imbibed_Seeds_P Parameter: Age (day) Value: 6 vs. 2
  misc_feature: MA Experiment 108530 PARAMETER Experiment Name: Zm_Imbibed_Seeds_P Parameter: Organism Value: Zea mays
  misc_feature: MA Experiment 108530 PARAMETER Experiment Name: Zm_Imbibed_Seeds_P Parameter: Plant Line Value: 35A19
  misc_feature: MA Experiment 108530 PARAMETER Experiment Name: Zm_Imbibed_Seeds_P Parameter: Tissue Value: Aerial vs. Embryo
  misc_feature: MA Experiment ID: 108545 Result: Up-regulated in Transcription
  misc_feature: MA Experiment 108545 PARAMETER Experiment Name: Zm_Imbibed_Seeds_P Parameter: Age (day) Value: 3 vs. 2
  misc_feature: MA Experiment 108545 PARAMETER Experiment Name: Zm_Imbibed_Seeds_P Parameter: Organism Value: Zea mays
  misc_feature: MA Experiment 108545 PARAMETER Experiment Name: Zm_Imbibed_Seeds_P Parameter: Plant Line Value: 35A19
  misc_feature: MA Experiment 108545 PARAMETER Experiment Name: Zm_Imbibed_Seeds_P Parameter: Tissue Value: Aerial vs. Embryo
  misc_feature: MA Experiment ID: 108547 Result: Up-regulated in Transcription
  misc_feature: MA Experiment 108547 PARAMETER Experiment Name: Zm_Imbibed_Seeds_P Parameter: Age (day) Value: 4 vs. 2
  misc_feature: MA Experiment 108547 PARAMETER Experiment Name: Zm_Imbibed_Seeds_P Parameter: Organism Value: Zea mays
  misc_feature: MA Experiment 108547 PARAMETER Experiment Name: Zm_Imbibed_Seeds_P Parameter: Plant Line Value: 35A19
  misc_feature: MA Experiment 108547 PARAMETER Experiment Name: Zm_Imbibed_Seeds_P Parameter: Tissue Value: Aerial vs. Embryo
  misc_feature: MA Experiment ID: 108559 Result: Down-regulated in Transcription
  misc_feature: MA Experiment 108559 PARAMETER Experiment Name: Zm_5mM_NO_P Parameter: Age (day) Value: 8
  misc_feature: MA Experiment 108559 PARAMETER Experiment Name: Zm_5mM_NO_P Parameter: Organism Value: Zea mays
  misc_feature: MA Experiment 108559 PARAMETER Experiment Name: Zm_5mM_NO_P Parameter: Plant Line Value: 35A19
  misc_feature: MA Experiment 108559 PARAMETER Experiment Name: Zm_5mM_NO_P Parameter: Timepoint (hr) Value: 12
  misc_feature: MA Experiment 108559 PARAMETER Experiment Name: Zm_5mM_NO_P Parameter: Tissue Value: Aerial
  misc_feature: MA Experiment 108559 PARAMETER Experiment Name: Zm_5mM_NO_P Parameter: Treatment Value: 5mM NO vs. No Treatment
  misc_feature: MA Experiment ID: 108688 Result: Down-regulated in Transcription
  misc_feature: MA Experiment 108688 PARAMETER Experiment Name: Zm_Embryos-Flowers__P Parameter: Tissue Value: Immature Flowers vs. Aerial+
ggacctttccaagtctcaaaccagagcgaggccgcactgcccgcgagtcctccactccgaccgcacgatggctgcgctgcgcctcgcctccttcaccctccgccccgccgctgccgcggcctccgcctcctccggcgggaccccagccgcgtccggctccgtctccgtctccttcgcccgcgcggcgcgagggctgccctccctccgcctggccccgccccgccrccgcrgggacmtcrccaggycycgcgccgcggccgaggccgcggcggagagctacgcrtccgcgctgtcggaggtggccgtcgagaacggcaccctcgagcagacggtctccgacctsgagaagctggagaagrtcttckcsgacgaggccgtcgccgagttcttcgacaaccccaccgtcccgcgcgaggagaaggccgagctcatcgrcgagatcgccargtcgtccgagctgcagccgcacgtcgtcaacttcctcaacgtcgtcgtcgacaacttccgcgcgkccatcgtgccgcagatcgtcgycgagttcgagaacgtctacaactcgctcacgggcaccgaggtcgccaccgtcacctccgtcgtgcagctcgagtcgcaggacctcgcgcagatcgcgcagcacgtccagaagatgaccggcgccaagaacgtccgcctcaagacgcagctcgacccggcgctcatcgccggcttcaccgtgcagtacggccgcgacggctccaacttgatcgacatgagcgtccggaagcagatcgaggagatcgcgtccgagttcgagttgcccgccgtcccgctcgaagtctgaggccggcttgaggcgtccatcctcgccctcgaagctataggtcctttttctgctgcctctctccctgctctgctattcatctgtatcattctctggttgttgaatgttttgagtgaatggtgaatgctgcatacctggattttaggattcatatttgaatgaatggtgaatacactgc

SEQ ID NO: 15394 - protein, 276 aa, Zea mays subsp. mays
  peptide (1)..(276): Ceres Seq. ID no. 15219366
  misc_feature (75)..(75): Xaa is any aa, unknown or other
  misc_feature (77)..(77): Xaa is any aa, unknown or other
  misc_feature (79)..(79): Xaa is any aa, unknown or other
  misc_feature (80)..(80): Xaa is any aa, unknown or other
  misc_feature (82)..(82): Xaa is any aa, unknown or other
  misc_feature (83)..(83): Xaa is any aa, unknown or other
  misc_feature (95)..(95): Xaa is any aa, unknown or other
  misc_feature (115)..(115): Xaa is any aa, unknown or other
  misc_feature (120)..(120): Xaa is any aa, unknown or other
  misc_feature (122)..(122): Xaa is any aa, unknown or other
  misc_feature (123)..(123): Xaa is any aa, unknown or other
  misc_feature (145)..(145): Xaa is any aa, unknown or other
  misc_feature (149)..(149): Xaa is any aa, unknown or other
  misc_feature (171)..(171): Xaa is any aa, unknown or other
  misc_feature (178)..(178): Xaa is any aa, unknown or other
GPFQVSNQSEAALPASPPLRPHDGCAAPRLLHPPPRRCRGLRLLRRDPSRVRLRLRLLRPRGARAALPPPGPAPXPXGXXQXXRRGRGRGGELRXRAVGGGRRERHPRADGLRPXEAGEXLXXRGRRRVLRQPHRPARGEGRAHXRDRXVVRAAAARRQLPQRRRRQLPRXHRAADRXRVRERLQLAHGHRGRHRHLRRAARVAGPRADRAARPEDDRRQERPPQDAARPGAHRRLHRAVRPRRLQLDRHERPEADRGDRVRVRVARRPARSLRPA

SEQ ID NO: 15395 - protein, 272 aa, Zea mays subsp. mays
  peptide (1)..(272): Ceres Seq. ID no. 15219367
  misc_feature (89)..(263): Pfam Name: ATP synthase delta (OSCP) subunit Pfam Description: ATP synthase delta (OSCP) subunit
  misc_feature (23)..(272): Homolog of NCBI NO: 1168587 NR Description: ATP synthase delta chain, chloroplast precursor
  misc_feature (88)..(272): Homolog of NCBI NO: 1084479 NR Description: H+-transporting two-sector ATPase (EC 3.6.3.14)
  misc_feature (23)..(272): Homolog of NCBI NO: 416681 NR Description: ATP synthase delta chain, chloroplast precursor
  misc_feature (23)..(272): Homolog of NCBI NO: 114584 NR Description: ATP synthase delta chain, chloroplast precursor
  misc_feature (23)..(272): Homolog of NCBI NO: 170098 NR Description: ATP synthase delta subunit precursor
  misc_feature (57)..(270): Homolog of NCBI NO: 15233985 NR Description: H+-transporting ATP synthase-related protein
  misc_feature (57)..(270): Homolog of NCBI NO: 18491181 NR Description: putative H+-transporting ATP synthase
  misc_feature (89)..(272): Homolog of NCBI NO: 399082 NR Description: ATP synthase delta chain, chloroplast precursor
  misc_feature (139)..(270): Homolog of NCBI NO: 1480014 NR Description: putative delta subunit of ATP synthase [Brassica
  misc_feature (55)..(262): Homolog of NCBI NO: 5902612 NR Description: ATP synthase-delta chain [Volvox carteri f.
  misc_feature (75)..(75): Xaa is any aa, unknown or other
  misc_feature (77)..(77): Xaa is any aa, unknown or other
  misc_feature (79)..(79): Xaa is any aa, unknown or other
  misc_feature (80)..(80): Xaa is any aa, unknown or other
  misc_feature (82)..(82): Xaa is any aa, unknown or other
  misc_feature (94)..(94): Xaa is any aa, unknown or other
  misc_feature (114)..(114): Xaa is any aa, unknown or other
  misc_feature (120)..(120): Xaa is any aa, unknown or other
  misc_feature (122)..(122): Xaa is any aa, unknown or other
  misc_feature (145)..(145): Xaa is any aa, unknown or other
  misc_feature (149)..(149): Xaa is any aa, unknown or other
  misc_feature (171)..(171): Xaa is any aa, unknown or other
  misc_feature (178)..(178): Xaa is any aa, unknown or other
DLSKSQTRARPHCPRVLHSDRTMAALRLASFTLRPAAAAASASSGGTPAASGSVSVSFARAARGLPSLRLAPPRXRXDXXRXRAAAEAAAESYXSALSEVAVENGTLEQTVSDXEKLEKXFXDEAVAEFFDNPTVPREEKAELIXEIAXSSELQPHVVNFLNVVVDNFRAXIVPQIVXEFENVYNSLTGTEVATVTSVVQLESQDLAQIAQHVQKMTGAKNVRLKTQLDPALIAGFTVQYGRDGSNLIDMSVRKQIEEIASEFELPAVPLEV

SEQ ID NO: 15396 - protein, 250 aa, Zea mays subsp. mays
  peptide (1)..(250): Ceres Seq. ID no. 15219368
  misc_feature (67)..(241): Pfam Name: ATP synthase delta (OSCP) subunit Pfam Description: ATP synthase delta (OSCP) subunit
  misc_feature (1)..(250): Homolog of NCBI NO: 1168587 NR Description: ATP synthase delta chain, chloroplast precursor
  misc_feature (66)..(250): Homolog of NCBI NO: 1084479 NR Description: H+-transporting two-sector ATPase (EC 3.6.3.14)
  misc_feature (1)..(250): Homolog of NCBI NO: 416681 NR Description: ATP synthase delta chain, chloroplast precursor
  misc_feature (1)..(250): Homolog of NCBI NO: 114584 NR Description: ATP synthase delta chain, chloroplast precursor
  misc_feature (1)..(250): Homolog of NCBI NO: 170098 NR Description: ATP synthase delta subunit precursor
  misc_feature (35)..(248): Homolog of NCBI NO: 15233985 NR Description: H+-transporting ATP synthase-related protein
  misc_feature (35)..(248): Homolog of NCBI NO: 18491181 NR Description: putative H+-transporting ATP synthase
  misc_feature (67)..(250): Homolog of NCBI NO: 399082 NR Description: ATP synthase delta chain, chloroplast precursor
  misc_feature (117)..(248): Homolog of NCBI NO: 1480014 NR Description: putative delta subunit of ATP synthase [Brassica
  misc_feature (33)..(240): Homolog of NCBI NO: 5902612 NR Description: ATP synthase-delta chain [Volvox carteri f.
  misc_feature (53)..(53): Xaa is any aa, unknown or other
  misc_feature (55)..(55): Xaa is any aa, unknown or other
  misc_feature (57)..(57): Xaa is any aa, unknown or other
  misc_feature (58)..(58): Xaa is any aa, unknown or other
  misc_feature (60)..(60): Xaa is any aa, unknown or other
  misc_feature (72)..(72): Xaa is any aa, unknown or other
  misc_feature (92)..(92): Xaa is any aa, unknown or other
  misc_feature (98)..(98): Xaa is any aa, unknown or other
  misc_feature (100)..(100): Xaa is any aa, unknown or other
  misc_feature (123)..(123): Xaa is any aa, unknown or other
  misc_feature (127)..(127): Xaa is any aa, unknown or other
  misc_feature (149)..(149): Xaa is any aa, unknown or other
  misc_feature (156)..(156): Xaa is any aa, unknown or other
MAALRLASFTLRPAAAAASASSGGTPAASGSVSVSFARAARGLPSLRLAPPRXRXDXXRXRAAAEAAAESYXSALSEVAVENGTLEQTVSDXEKLEKXFXDEAVAEFFDNPTVPREEKAELIXEIAXSSELQPHVVNFLNVVVDNFRAXIVPQIVXEFENVYNSLTGTEVATVTSVVQLESQDLAQIAQHVQKMTGAKNVRLKTQLDPALIAGFTVQYGRDGSNLIDMSVRKQIEEIASEFELPAVPLEV

SEQ ID NO: 15397 - DNA, 2065 bp, Zea mays subsp. mays; identical to SEQ ID NO: 14940
  misc_feature (1)..(2065): Ceres Seq. ID no. 13636855
  misc_feature: MA Experiment ID: 108504 Result: Down-regulated in Transcription
  misc_feature: MA Experiment 108504 PARAMETER Experiment Name: Zm_Drought_P Parameter: Age (day) Value: 8
  misc_feature: MA Experiment 108504 PARAMETER Experiment Name: Zm_Drought_P Parameter: Organism Value: Zea mays
  misc_feature: MA Experiment 108504 PARAMETER Experiment Name: Zm_Drought_P Parameter: Plant Line Value: 35A19
  misc_feature: MA Experiment 108504 PARAMETER Experiment Name: Zm_Drought_P Parameter: Timepoint (hr) Value: 12
  misc_feature: MA Experiment 108504 PARAMETER Experiment Name: Zm_Drought_P Parameter: Tissue Value: Aerial
  misc_feature: MA Experiment 108504 PARAMETER Experiment Name: Zm_Drought_P Parameter: Treatment Value: Drought vs. No Drought
  misc_feature: MA Experiment ID: 108527 Result: Down-regulated in Transcription
  misc_feature: MA Experiment 108527 PARAMETER Experiment Name: Zm_5mM_NO_P Parameter: Age (day) Value: 8
  misc_feature: MA Experiment 108527 PARAMETER Experiment Name: Zm_5mM_NO_P Parameter: Organism Value: Zea mays
  misc_feature: MA Experiment 108527 PARAMETER Experiment Name: Zm_5mM_NO_P Parameter: Plant Line Value: 35A19
  misc_feature: MA Experiment 108527 PARAMETER Experiment Name: Zm_5mM_NO_P Parameter: Timepoint (hr) Value: 6
  misc_feature: MA Experiment 108527 PARAMETER Experiment Name: Zm_5mM_NO_P Parameter: Tissue Value: Aerial
  misc_feature: MA Experiment 108527 PARAMETER Experiment Name: Zm_5mM_NO_P Parameter: Treatment Value: 5mM NO vs. No Treatment
  misc_feature: MA Experiment ID: 108536 Result: Up-regulated in Transcription
  misc_feature: MA Experiment 108536 PARAMETER Experiment Name: Zm_Meristem_P Parameter: Age (day) Value: 8
  misc_feature: MA Experiment 108536 PARAMETER Experiment Name: Zm_Meristem_P Parameter: Organism Value: Zea mays
  misc_feature: MA Experiment 108536 PARAMETER Experiment Name: Zm_Meristem_P Parameter: Plant Line Value: 35A19
  misc_feature: MA Experiment 108536 PARAMETER Experiment Name: Zm_Meristem_P Parameter: Tissue Value: Shoot Meristem vs. Above Shoot Meristem
  misc_feature: MA Experiment ID: 108543 Result: Up-regulated in Transcription
  misc_feature: MA Experiment ID: 20000492 Result: Down-regulated in Transcription
  misc_feature: MA Experiment 20000492 PARAMETER Experiment Name: Zm_Hybrid_Seed_Dev_P Parameter: DAP Value: 12
  misc_feature: MA Experiment 20000492 PARAMETER Experiment Name: Zm_Hybrid_Seed_Dev_P Parameter: Organism Value: Zea mays
  misc_feature: MA Experiment 20000492 PARAMETER Experiment Name: Zm_Hybrid_Seed_Dev_P Parameter: Plant Line Value: 35A19
  misc_feature: MA Experiment 20000492 PARAMETER Experiment Name: Zm_Hybrid_Seed_Dev_P Parameter: Tissue Value: Fert Kernel vs. Unfert Floret

SEQ ID NO: 15398 - protein, 565 aa, Zea mays subsp. mays; identical to SEQ ID NO: 14941
  peptide (1)..(565): Ceres Seq. ID no. 13636856
  misc_feature (4)..(488): Pfam Name: Mlo family Pfam Description: Mlo family
  misc_feature (4)..(488): Pfam Name: Mlo family Pfam Description: Mlo family
  misc_feature (1)..(565): Homolog of NCBI NO: 13784977 NR Description: seven transmembrane protein Mlo2 [Zea mays]
  misc_feature (1)..(561): Homolog of NCBI NO: 37536520 NR Description: putative Mlo (pathogen resistance) protein [Oryza
  misc_feature (108)..(455): Homolog of NCBI NO: 13784985 NR Description: seven transmembrane protein Mlo6 [Zea mays]
  misc_feature (1)..(110): Homolog of NCBI NO: 13784985 NR Description: seven transmembrane protein Mlo6 [Zea mays]
  misc_feature (1)..(443): Homolog of NCBI NO: 15217453 NR Description: seven transmembrane MLO protein family (MLO9)
  misc_feature (1)..(561): Homolog of NCBI NO: 37536520 NR Description: putative Mlo (pathogen resistance) protein [Oryza
  misc_feature (1)..(110): Homolog of NCBI NO: 13784985 NR Description: seven transmembrane protein Mlo6 [Zea mays]
  misc_feature (1)..(507): Homolog of NCBI NO: 33112635 NR Description: MLO-like protein 7 (AtMlo7)
  misc_feature (7)..(558): Homolog of NCBI NO: 18398444 NR Description: seven transmembrane MLO protein family (MLO8) thaliana] >gi|14091586|gb|AAK53801.1|AF369569_1 membrane protein [Arabidopsis thaliana] >gi|20198263|gb|AAD32905.2| similar to Mlo
  misc_feature (1)..(510): Homolog of NCBI NO: 15239213 NR Description: seven transmembrane MLO protein family (MLO10)
  misc_feature (1)..(440): Homolog of NCBI NO: 15226140 NR Description: seven transmembrane MLO protein family (MLO5)
  misc_feature (1)..(440): Homolog of NCBI NO: 14091580 NR Description: membrane protein Mlo5 [Arabidopsis thaliana]
  misc_feature (1)..(443): Homolog of NCBI NO: 15217453 NR Description: seven transmembrane MLO protein family (MLO9)
  misc_feature (108)..(455): Homolog of NCBI NO: 13784985 NR Description: seven transmembrane protein Mlo6 [Zea mays]
  misc_feature (1)..(565): Homolog of NCBI NO: 13784977 NR Description: seven transmembrane protein Mlo2 [Zea mays]
  misc_feature (1)..(440): Homolog of NCBI NO: 14091580 NR Description: membrane protein Mlo5 [Arabidopsis thaliana]
  misc_feature (1)..(440): Homolog of NCBI NO: 15226140 NR Description: seven transmembrane MLO protein family (MLO5)
  misc_feature (1)..(510): Homolog of NCBI NO: 15239213 NR Description: seven transmembrane MLO protein family (MLO10)
  misc_feature (7)..(558): Homolog of NCBI NO: 18398444 NR Description: seven transmembrane MLO protein family (MLO8) thaliana] >gi|14091586|gb|AAK53801.1|AF369569_1 membrane protein [Arabidopsis thaliana] >gi|20198263|gb|AAD32905.2| similar to Mlo
  misc_feature (1)..(507): Homolog of NCBI NO: 33112635 NR Description: MLO-like protein 7 (AtMlo7)

SEQ ID NO: 15399 - protein, 504 aa, Zea mays subsp. mays; identical to SEQ ID NO: 14942
  peptide (1)..(504): Ceres Seq. ID no. 13636857
  misc_feature (1)..(427): Pfam Name: Mlo family Pfam Description: Mlo family
  misc_feature (1)..(427): Pfam Name: Mlo family Pfam Description: Mlo family
  misc_feature (1)..(504): Homolog of NCBI NO: 13784977 NR Description: seven transmembrane protein Mlo2 [Zea mays]
  misc_feature (1)..(500): Homolog of NCBI NO: 37536520 NR Description: putative Mlo (pathogen resistance) protein [Oryza
  misc_feature (47)..(394): Homolog of NCBI NO: 13784985 NR Description: seven transmembrane protein Mlo6 [Zea mays]
  misc_feature (1)..(49): Homolog of NCBI NO: 13784985 NR Description: seven transmembrane protein Mlo6 [Zea mays]
  misc_feature (1)..(382): Homolog of NCBI NO: 15217453 NR Description: seven transmembrane MLO protein family (MLO9)
  misc_feature (1)..(500): Homolog of NCBI NO: 37536520 NR Description: putative Mlo (pathogen resistance) protein [Oryza
  misc_feature (1)..(49): Homolog of NCBI NO: 13784985 NR Description: seven transmembrane protein Mlo6 [Zea mays]
  misc_feature (1)..(446): Homolog of NCBI NO: 33112635 NR Description: MLO-like protein 7 (AtMlo7)
  misc_feature (1)..(497): Homolog of NCBI NO: 18398444 NR Description: seven transmembrane MLO protein family (MLO8) thaliana] >gi|14091586|gb|AAK53801.1|AF369569_1 membrane protein [Arabidopsis thaliana] >gi|20198263|gb|AAD32905.2| similar to Mlo
  misc_feature (1)..(449): Homolog of NCBI NO: 15239213 NR Description: seven transmembrane MLO protein family (MLO10)
  misc_feature (1)..(379): Homolog of NCBI NO: 15226140 NR Description: seven transmembrane MLO protein family (MLO5)
  misc_feature (1)..(379): Homolog of NCBI NO: 14091580 NR Description: membrane protein Mlo5 [Arabidopsis thaliana]
  misc_feature (1)..(382): Homolog of NCBI NO: 15217453 NR Description: seven transmembrane MLO protein family (MLO9)
  misc_feature (47)..(394): Homolog of NCBI NO: 13784985 NR Description: seven transmembrane protein Mlo6 [Zea mays]
  misc_feature (1)..(504): Homolog of NCBI NO: 13784977 NR Description: seven transmembrane protein Mlo2 [Zea mays]
  misc_feature (1)..(379): Homolog of NCBI NO: 14091580 NR Description: membrane protein Mlo5 [Arabidopsis thaliana]
  misc_feature (1)..(379): Homolog of NCBI NO: 15226140 NR Description: seven transmembrane MLO protein family (MLO5)
  misc_feature (1)..(449): Homolog of NCBI NO: 15239213 NR Description: seven transmembrane MLO protein family (MLO10)
  misc_feature (1)..(497): Homolog of NCBI NO: 18398444 NR Description: seven transmembrane MLO protein family (MLO8) thaliana] >gi|14091586|gb|AAK53801.1|AF369569_1 membrane protein [Arabidopsis thaliana] >gi|20198263|gb|AAD32905.2| similar to Mlo
  misc_feature (1)..(446): Homolog of NCBI NO: 33112635 NR Description: MLO-like protein 7 (AtMlo7)

SEQ ID NO: 15400 - protein, 475 aa, Zea mays subsp. mays; identical to SEQ ID NO: 14943
  peptide (1)..(475): Ceres Seq. ID no. 13636858
  misc_feature (1)..(398): Pfam Name: Mlo family Pfam Description: Mlo family
  misc_feature (1)..(398): Pfam Name: Mlo family Pfam Description: Mlo family
  misc_feature (1)..(475): Homolog of NCBI NO: 13784977 NR Description: seven transmembrane protein Mlo2 [Zea mays]
  misc_feature (1)..(471): Homolog of NCBI NO: 37536520 NR Description: putative Mlo (pathogen resistance) protein [Oryza
  misc_feature (18)..(365): Homolog of NCBI NO: 13784985 NR Description: seven transmembrane protein Mlo6 [Zea mays]
  misc_feature (1)..(20): Homolog of NCBI NO: 13784985 NR Description: seven transmembrane protein Mlo6 [Zea mays]
  misc_feature (1)..(353): Homolog of NCBI NO: 15217453 NR Description: seven transmembrane MLO protein family (MLO9)
  misc_feature (1)..(471): Homolog of NCBI NO: 37536520 NR Description: putative Mlo (pathogen resistance) protein [Oryza
  misc_feature (1)..(20): Homolog of NCBI NO: 13784985 NR Description: seven transmembrane protein Mlo6 [Zea mays]
  misc_feature (1)..(417): Homolog of NCBI NO: 33112635 NR Description: MLO-like protein 7 (AtMlo7)
  misc_feature (1)..(468): Homolog of NCBI NO: 18398444 NR Description: seven transmembrane MLO protein family (MLO8) thaliana] >gi|14091586|gb|AAK53801.1|AF369569_1 membrane protein [Arabidopsis thaliana] >gi|20198263|gb|AAD32905.2| similar to Mlo
  misc_feature (1)..(420): Homolog of NCBI NO: 15239213 NR Description: seven transmembrane MLO protein family (MLO10)
  misc_feature (1)..(350): Homolog of NCBI NO: 15226140 NR Description: seven transmembrane MLO protein family (MLO5)
  misc_feature (1)..(350): Homolog of NCBI NO: 14091580 NR Description: membrane protein Mlo5 [Arabidopsis thaliana]
  misc_feature (1)..(353): Homolog of NCBI NO: 15217453 NR Description: seven transmembrane MLO protein family (MLO9)
  misc_feature (18)..(365): Homolog of NCBI NO: 13784985 NR Description: seven transmembrane protein Mlo6 [Zea mays]
  misc_feature (1)..(475): Homolog of NCBI NO: 13784977 NR Description: seven transmembrane protein Mlo2 [Zea mays]
  misc_feature (1)..(350): Homolog of NCBI NO: 14091580 NR Description: membrane protein Mlo5 [Arabidopsis thaliana]
  misc_feature (1)..(350): Homolog of NCBI NO: 15226140 NR Description: seven transmembrane MLO protein family (MLO5)
  misc_feature (1)..(420): Homolog of NCBI NO: 15239213 NR Description: seven transmembrane MLO protein family (MLO10)
  misc_feature (1)..(468): Homolog of NCBI NO: 18398444 NR Description: seven transmembrane MLO protein family (MLO8) thaliana] >gi|14091586|gb|AAK53801.1|AF369569_1 membrane protein [Arabidopsis thaliana] >gi|20198263|gb|AAD32905.2| similar to Mlo
  misc_feature (1)..(417): Homolog of NCBI NO: 33112635 NR Description: MLO-like protein 7 (AtMlo7)

SEQ ID NO: 15401 - DNA, 685 bp, Zea mays subsp. mays; identical to SEQ ID NO: 10244
  misc_feature (1)..(685): Ceres Seq. ID no. 13628874
  misc_feature: MA Experiment ID: 108515 Result: Down-regulated in Transcription
  misc_feature: MA Experiment 108515 PARAMETER Experiment Name: Zm_2mM_SA_P Parameter: Age (day) Value: 8
  misc_feature: MA Experiment 108515 PARAMETER Experiment Name: Zm_2mM_SA_P Parameter: Organism Value: Zea mays
  misc_feature: MA Experiment 108515 PARAMETER Experiment Name: Zm_2mM_SA_P Parameter: Plant Line Value: 35A19
  misc_feature: MA Experiment 108515 PARAMETER Experiment Name: Zm_2mM_SA_P Parameter: Timepoint (hr) Value: 12
  misc_feature: MA Experiment 108515 PARAMETER Experiment Name: Zm_2mM_SA_P Parameter: Tissue Value: Aerial
  misc_feature: MA Experiment 108515 PARAMETER Experiment Name: Zm_2mM_SA_P Parameter: Treatment Value: 2mM SA vs. No Treatment
  misc_feature: MA Experiment ID: 108523 Result: Down-regulated in Transcription
  misc_feature: MA Experiment 108523 PARAMETER Experiment Name: Zm_42deg_Heat_P Parameter: Age (day) Value: 8
  misc_feature: MA Experiment 108523 PARAMETER Experiment Name: Zm_42deg_Heat_P Parameter: Organism Value: Zea mays
  misc_feature: MA Experiment 108523 PARAMETER Experiment Name: Zm_42deg_Heat_P Parameter: Plant Line Value: 35A19
  misc_feature: MA Experiment 108523 PARAMETER Experiment Name: Zm_42deg_Heat_P Parameter: Temperature (deg C) Value: 42 vs. 22
  misc_feature: MA Experiment 108523 PARAMETER Experiment Name: Zm_42deg_Heat_P Parameter: Timepoint (hr) Value: 6
  misc_feature: MA Experiment 108523 PARAMETER Experiment Name: Zm_42deg_Heat_P Parameter: Tissue Value: Aerial
  misc_feature: MA Experiment ID: 108535 Result: Up-regulated in Transcription
  misc_feature: MA Experiment 108535 PARAMETER Experiment Name: Zm_Meristem_P Parameter: Age (day) Value: 8
  misc_feature: MA Experiment 108535 PARAMETER Experiment Name: Zm_Meristem_P Parameter: Organism Value: Zea mays
  misc_feature: MA Experiment 108535 PARAMETER Experiment Name: Zm_Meristem_P Parameter: Plant Line Value: 35A19
  misc_feature: MA Experiment 108535 PARAMETER Experiment Name: Zm_Meristem_P Parameter: Tissue Value: Root Meristem vs. Above Root Meristem
  misc_feature: MA Experiment ID: 108544 Result: Down-regulated in Transcription
  misc_feature: MA Experiment ID: 108597 Result: Down-regulated in Transcription
  misc_feature: MA Experiment 108597 PARAMETER Experiment Name: Zm_100uM_ABA_P Parameter: Age (day) Value: 9
  misc_feature: MA Experiment 108597 PARAMETER Experiment Name: Zm_100uM_ABA_P Parameter: Organism Value: Zea mays
  misc_feature: MA Experiment 108597 PARAMETER Experiment Name: Zm_100uM_ABA_P Parameter: Plant Line Value: 35A19
  misc_feature: MA Experiment 108597 PARAMETER Experiment Name: Zm_100uM_ABA_P Parameter: Timepoint (hr) Value: 24
  misc_feature: MA Experiment 108597 PARAMETER Experiment Name: Zm_100uM_ABA_P Parameter: Tissue Value: Aerial
  misc_feature: MA Experiment 108597 PARAMETER Experiment Name: Zm_100uM_ABA_P Parameter: Treatment Value: 100uM ABA vs. No Treatment
  misc_feature: MA Experiment ID: 20000477 Result: Down-regulated in Transcription
  misc_feature: MA Experiment 20000477 PARAMETER Experiment Name: Zm_5mM_SA_P Parameter: Age (day) Value: 10
  misc_feature: MA Experiment 20000477 PARAMETER Experiment Name: Zm_5mM_SA_P Parameter: Organism Value: Zea mays
  misc_feature: MA Experiment 20000477 PARAMETER Experiment Name: Zm_5mM_SA_P Parameter: Plant Line Value: 35A19
  misc_feature: MA Experiment 20000477 PARAMETER Experiment Name: Zm_5mM_SA_P Parameter: Timepoint (hr) Value: 48
  misc_feature: MA Experiment 20000477 PARAMETER Experiment Name: Zm_5mM_SA_P Parameter: Tissue Value: Aerial
  misc_feature: MA Experiment 20000477 PARAMETER Experiment Name: Zm_5mM_SA_P Parameter: Treatment Value: 5mM SA vs. No Treatment
  misc_feature: MA Experiment ID: 20000478 Result: Down-regulated in Transcription
  misc_feature: MA Experiment 20000478 PARAMETER Experiment Name: Zm_5mM_SA_P Parameter: Age (day) Value: 11
  misc_feature: MA Experiment 20000478 PARAMETER Experiment Name: Zm_5mM_SA_P Parameter: Organism Value: Zea mays
  misc_feature: MA Experiment 20000478 PARAMETER Experiment Name: Zm_5mM_SA_P Parameter: Plant Line Value: 35A19
  misc_feature: MA Experiment 20000478 PARAMETER Experiment Name: Zm_5mM_SA_P Parameter: Timepoint (hr) Value: 72
  misc_feature: MA Experiment 20000478 PARAMETER Experiment Name: Zm_5mM_SA_P Parameter: Tissue Value: Aerial
  misc_feature: MA Experiment 20000478 PARAMETER Experiment Name: Zm_5mM_SA_P Parameter: Treatment Value: 5mM SA vs. No Treatment
  misc_feature: MA Experiment ID: 20000479 Result: Down-regulated in Transcription
  misc_feature: MA Experiment 20000479 PARAMETER Experiment Name: Zm_Drought_P Parameter: Age (day) Value: 10
  misc_feature: MA Experiment 20000479 PARAMETER Experiment Name: Zm_Drought_P Parameter: Organism Value: Zea mays
  misc_feature: MA Experiment 20000479 PARAMETER Experiment Name: Zm_Drought_P Parameter: Plant Line Value: 35A19
  misc_feature: MA Experiment 20000479 PARAMETER Experiment Name: Zm_Drought_P Parameter: Timepoint (hr) Value: 48
  misc_feature: MA Experiment 20000479 PARAMETER Experiment Name: Zm_Drought_P Parameter: Tissue Value: Aerial
  misc_feature: MA Experiment 20000479 PARAMETER Experiment Name: Zm_Drought_P Parameter: Treatment Value: Drought vs. No Drought
  misc_feature: MA Experiment ID: 20000632 Result: Down-regulated in Transcription
  misc_feature: MA Experiment 20000632 PARAMETER Experiment Name: Zm_Herbicide-Treatments_P Parameter: Timepoint (hr) Value: 4
  misc_feature: MA Experiment 20000632 PARAMETER Experiment Name: Zm_Herbicide-Treatments_P Parameter: Tissue Value: Aerial
  misc_feature: MA Experiment 20000632 PARAMETER Experiment Name: Zm_Herbicide-Treatments_P Parameter: Treatment Value: Glean vs. No Treatment
  misc_feature: MA Experiment ID: 20000633 Result: Down-regulated in Transcription
  misc_feature: MA Experiment 20000633 PARAMETER Experiment Name: Zm_Herbicide-Treatments_P Parameter: Timepoint (hr) Value: 4
  misc_feature: MA Experiment 20000633 PARAMETER Experiment Name: Zm_Herbicide-Treatments_P Parameter: Tissue Value: Aerial
  misc_feature: MA Experiment 20000633 PARAMETER Experiment Name: Zm_Herbicide-Treatments_P Parameter: Treatment Value: Trimec vs. No Treatment

SEQ ID NO: 15402 - protein, 175 aa, Zea mays subsp. mays; identical to SEQ ID NO: 10245
  peptide (1)..(175): Ceres Seq. ID no. 13628875
  misc_feature (51)..(174): Pfam Name: Core histone H2A/H2B/H3/H4 Pfam Description: Core histone H2A/H2B/H3/H4
  misc_feature (51)..(174): Pfam Name: Core histone H2A/H2B/H3/H4 Pfam Description: Core histone H2A/H2B/H3/H4
  misc_feature (26)..(175): Homolog of NCBI NO: 399854 NR Description: Histone H2B.2 >gi|283042|pir||S28049 histone H2B
  misc_feature (26)..(175): Homolog of NCBI NO: 3913804 NR Description: Histone H2B.3 >gi|577825|emb|CAA49584.1| H2B
  misc_feature (26)..(175): Homolog of NCBI NO: 122022 NR Description: Histone H2B >gi|283025|pir||S22323 histone H2B -
  misc_feature (26)..(175): Homolog of NCBI NO: 399853 NR Description: Histone H2B.1 >gi|283041|pir||S28048 histone H2B
  misc_feature (26)..(175): Homolog of NCBI NO: 1708107 NR Description: Histone H2B >gi|7439752|pir||T02077 histone H2B -
  misc_feature (26)..(175): Homolog of NCBI NO: 3913804 NR Description: Histone H2B.3 >gi|577825|emb|CAA49584.1| H2B
  misc_feature (26)..(175): Homolog of NCBI NO: 399853 NR Description: Histone H2B.1 >gi|283041|pir||S28048 histone H2B
  misc_feature (16)..(80): Homolog of NCBI NO: 571480 NR Description: histone H1
  misc_feature (113)..(163): Homolog of NCBI NO: 30923862 NR Description: CG40461-PA [Drosophila melanogaster]
  misc_feature (27)..(172): Homolog of NCBI NO: 15223150 NR Description: histone H2B family [Arabidopsis thaliana] T23G18.3 [Arabidopsis thaliana]
  misc_feature (51)..(175): Homolog of NCBI NO: 39595176 NR Description: Hypothetical protein CBG03777 [Caenorhabditis
  misc_feature (26)..(175): Homolog of NCBI NO: 34895904 NR Description: putative histone H2B [Oryza sativa (japonica group)] >gi|9663991|dbj|BAB03632.1| putative histone H2B [Oryza
  misc_feature (26)..(175): Homolog of NCBI NO: 1708107 NR Description: Histone H2B >gi|7439752|pir||T02077 histone H2B -
  misc_feature (26)..(175): Homolog of NCBI NO: 122022 NR Description: Histone H2B >gi|283025|pir||S22323 histone H2B -
  misc_feature (26)..(175): Homolog of NCBI NO: 399854 NR Description: Histone H2B.2 >gi|283042|pir||S28049 histone H2B
  misc_feature (26)..(175): Homolog of NCBI NO: 34895904 NR Description: putative histone H2B [Oryza sativa (japonica group)] >gi|9663991|dbj|BAB03632.1| putative histone H2B [Oryza
  misc_feature (51)..(175): Homolog of NCBI NO: 39595176 NR Description: Hypothetical protein CBG03777 [Caenorhabditis
  misc_feature (27)..(172): Homolog of NCBI NO: 15223150 NR Description: histone H2B family [Arabidopsis thaliana] T23G18.3 [Arabidopsis thaliana]
  misc_feature (113)..(163): Homolog of NCBI NO: 30923862 NR Description: CG40461-PA [Drosophila melanogaster]
  misc_feature (16)..(80): Homolog of NCBI NO: 571480 NR Description: histone H1

SEQ ID NO: 15403 - protein, 150 aa, Zea mays subsp. mays; identical to SEQ ID NO: 10246
  peptide (1)..(150): Ceres Seq. ID no. 13628876
  misc_feature (26)..(149): Pfam Name: Core histone H2A/H2B/H3/H4 Pfam Description: Core histone H2A/H2B/H3/H4
  misc_feature (26)..(149): Pfam Name: Core histone H2A/H2B/H3/H4 Pfam Description: Core histone H2A/H2B/H3/H4
  misc_feature (1)..(150): Homolog of NCBI NO: 399854 NR Description: Histone H2B.2 >gi|283042|pir||S28049 histone H2B
  misc_feature (1)..(150): Homolog of NCBI NO: 3913804 NR Description: Histone H2B.3 >gi|577825|emb|CAA49584.1| H2B
  misc_feature (1)..(150): Homolog of NCBI NO: 122022 NR Description: Histone H2B >gi|283025|pir||S22323 histone H2B -
  misc_feature (1)..(150): Homolog of NCBI NO: 399853 NR Description: Histone H2B.1 >gi|283041|pir||S28048 histone H2B
  misc_feature (1)..(150): Homolog of NCBI NO: 1708107 NR Description: Histone H2B >gi|7439752|pir||T02077 histone H2B -
  misc_feature (1)..(150): Homolog of NCBI NO: 3913804 NR Description: Histone H2B.3 >gi|577825|emb|CAA49584.1| H2B
  misc_feature (1)..(150): Homolog of NCBI NO: 399853 NR Description: Histone H2B.1 >gi|283041|pir||S28048 histone H2B
  misc_feature (1)..(55): Homolog of NCBI NO: 571480 NR Description: histone H1
  misc_feature (88)..(138): Homolog of NCBI NO: 30923862 NR Description: CG40461-PA [Drosophila melanogaster]
  misc_feature (2)..(147): Homolog of NCBI NO: 15223150 NR Description: histone H2B family [Arabidopsis thaliana] T23G18.3 [Arabidopsis thaliana]
  misc_feature (26)..(150): Homolog of NCBI NO: 39595176 NR Description: Hypothetical protein CBG03777 [Caenorhabditis
  misc_feature (1)..(150): Homolog of NCBI NO: 34895904 NR Description: putative histone H2B [Oryza sativa (japonica group)] >gi|9663991|dbj|BAB03632.1| putative histone H2B [Oryza
  misc_feature (1)..(150): Homolog of NCBI NO: 1708107 NR Description: Histone H2B >gi|7439752|pir||T02077 histone H2B -
  misc_feature (1)..(150): Homolog of NCBI NO: 122022 NR Description: Histone H2B >gi|283025|pir||S22323 histone H2B -
  misc_feature (1)..(150): Homolog of NCBI NO: 399854 NR Description: Histone H2B.2 >gi|283042|pir||S28049 histone H2B
  misc_feature (1)..(150): Homolog of NCBI NO: 34895904 NR Description: putative histone H2B [Oryza sativa (japonica group)] >gi|9663991|dbj|BAB03632.1| putative histone H2B [Oryza
  misc_feature (26)..(150): Homolog of NCBI NO: 39595176 NR Description: Hypothetical protein CBG03777 [Caenorhabditis
  misc_feature (2)..(147): Homolog of NCBI NO: 15223150 NR Description: histone H2B family [Arabidopsis thaliana] T23G18.3 [Arabidopsis thaliana]
  misc_feature (88)..(138): Homolog of NCBI NO: 30923862 NR Description: CG40461-PA [Drosophila melanogaster]
  misc_feature (1)..(55): Homolog of NCBI NO: 571480 NR Description: histone H1

SEQ ID NO: 15404 - protein, 96 aa, Zea mays subsp. mays; identical to SEQ ID NO: 10247
  peptide (1)..(96): Ceres Seq. ID no. 13628877
  misc_feature (11)..(90): Pfam Name: Sperm histone P2 Pfam Description: Sperm histone P2
  misc_feature (11)..(90): Pfam Name: Sperm histone P2 Pfam Description: Sperm histone P2
  misc_feature (1)..(96): Homolog of NCBI NO: 34784016 NR Description: Unknown (protein for MGC:63802) [Danio rerio]
  misc_feature (26)..(96): Homolog of NCBI NO: 29250446 NR Description: GLP_39_87477_88058 [Giardia lamblia ATCC 50803]
  misc_feature (14)..(96): Homolog of NCBI NO: 25143299 NR Description: pre-mRNA splicing SR protein related RSR-1 (68.2
  misc_feature (1)..(96): Homolog of NCBI NO: 34784016 NR Description: Unknown (protein for MGC:63802) [Danio rerio]
  misc_feature (14)..(96): Homolog of NCBI NO: 25143299 NR Description: pre-mRNA splicing SR protein related RSR-1 (68.2
  misc_feature (18)..(96): Homolog of NCBI NO: 23274133 NR Description: Similar to serine/arginine repetitive matrix 1
  misc_feature (40)..(96): Homolog of NCBI NO: 25143299 NR Description: pre-mRNA splicing SR protein related RSR-1 (68.2
  misc_feature (14)..(96): Homolog of NCBI NO: 25143299 NR Description: pre-mRNA splicing SR protein related RSR-1 (68.2
  misc_feature (12)..(96): Homolog of NCBI NO: 11095327 NR Description: unknown [Paracoccus pantotrophus]
  misc_feature (26)..(96): Homolog of NCBI NO: 29250446 NR Description: GLP_39_87477_88058 [Giardia lamblia ATCC 50803]
  misc_feature (12)..(96): Homolog of NCBI NO: 11095327 NR Description: unknown [Paracoccus pantotrophus]
  misc_feature (18)..(96): Homolog of NCBI NO: 23274133 NR Description: Similar to serine/arginine repetitive matrix 1
  misc_feature (14)..(96): Homolog of NCBI NO: 25143299 NR Description: pre-mRNA splicing SR protein related RSR-1 (68.2
  misc_feature (40)..(96): Homolog of NCBI NO: 25143299 NR Description: pre-mRNA splicing SR protein related RSR-1 (68.2

SEQ ID NO: 15405 - DNA, 616 bp, Zea mays subsp. mays
  misc_feature (1)..(616): Ceres Seq. ID no. 13636790
  misc_feature: MA Experiment ID: 108689 Result: Down-regulated in Transcription
  misc_feature: MA Experiment 108689 PARAMETER Experiment Name: Zm_Drought_Roots_P Parameter: Age (day) Value: 9
  misc_feature: MA Experiment 108689 PARAMETER Experiment Name: Zm_Drought_Roots_P Parameter: Organism Value: Zea mays
  misc_feature: MA Experiment 108689 PARAMETER Experiment Name: Zm_Drought_Roots_P Parameter: Plant Line Value: 35A19
  misc_feature: MA Experiment 108689 PARAMETER Experiment Name: Zm_Drought_Roots_P Parameter: Timepoint (hr) Value: 24
  misc_feature: MA Experiment 108689 PARAMETER Experiment Name: Zm_Drought_Roots_P Parameter: Tissue Value: Roots
  misc_feature: MA Experiment 108689 PARAMETER Experiment Name: Zm_Drought_Roots_P Parameter: Treatment Value: Drought vs. No Drought
atgcacactcactcactccagtgcccactgcccactgcccactgcccgacgaggaagtttcacgatcccaacccgtataaatcgacgccgcgagggggagcgacgagcgatccccgtaattaacctgtcccagccgcaccgatccaccccccctcggcctcggcctccctccggccatggaggtgttctactacgtcgtgttcggcgcgctggccgccgtcgtggcggggctcgagctcggcaagagcggcaaggaccgcgtcgccaccacctccgcattcaactccttcaagaacaactacgtcctcgtctactccctcatgatgtccggggactggctgcagggcccctacgtctactacctctacagccagtatggcttcgacaagggcgacatcggccgcctcttcatcgccggcttcggatcctccatgctcttcggcaccatcgtcggctccctcgccgacaaacagggccgcaagagggcctgcgtcacctattgcatcagctacatcctcagctgcatcaccaagcactcccccgagtacagggtcctcatgatcggccgcatcctcgggggcatcgccacctcgctgctcttctccgccttcgagtc

SEQ ID NO: 15406 - protein, 205 aa, Zea mays subsp. mays
  peptide (1)..(205): Ceres Seq. ID no. 13636791
CTLTHSSAHCPLPTARRGSFTIPTRINRRREGERRAIPVINLSQPHRSTPPRPRPPSGHGGVLLRRVRRAGRRRGGARARQERQGPRRHHLRIQLLQEQLRPRLLPHDVRGLAAGPLRLLPLQPVWLRQGRHRPPLHRRLRILHALRHHRRLPRRQTGPQEGLRHLLHQLHPQLHHQALPRVQGPHDRPHPRGHRHLAALLRLRV

SEQ ID NO: 15407 - protein, 146 aa, Zea mays subsp. mays
  peptide (1)..(146): Ceres Seq. ID no. 13636792
  misc_feature (4)..(145): Pfam Name: Protein of unknown function (DUF791) Pfam Description: Protein of unknown function (DUF791)
  misc_feature (1)..(145): Homolog of NCBI NO: 37536124 NR Description: putative transporter [Oryza sativa (japonica group)] >gi|10122032|gb|AAG13421.1| putative transporter [Oryza
  misc_feature (1)..(145): Homolog of NCBI NO: 34902182 NR Description: Putative transporter [Oryza sativa (japonica group)] >gi|27476097|gb|AAO17028.1| Putative transporter [Oryza
  misc_feature (1)..(145): Homolog of NCBI NO: 6633826 NR Description: F1N19.22 [Arabidopsis thaliana]
  misc_feature (1)..(145): Homolog of NCBI NO: 15217708 NR Description: expressed protein [Arabidopsis thaliana]
  misc_feature (1)..(145): Homolog of NCBI NO: 7487513 NR Description: hypothetical protein T29A15.210 - Arabidopsis >gi|4469023|emb|CAB38284.1| putative protein [Arabidopsis >gi|7269626|emb|CAB81422.1| putative protein [Arabidopsis
  misc_feature (1)..(145): Homolog of NCBI NO: 18417054 NR Description: expressed protein [Arabidopsis thaliana] putative protein [Arabidopsis thaliana] AT4g27720/T29A15_210 [Arabidopsis thaliana]
  misc_feature (1)..(145): Homolog of NCBI NO: 11292198 NR Description: hypothetical protein F2K15.170 - Arabidopsis >gi|6723401|emb|CAB66410.1| putative protein [Arabidopsis
  misc_feature (1)..(145): Homolog of NCBI NO: 30693172 NR Description: expressed protein [Arabidopsis thaliana]
  misc_feature (8)..(145): Homolog of NCBI NO: 25148676 NR Description: Transporter (48.1 kD) [Caenorhabditis elegans]
  misc_feature (8)..(145): Homolog of NCBI NO: 39587911 NR Description: Hypothetical protein CBG13530 [Caenorhabditis
MEVFYYVVFGALAAVVAGLELGKSGKDRVATTSAFNSFKNNYVLVYSLMMSGDWLQGPYVYYLYSQYGFDKGDIGRLFIAGFGSSMLFGTIVGSLADKQGRKRACVTYCISYILSCITKHSPEYRVLMIGRILGGIATSLLFSAFE

SEQ ID NO: 15408 - DNA, 540 bp, Zea mays subsp. mays
  misc_feature (1)..(540): Ceres Seq. ID no. 13628365
  misc_feature: MA Experiment ID: 108547 Result: Down-regulated in Transcription
  misc_feature: MA Experiment 108547 PARAMETER Experiment Name: Zm_Imbibed_Seeds_P Parameter: Age (day) Value: 4 vs. 2
  misc_feature: MA Experiment 108547 PARAMETER Experiment Name: Zm_Imbibed_Seeds_P Parameter: Organism Value: Zea mays
  misc_feature: MA Experiment 108547 PARAMETER Experiment Name: Zm_Imbibed_Seeds_P Parameter: Plant Line Value: 35A19
  misc_feature: MA Experiment 108547 PARAMETER Experiment Name: Zm_Imbibed_Seeds_P Parameter: Tissue Value: Aerial vs. Embryo
ctttccattagccatcctagccttcgccccctcgacgagaagaaccacctcaaaaccgaacagccgcaaaagaaagctgctagctactctatacatgataactagaacaggaccgtgaagtaatatatatataatgacgaagtcaggggcgctacaacttgctcggagcaccggagggtcgcttagcaaggaccaagtcaaatccgccgttgatcagtatgtgaagtaccacgacctccacggaggcgaacaagaatcaagaaagtcaaattacgctgatttggcaaacaagtactatgatcttgtcactggcttctacgaatatggatgaggcgactcattccattttgctggcggatatccgggtgaaacttcccgtgaagccattaagcggcaccagcattttatggcactacaattggggctcaagaagggtatgaaggttctggacgtgggatgtggaattgggggacctttaatagaaattgccagattcagctcaacttcaataactggattgaccaacaatgactaccatgt

SEQ ID NO: 15409 - protein, 65 aa, Zea mays subsp. mays
  peptide (1)..(65): Ceres Seq. ID no. 13628366
  misc_feature (1)..(65): Homolog of NCBI NO: 7443715 NR Description: sterol 24-C-methyltransferase (EC 2.1.1.41) -
  misc_feature (1)..(65): Homolog of NCBI NO: 7443716 NR Description: sterol 24-C-methyltransferase (EC 2.1.1.41)
  misc_feature (1)..(65): Homolog of NCBI NO: 3560531 NR Description: cycloartenol-C24-methyltransferase [Oryza sativa
  misc_feature (1)..(65): Homolog of NCBI NO: 34393309 NR Description: cycloartenol-C24-methyltransferase [Oryza sativa
  misc_feature (1)..(65): Homolog of NCBI NO: 3560474 NR Description: S-adenosyl-methionine-sterol-C- methyltransferase
  misc_feature (1)..(65): Homolog of NCBI NO: 3603295 NR Description: S-adenosyl-methionine
  misc_feature (1)..(65): Homolog of NCBI NO: 7443719 NR Description: sterol 24-C-methyltransferase (EC 2.1.1.41) -
  misc_feature (2)..(65): Homolog of NCBI NO: 7443720 NR Description: probable sterol 24-C-methyltransferase (EC
  misc_feature (7)..(65): Homolog of NCBI NO: 21434843 NR Description: cephalopod [Arabidopsis thaliana]
  misc_feature (24)..(65): Homolog of NCBI NO: 30103006 NR Description: putative endosperm C-24 sterol methyltransferase
MTKSGALQLARSTGGSLSKDQVKSAVDQYVKYHDLHGGEQESRKSNYADLANKYYDLVTGFYEYG

SEQ ID NO: 15410 - protein, 47 aa, Zea mays subsp. mays
  peptide (1)..(47): Ceres Seq. ID no. 13628367
MILSLASTNMDEATHSILLADIRVKLPVKPLSGTSILWHYNWGSRRV

SEQ ID NO: 15411 - protein, 44 aa, Zea mays subsp. mays
  peptide (1)..(44): Ceres Seq. ID no. 13628368
  misc_feature (1)..(43): Homolog of NCBI NO: 7443715 NR Description: sterol 24-C-methyltransferase (EC 2.1.1.41) -
  misc_feature (1)..(43): Homolog of NCBI NO: 7443716 NR Description: sterol 24-C-methyltransferase (EC 2.1.1.41)
  misc_feature (1)..(43): Homolog of NCBI NO: 3560531 NR Description: cycloartenol-C24-methyltransferase [Oryza sativa
  misc_feature (1)..(43): Homolog of NCBI NO: 34393309 NR Description: cycloartenol-C24-methyltransferase [Oryza sativa
  misc_feature (1)..(43): Homolog of NCBI NO: 3560474 NR Description: S-adenosyl-methionine-sterol-C- methyltransferase
  misc_feature (1)..(43): Homolog of NCBI NO: 3603295 NR Description: S-adenosyl-methionine
  misc_feature (1)..(43): Homolog of NCBI NO: 7443719 NR Description: sterol 24-C-methyltransferase (EC 2.1.1.41) -
  misc_feature (1)..(43): Homolog of NCBI NO: 7443720 NR Description: probable sterol 24-C-methyltransferase (EC
  misc_feature (1)..(43): Homolog of NCBI NO: 21434843 NR Description: cephalopod [Arabidopsis thaliana]
  misc_feature (1)..(43): Homolog of NCBI NO: 30103006 NR Description: putative endosperm C-24 sterol methyltransferase
MALQLGLKKGMKVLDVGCGIGGPLIEIARFSSTSITGLTNNDYH

SEQ ID NO: 15412 - DNA, 2368 bp, Zea mays subsp. mays
  misc_feature (1)..(2368): Ceres Seq. ID no. 15179435
  misc_feature: MA Experiment ID: 108504 Result: Down-regulated in Transcription
  misc_feature: MA Experiment 108504 PARAMETER Experiment Name: Zm_Drought_P Parameter: Age (day) Value: 8
  misc_feature: MA Experiment 108504 PARAMETER Experiment Name: Zm_Drought_P Parameter: Organism Value: Zea mays
  misc_feature: MA Experiment 108504 PARAMETER Experiment Name: Zm_Drought_P Parameter: Plant Line Value: 35A19
  misc_feature: MA Experiment 108504 PARAMETER Experiment Name: Zm_Drought_P Parameter: Timepoint (hr) Value: 12
  misc_feature: MA Experiment 108504 PARAMETER Experiment Name: Zm_Drought_P Parameter: Tissue Value: Aerial
  misc_feature: MA Experiment 108504 PARAMETER Experiment Name: Zm_Drought_P Parameter: Treatment Value: Drought vs. No Drought
  misc_feature: MA Experiment ID: 108523 Result: Down-regulated in Transcription
  misc_feature: MA Experiment 108523 PARAMETER Experiment Name: Zm_42deg_Heat_P Parameter: Age (day) Value: 8
  misc_feature: MA Experiment 108523 PARAMETER Experiment Name: Zm_42deg_Heat_P Parameter: Organism Value: Zea mays
  misc_feature: MA Experiment 108523 PARAMETER Experiment Name: Zm_42deg_Heat_P Parameter: Plant Line Value: 35A19
  misc_feature: MA Experiment 108523 PARAMETER Experiment Name: Zm_42deg_Heat_P Parameter: Temperature (deg C) Value: 42 vs. 22
  misc_feature: MA Experiment 108523 PARAMETER Experiment Name: Zm_42deg_Heat_P Parameter: Timepoint (hr) Value: 6
  misc_feature: MA Experiment 108523 PARAMETER Experiment Name: Zm_42deg_Heat_P Parameter: Tissue Value: Aerial
  misc_feature: MA Experiment ID: 108535 Result: Up-regulated in Transcription
  misc_feature: MA Experiment 108535 PARAMETER Experiment Name: Zm_Meristem_P Parameter: Age (day) Value: 8
  misc_feature: MA Experiment 108535 PARAMETER Experiment Name: Zm_Meristem_P Parameter: Organism Value: Zea mays
  misc_feature: MA Experiment 108535 PARAMETER Experiment Name: Zm_Meristem_P Parameter: Plant Line Value: 35A19
  misc_feature: MA Experiment 108535 PARAMETER Experiment Name: Zm_Meristem_P Parameter: Tissue Value: Root Meristem vs. Above Root Meristem
  misc_feature: MA Experiment ID: 108544 Result: Down-regulated in Transcription
  misc_feature: MA Experiment ID: 108556 Result: Down-regulated in Transcription
  misc_feature: MA Experiment 108556 PARAMETER Experiment Name: Zm_Drought_P Parameter: Age (day) Value: 9
  misc_feature: MA Experiment 108556 PARAMETER Experiment Name: Zm_Drought_P Parameter: Organism Value: Zea mays
  misc_feature: MA Experiment 108556 PARAMETER Experiment Name: Zm_Drought_P Parameter: Plant Line Value: 35A19
  misc_feature: MA Experiment 108556 PARAMETER Experiment Name: Zm_Drought_P Parameter: Timepoint (hr) Value: 24
  misc_feature: MA Experiment 108556 PARAMETER Experiment Name: Zm_Drought_P Parameter: Tissue Value: Aerial
  misc_feature: MA Experiment 108556 PARAMETER Experiment Name: Zm_Drought_P Parameter: Treatment Value: Drought vs. No Drought
  misc_feature: MA Experiment ID: 108597 Result: Down-regulated in Transcription
  misc_feature: MA Experiment 108597 PARAMETER Experiment Name: Zm_100uM_ABA_P Parameter: Age (day) Value: 9
  misc_feature: MA Experiment 108597 PARAMETER Experiment Name: Zm_100uM_ABA_P Parameter: Organism Value: Zea mays
  misc_feature: MA Experiment 108597 PARAMETER Experiment Name: Zm_100uM_ABA_P Parameter: Plant Line Value: 35A19
  misc_feature: MA Experiment 108597 PARAMETER Experiment Name: Zm_100uM_ABA_P Parameter: Timepoint (hr) Value: 24
  misc_feature: MA Experiment 108597 PARAMETER Experiment Name: Zm_100uM_ABA_P Parameter: Tissue Value: Aerial
  misc_feature: MA Experiment 108597 PARAMETER Experiment Name: Zm_100uM_ABA_P Parameter: Treatment Value: 100uM ABA vs. No Treatment
  misc_feature: MA Experiment ID: 108687 Result: Down-regulated in Transcription
  misc_feature: MA Experiment 108687 PARAMETER Experiment Name: Zm_Embryos-Flowers__P Parameter: Tissue Value: Embryo vs. Aerial+
  misc_feature: MA Experiment ID: 108689 Result: Down-regulated in Transcription
  misc_feature: MA Experiment 108689 PARAMETER Experiment Name: Zm_Drought_Roots_P Parameter: Age (day) Value: 9
  misc_feature: MA Experiment 108689 PARAMETER Experiment Name: Zm_Drought_Roots_P Parameter: Organism Value: Zea mays
  misc_feature: MA Experiment 108689 PARAMETER Experiment Name: Zm_Drought_Roots_P Parameter: Plant Line Value: 35A19
  misc_feature: MA Experiment 108689 PARAMETER Experiment Name: Zm_Drought_Roots_P Parameter: Timepoint (hr) Value: 24
  misc_feature: MA Experiment 108689 PARAMETER Experiment Name: Zm_Drought_Roots_P Parameter: Tissue Value: Roots
  misc_feature: MA Experiment 108689 PARAMETER Experiment Name: Zm_Drought_Roots_P Parameter: Treatment Value: Drought vs. No Drought
  misc_feature: MA Experiment ID: 20000480 Result: Down-regulated in Transcription
  misc_feature: MA Experiment 20000480 PARAMETER Experiment Name: Zm_Drought_P Parameter: Age (day) Value: 11
  misc_feature: MA Experiment 20000480 PARAMETER Experiment Name: Zm_Drought_P Parameter: Organism Value: Zea mays
  misc_feature: MA Experiment 20000480 PARAMETER Experiment Name: Zm_Drought_P Parameter: Plant Line Value: 35A19
  misc_feature: MA Experiment 20000480 PARAMETER Experiment Name: Zm_Drought_P Parameter: Timepoint (hr) Value: 72
  misc_feature: MA Experiment 20000480 PARAMETER Experiment Name: Zm_Drought_P Parameter: Tissue Value: Aerial
  misc_feature: MA Experiment 20000480 PARAMETER Experiment Name: Zm_Drought_P Parameter: Treatment Value: Drought vs. No Drought
  misc_feature: MA Experiment ID: 20000487 Result: Down-regulated in Transcription
  misc_feature: MA Experiment 20000487 PARAMETER Experiment Name: Zm_50mM_NH4NO3_L_to_H_P Parameter: Organism Value: Zea mays
  misc_feature: MA Experiment 20000487 PARAMETER Experiment Name: Zm_50mM_NH4NO3_L_to_H_P Parameter: Timepoint (hr) Value: 4
  misc_feature: MA Experiment 20000487 PARAMETER Experiment Name: Zm_50mM_NH4NO3_L_to_H_P Parameter: Tissue Value: Leaves
  misc_feature: MA Experiment 20000487 PARAMETER Experiment Name: Zm_50mM_NH4NO3_L_to_H_P Parameter: Treatment Value: 50mM NH4NO3 vs. 100mM Mannitol
  misc_feature: MA Experiment ID: 20000492 Result: Up-regulated in Transcription
  misc_feature: MA Experiment 20000492 PARAMETER Experiment Name: Zm_Hybrid_Seed_Dev_P Parameter: DAP Value: 12
  misc_feature: MA Experiment 20000492 PARAMETER Experiment Name: Zm_Hybrid_Seed_Dev_P Parameter: Organism Value: Zea mays
  misc_feature: MA Experiment 20000492 PARAMETER Experiment Name: Zm_Hybrid_Seed_Dev_P Parameter: Plant Line Value: 35A19
  misc_feature: MA Experiment 20000492 PARAMETER Experiment Name: Zm_Hybrid_Seed_Dev_P Parameter: Tissue Value: Fert Kernel vs. Unfert Floret
  misc_feature: MA Experiment ID: 20000533 Result: Down-regulated in Transcription
  misc_feature: MA Experiment 20000533 PARAMETER Experiment Name: Zm_0.001percent_MeJA_P Parameter: Age (day) Value: 11
  misc_feature: MA Experiment 20000533 PARAMETER Experiment Name: Zm_0.001percent_MeJA_P Parameter: Organism Value: Zea mays
  misc_feature: MA Experiment 20000533 PARAMETER Experiment Name: Zm_0.001percent_MeJA_P Parameter: Plant Line Value: 35A19
  misc_feature: MA Experiment 20000533 PARAMETER Experiment Name: Zm_0.001percent_MeJA_P Parameter: Timepoint (hr) Value: 72
  misc_feature: MA Experiment 20000533 PARAMETER Experiment Name: Zm_0.001percent_MeJA_P Parameter: Tissue Value: Aerial
  misc_feature: MA Experiment 20000533 PARAMETER Experiment Name: Zm_0.001percent_MeJA_P Parameter: Treatment Value: 0.001percent MeJA vs. No Treatment
  misc_feature: MA Experiment ID: 20000535 Result: Up-regulated in Transcription
  misc_feature: MA Experiment 20000535 PARAMETER Experiment Name: Zm_Hybrid_Seed_Dev_P Parameter: DAP Value: 30 vs. 12
  misc_feature: MA Experiment 20000535 PARAMETER Experiment Name: Zm_Hybrid_Seed_Dev_P Parameter: Organism Value: Zea mays
  misc_feature: MA Experiment 20000535 PARAMETER Experiment Name: Zm_Hybrid_Seed_Dev_P Parameter: Plant Line Value: 35A19
  misc_feature: MA Experiment 20000535 PARAMETER Experiment Name: Zm_Hybrid_Seed_Dev_P Parameter: Tissue Value: Embryo vs. Unfert Floret
  misc_feature: MA Experiment ID: 20000626 Result: Down-regulated in Transcription
  misc_feature: MA Experiment 20000626 PARAMETER Experiment Name: Zm_Herbicide-Treatments_P Parameter: Timepoint (hr) Value: 12
  misc_feature: MA Experiment 20000626 PARAMETER Experiment Name: Zm_Herbicide-Treatments_P Parameter: Tissue Value: Aerial
  misc_feature: MA Experiment 20000626 PARAMETER Experiment Name: Zm_Herbicide-Treatments_P Parameter: Treatment Value: Roundup vs. No Treatment
  misc_feature: MA Experiment ID: 20000632 Result: Down-regulated in Transcription
  misc_feature: MA Experiment 20000632 PARAMETER Experiment Name: Zm_Herbicide-Treatments_P Parameter: Timepoint (hr) Value: 4
  misc_feature: MA Experiment 20000632 PARAMETER Experiment Name: Zm_Herbicide-Treatments_P Parameter: Tissue Value: Aerial
  misc_feature: MA Experiment 20000632 PARAMETER Experiment Name: Zm_Herbicide-Treatments_P Parameter: Treatment Value: Glean vs. No Treatment
  misc_feature: MA Experiment ID: 20001614 Result: Up-regulated in Transcription
  misc_feature: MA Experiment 20001614 PARAMETER Experiment Name: Zm_50ppm_KNO3_L-to-H_P Parameter: Age (day) Value: 21
  misc_feature: MA Experiment 20001614 PARAMETER Experiment Name: Zm_50ppm_KNO3_L-to-H_P Parameter: Organism Value: Zea mays
  misc_feature: MA Experiment 20001614 PARAMETER Experiment Name: Zm_50ppm_KNO3_L-to-H_P Parameter: Plant Line Value: 35A19
  misc_feature: MA Experiment 20001614 PARAMETER Experiment Name: Zm_50ppm_KNO3_L-to-H_P Parameter: Timepoint (hr) Value: 48
  misc_feature: MA Experiment 20001614 PARAMETER Experiment Name: Zm_50ppm_KNO3_L-to-H_P Parameter: Tissue Value: Roots
  misc_feature: MA Experiment 20001614 PARAMETER Experiment Name: Zm_50ppm_KNO3_L-to-H_P Parameter: Treatment Value: 50ppm KNO3 vs. 50ppm KCl
atcttcgccgccgctaaacgttccccccacgccccaacctatccacgcgaaaccttctttcccccgggagacgattcgtcagggagaggaaagaggcaagaggggccatggacgctgccaagttggtgacgccggtcgctgtgtctcacattctggcgcacccgtcggcgggctccgacggcgcagtgaccgatctcgtcgttcaggtcctcgacctgaagtccgtcggcacgggcagccggttcagtttcacagcaactgacgggaaggataagatcaaggcgatgcttcccaccaacttcgggtcggaggtccgctctggcaacctgaagaacctcggcctcatccgcatcatcgactacacttgcaacgtcgtcaaaggcaaagatgacaaagtcttggttgtcatcaaatgcgagcttgtgtgccaagcgcttgacgccgagatcaacggcgaggccaaaaaagaggagcctccaattgtgctgaagcctaaggacgaatggatgggcgtgacatccccactcgctatgaagcccaagcaggaggtgaagtctgcgtcccagatcgtgaatgagcagcgtggaaatactgctcctgtcaagcccctttccatgacaaagagggtccatcctttgatcactctgaacccctaccagggtaactgggtcattaaggtgcgggtcacgagcaaaggcaacctgagaacctacaggaatgctcgcggagaaggctgtgtcttcaatgtagagctcaccgatgaggatggcacccagatccaagccaccatgtttaatgacgctgcaaagaagttctatccgatttttgagctgggaaaggtctattatgtctcaaaaggatctcttagaattgctaacaagcagttcaagactgtccaaaatgactacgagatgtcactaaacgagaatgctattgttgaagaagcagagggggagacttgcattccgcaagtgcaatacaaccttgtcaagattgatcaactaggatcatatgtcggtggcagggaacttgtagatattattggtgtggttcagagcgtatctcccacactcagtgtcaggagaaagattgacaacgagacaataccgaagcgtgacattgttgtggcggatgactctggcaaaactgttagtatctctctttggaatgatcttactactacgactgggcaagagcttttggacatggctgacagttcgcctgttgttgcgataaagagcctaaaagtgtctgacttccaaggcgtgtctctttctactgtaggcaaaagtactcttgcgattaatcctgatctacacgaggctcagaatcttaagtcatggtatgactctgaaggcaaagatacttcgctggcaccaattggtgcagaaatgggtgccgcacgggccggtggcttcaagtccacgtattctgatagagtttttctgtctcacattactagtgatcctgccatgggccaggaaaagcctgttttcttcagtttgtatgccaccataagccacatcaagcctgaccagaacatgtggtaccgtgcttgcaagacctgcaacaagaaggtgactgaaacttttggatctggatactggtgtgagggatgccaaaagaatgactcggaatgctcactgagatacatcatggtcatcaaggtttccgatcctactggcgaagcatgggtctctgtgttcaacgagcatgcagagaagatcattggctgcagcgccgacgagcttgatcggatcaggaaagaggagggggacgacagttatgttctgaagctcaaggaagccacctgggttcctcacctgttccgcgtcagcgtcacacagcatgaatacaataacgagaaaaggcagagaatcactgtgaggagtgaagcgccggtcgagcacgcagctgaatccaagtacctgcttgaacagatagcgaagcttactgcttgctagtagaagatgcaacctttctggtggttcgttaagggctgccctccgagatgtttcctctgggttttagcacttctgtaagatatatgtagaggtttggttaccttgatgtcaagcaacagatgctaggacagttcaagcatgatgcatgaagcctttgccgaattgcagtttcagttccctcattccgtgccaatgcaactttgttgagcaaatagcgagaattattaggactaattgatggtgtcaggtcattgcggccctaagctttagctctgtatcagcagtcagatgtattaaccattccctgctctaatagtcatctatcagcagtcagatgtatttaaccattccctgcttaatagctctctaccaggagtcggaagtttttaaccattccctgctcc

SEQ ID NO: 15413 - protein, 618 aa, Zea mays subsp. mays
  peptide (1)..(618): Ceres Seq. ID no. 15179436
  misc_feature (187)..(271): Pfam Name: OB-fold nucleic acid binding domain Pfam Description: OB-fold nucleic acid binding domain
  misc_feature (2)..(618): Homolog of NCBI NO: 7440032 NR Description: probable replication protein A1 - rice
  misc_feature (2)..(618): Homolog of NCBI NO: 31580977 NR Description: replication protein A 70b [Oryza sativa (japonica
  misc_feature (7)..(614): Homolog of NCBI NO: 15241489 NR Description: replication protein, putative [Arabidopsis
  misc_feature (7)..(613): Homolog of NCBI NO: 15239494 NR Description: replication protein, putative [Arabidopsis >gi|28393124|gb|AAO41995.1| putative RNA helicase [Arabidopsis
  misc_feature (161)..(614): Homolog of NCBI NO: 15225129 NR Description: replication protein, putative [Arabidopsis
  misc_feature (24)..(108): Homolog of NCBI NO: 15225129 NR Description: replication protein, putative [Arabidopsis
  misc_feature (161)..(615): Homolog of NCBI NO: 15242405 NR Description: replication protein, putative [Arabidopsis
  misc_feature (28)..(108): Homolog of NCBI NO: 15242405 NR Description: replication protein, putative [Arabidopsis
  misc_feature (30)..(612): Homolog of NCBI NO: 32404590 NR Description: hypothetical protein [Neurospora crassa]
  misc_feature (31)..(615): Homolog of NCBI NO: 7488291 NR Description: replication protein A1 homolog T18B16.100 -
MDAAKLVTPVAVSHILAHPSAGSDGAVTDLVVQVLDLKSVGTGSRFSFTATDGKDKIKAMLPTNFGSEVRSGNLKNLGLIRIIDYTCNVVKGKDDKVLVVIKCELVCQALDAEINGEAKKEEPPIVLKPKDEWMGVTSPLAMKPKQEVKSASQIVNEQRGNTAPVKPLSMTKRVHPLITLNPYQGNWVIKVRVTSKGNLRTYRNARGEGCVFNVELTDEDGTQIQATMFNDAAKKFYPIFELGKVYYVSKGSLRIANKQFKTVQNDYEMSLNENAIVEEAEGETCIPQVQYNLVKIDQLGSYVGGRELVDIIGVVQSVSPTLSVRRKIDNETIPKRDIVVADDSGKTVSISLWNDLTTTTGQELLDMADSSPVVAIKSLKVSDFQGVSLSTVGKSTLAINPDLHEAQNLKSWYDSEGKDTSLAPIGAEMGAARAGGFKSTYSDRVFLSHITSDPAMGQEKPVFFSLYATISHIKPDQNMWYRACKTCNKKVTETFGSGYWCEGCQKNDSECSLRYIMVIKVSDPTGEAWVSVFNEHAEKIIGCSADELDRIRKEEGDDSYVLKLKEATWVPHLFRVSVTQHEYNNEKRQRITVRSEAPVEHAAESKYLLEQIAKLTAC

SEQ ID NO: 15414 - protein, 559 aa, Zea mays subsp. mays
  peptide (1)..(559): Ceres Seq. ID no. 15179437
  misc_feature (128)..(212): Pfam Name: OB-fold nucleic acid binding domain Pfam Description: OB-fold nucleic acid binding domain
  misc_feature (1)..(559): Homolog of NCBI NO: 7440032 NR Description: probable replication protein A1 - rice
  misc_feature (1)..(559): Homolog of NCBI NO: 31580977 NR Description: replication protein A 70b [Oryza sativa (japonica
  misc_feature (1)..(555): Homolog of NCBI NO: 15241489 NR Description: replication protein, putative [Arabidopsis
  misc_feature (1)..(554): Homolog of NCBI NO: 15239494 NR Description: replication protein, putative [Arabidopsis >gi|28393124|gb|AAO41995.1| putative RNA helicase [Arabidopsis
  misc_feature (102)..(555): Homolog of NCBI NO: 15225129 NR Description: replication protein, putative [Arabidopsis
  misc_feature (1)..(49): Homolog of NCBI NO: 15225129 NR Description: replication protein, putative [Arabidopsis
  misc_feature (102)..(556): Homolog of NCBI NO: 15242405 NR Description: replication protein, putative [Arabidopsis
  misc_feature (1)..(49): Homolog of NCBI NO: 15242405 NR Description: replication protein, putative [Arabidopsis
  misc_feature (1)..(553): Homolog of NCBI NO: 32404590 NR Description: hypothetical protein [Neurospora crassa]
  misc_feature (1)..(556): Homolog of NCBI NO: 7488291 NR Description: replication protein A1 homolog T18B16.100 -
MLPTNFGSEVRSGNLKNLGLIRIIDYTCNVVKGKDDKVLVVIKCELVCQALDAEINGEAKKEEPPIVLKPKDEWMGVTSPLAMKPKQEVKSASQIVNEQRGNTAPVKPLSMTKRVHPLITLNPYQGNWVIKVRVTSKGNLRTYRNARGEGCVFNVELTDEDGTQIQATMFNDAAKKFYPIFELGKVYYVSKGSLRIANKQFKTVQNDYEMSLNENAIVEEAEGETCIPQVQYNLVKIDQLGSYVGGRELVDIIGVVQSVSPTLSVRRKIDNETIPKRDIVVADDSGKTVSISLWNDLTTTTGQELLDMADSSPVVAIKSLKVSDFQGVSLSTVGKSTLAINPDLHEAQNLKSWYDSEGKDTSLAPIGAEMGAARAGGFKSTYSDRVFLSHITSDPAMGQEKPVFFSLYATISHIKPDQNMWYRACKTCNKKVTETFGSGYWCEGCQKNDSECSLRYIMVIKVSDPTGEAWVSVFNEHAEKIIGCSADELDRIRKEEGDDSYVLKLKEATWVPHLFRVSVTQHEYNNEKRQRITVRSEAPVEHAAESKYLLEQIAKLTAC

SEQ ID NO: 15415 - protein, 485 aa, Zea mays subsp. mays
  peptide (1)..(485): Ceres Seq. ID no. 15179438
  misc_feature (54)..(138): Pfam Name: OB-fold nucleic acid binding domain Pfam Description: OB-fold nucleic acid binding domain
  misc_feature (1)..(485): Homolog of NCBI NO: 7440032 NR Description: probable replication protein A1 - rice
  misc_feature (1)..(485): Homolog of NCBI NO: 31580977 NR Description: replication protein A 70b [Oryza sativa (japonica
  misc_feature (1)..(481): Homolog of NCBI NO: 15241489 NR Description: replication protein, putative [Arabidopsis
  misc_feature (1)..(480): Homolog of NCBI NO: 15239494 NR Description: replication protein, putative [Arabidopsis >gi|28393124|gb|AAO41995.1| putative RNA helicase [Arabidopsis
  misc_feature (28)..(481): Homolog of NCBI NO: 15225129 NR Description: replication protein, putative [Arabidopsis
  misc_feature (28)..(482): Homolog of NCBI NO: 15242405 NR Description: replication protein, putative [Arabidopsis
  misc_feature (1)..(479): Homolog of NCBI NO: 32404590 NR Description: hypothetical protein [Neurospora crassa]
  misc_feature (1)..(482): Homolog of NCBI NO: 7488291 NR Description: replication protein A1 homolog T18B16.100 -
  misc_feature (1)..(482): Homolog of NCBI NO: 400975 NR Description: REPLICATION PROTEIN A 70 KD DNA-BINDING SUBUNIT
  misc_feature (1)..(481): Homolog of NCBI NO: 34872759 NR Description: similar to replication protein A1 [Rattus
MGVTSPLAMKPKQEVKSASQIVNEQRGNTAPVKPLSMTKRVHPLITLNPYQGNWVIKVRVTSKGNLRTYRNARGEGCVFNVELTDEDGTQIQATMFNDAAKKFYPIFELGKVYYVSKGSLRIANKQFKTVQNDYEMSLNENAIVEEAEGETCIPQVQYNLVKIDQLGSYVGGRELVDIIGVVQSVSPTLSVRRKIDNETIPKRDIVVADDSGKTVSISLWNDLTTTTGQELLDMADSSPVVAIKSLKVSDFQGVSLSTVGKSTLAINPDLHEAQNLKSWYDSEGKDTSLAPIGAEMGAARAGGFKSTYSDRVFLSHITSDPAMGQEKPVFFSLYATISHIKPDQNMWYRACKTCNKKVTETFGSGYWCEGCQKNDSECSLRYIMVIKVSDPTGEAWVSVFNEHAEKIIGCSADELDRIRKEEGDDSYVLKLKEATWVPHLFRVSVTQHEYNNEKRQRITVRSEAPVEHAAESKYLLEQIAKLTAC

SEQ ID NO: 15416 - DNA, 2171 bp, Zea mays subsp. mays
  misc_feature (1)..(2171): Ceres Seq. ID no. 15179408
  misc_feature: MA Experiment ID: 108529 Result: Up-regulated in Transcription
  misc_feature: MA Experiment 108529 PARAMETER Experiment Name: Zm_Imbibed_Seeds_P Parameter: Age (day) Value: 5 vs. 2
  misc_feature: MA Experiment 108529 PARAMETER Experiment Name: Zm_Imbibed_Seeds_P Parameter: Organism Value: Zea mays
  misc_feature: MA Experiment 108529 PARAMETER Experiment Name: Zm_Imbibed_Seeds_P Parameter: Plant Line Value: 35A19
  misc_feature: MA Experiment 108529 PARAMETER Experiment Name: Zm_Imbibed_Seeds_P Parameter: Tissue Value: Roots vs. Embryo
  misc_feature: MA Experiment ID: 20000108 Result: Down-regulated in Transcription
  misc_feature: MA Experiment 20000108 PARAMETER Experiment Name: Zm_Root-Tips_P Parameter: Age (day) Value: 12
  misc_feature: MA Experiment 20000108 PARAMETER Experiment Name: Zm_Root-Tips_P Parameter: Organism Value: Zea mays
  misc_feature: MA Experiment 20000108 PARAMETER Experiment Name: Zm_Root-Tips_P Parameter: Tissue Value: Root tips vs. Root mid region    35
  misc_feature: MA Experiment 20000108 PARAMETER Experiment Name: Zm_Root-Tips_P Parameter: Tissue Value: Root tips vs. Root mid region   Sequence Listing-Misc Features (4)
  misc_feature: MA Experiment ID: 20000488 Result: Down-regulated in Transcription
  misc_feature: MA Experiment 20000488 PARAMETER Experiment Name: Zm_50mM_NH4NO3_L_to_H_P Parameter: Organism Value: Zea mays
  misc_feature: MA Experiment 20000488 PARAMETER Experiment Name: Zm_50mM_NH4NO3_L_to_H_P Parameter: Timepoint (hr) Value: 8
  misc_feature: MA Experiment 20000488 PARAMETER Experiment Name: Zm_50mM_NH4NO3_L_to_H_P Parameter: Tissue Value: Leaves
  misc_feature: MA Experiment 20000488 PARAMETER Experiment Name: Zm_50mM_NH4NO3_L_to_H_P Parameter: Treatment Value: 50mM NH4NO3 vs. 100mM Mannitol
  misc_feature: MA Experiment ID: 20000535 Result: Down-regulated in Transcription
  misc_feature: MA Experiment 20000535 PARAMETER Experiment Name: Zm_Hybrid_Seed_Dev_P Parameter: DAP Value: 30 vs. 12
  misc_feature: MA Experiment 20000535 PARAMETER Experiment Name: Zm_Hybrid_Seed_Dev_P Parameter: Organism Value: Zea mays
  misc_feature: MA Experiment 20000535 PARAMETER Experiment Name: Zm_Hybrid_Seed_Dev_P Parameter: Plant Line Value: 35A19
  misc_feature: MA Experiment 20000535 PARAMETER Experiment Name: Zm_Hybrid_Seed_Dev_P Parameter: Tissue Value: Embryo vs. Unfert Floret
  misc_feature: MA Experiment ID: 20001608 Result: Down-regulated in Transcription
  misc_feature: MA Experiment 20001608 PARAMETER Experiment Name: Zm_50ppm_KNO3_L-to-H_P Parameter: Age (day) Value: 21
  misc_feature: MA Experiment 20001608 PARAMETER Experiment Name: Zm_50ppm_KNO3_L-to-H_P Parameter: Organism Value: Zea mays
  misc_feature: MA Experiment 20001608 PARAMETER Experiment Name: Zm_50ppm_KNO3_L-to-H_P Parameter: Plant Line Value: 35A19
  misc_feature: MA Experiment 20001608 PARAMETER Experiment Name: Zm_50ppm_KNO3_L-to-H_P Parameter: Timepoint (hr) Value: 48
  misc_feature: MA Experiment 20001608 PARAMETER Experiment Name: Zm_50ppm_KNO3_L-to-H_P Parameter: Tissue Value: Shoots
  misc_feature: MA Experiment 20001608 PARAMETER Experiment Name: Zm_50ppm_KNO3_L-to-H_P Parameter: Treatment Value: 50ppm KNO3 vs. 50ppm KCl
ataaataccactcctgcgattccaccttgcagttggaccggccgttgttgctttgcttcttcgcaaaaaaaaaacaaaaaaacaaaataggcctgtcttgctccgatcaggcgtgttcttaggcttcgctgcccctaccgcgtcttcgccgggatcggtccatggccggcgccgagcgcgcggaggcggtcgcgctggaacaagggctcctcgatccggaggaatccaaccaagtagtatacactggagatggatcagtcgacttttctggaaatcctgttgtcaaggaaagaacgggtagatggaaggcatgtccattcatattaggtaatgaatgctgtgaacgactggcctactatggcatctccacaaaccttgttacttacttgacaaaaaaactgcatgctggcaatgcctctgctgctagcagtgtgactacatggtcgggaacttgctacctaactccacttattggagcaatcctggctgatgcatactgggggaggtactggacaatcgcaacattttccacagtatacttcatcgggatgacactgctgactctttcagcatcagttcctatgctcatgcctccatcttgtgaaggatccttttgcccagcagcaagcccttttcagtatactgtcttttttcttggtctttatctgattgccctgggtactggtggaattaagccgtgtgtctcatcctttggagcggatcaatttgatgatacagatccagctgagcgaatccagaagggctctttcttcaattggttttatttttcaataaacattggtgctctcatatcaagcagctttctggtttgggtgcaagacaatgtaggatggggactggggtttggcattccgactgtattcatggggctggcaatcataagcttcttctctggtacatcactttataggttccaaaaaccaggaggtagtccaattacacgagtatgtcaggtgattgttgcctctttgcgcaagtggaatgtgcctgtcccagaggatagctctctcttgtatgagctacctaatggggtatcaacaattgaggggagtcggcaaatagagcacacagatgaactcagatgtttagataaggctgctacagttaccgaagttgatgtgaaaacggctgacttcaacaacccatggcggatatgcactgtcacccaggtggaagaactgaagatactagtaaggatgttccctgtctgggcaacaacaatagtgttttctgctgtatatgctcagatgtcaacaatgtttgtggaacaagggatggtgcttgacccatccttgggctctttcaagatccctccagcttcactatctactttcgacaccctaagtgtcatcatatgtgtcccgatgtatgattacatcgtggttccgatagccaggagattcactggcaacgagaggggctttacagagttgcagaggatgggtattggcctggtaatttccatcatggctatgtcagtcgccgcagtcctcgaaatcaagcggctagcagttgccagggaagcacacctggtggatcagaatgtcccggtcccactgagcatattctggcaaatccctcagtatttcctgattggtctagcggagattttcacattcattggggcgctcgagttcttctatgaccagtcaccagacgccatgaggagcctctgcagcgcgcttaatcttctcactactgcgtttgggaactatctcagcacgttcattttgacaatggttgcgtactttactacgaggggaggtaaccctgggtggattcctgacaacttgaacgaaggccatcttgattacttcttcttgctcatcgctggcatcagttttctgaacctgattgtttatgtcctctgtgctggcaaatacaagagcaagaaggcagcttgagttgtgaaggccaggggctggatggcgtgctgcgcgccatgttatggtggacacttcagttcaaaatctgtatatatgtttcccgcattaaccaccctagctgaagcaaccatctgcaattgttgcaaagtttatattcttcattgtgctggactaagttgattatacattcgtgcttctactttgtgtatgtatatatctgacctaaagttgctgaacatagacaatttcacttgccaaaaaaat

SEQ ID NO: 15417 - protein, 587 aa, Zea mays subsp. mays
  peptide (1)..(587): Ceres Seq. ID no. 15179409
  misc_feature (116)..(520): Pfam Name: POT family Pfam Description: POT family
  misc_feature (4)..(587): Homolog of NCBI NO: 15076661 NR Description: peptide transporter [Oryza sativa (japonica >gi|15076663|dbj|BAB62327.1| peptide transporter [Oryza sativa
  misc_feature (15)..(587): Homolog of NCBI NO: 4102839 NR Description: LeOPT1 [Lycopersicon esculentum]
  misc_feature (3)..(587): Homolog of NCBI NO: 31088360 NR Description: peptide transporter 1 [Vicia faba]
  misc_feature (3)..(559): Homolog of NCBI NO: 6635838 NR Description: amino acid/peptide transporter [Prunus dulcis]
  misc_feature (1)..(587): Homolog of NCBI NO: 15226861 NR Description: histidine transport protein (PTR2-B) [Arabidopsis
  misc_feature (1)..(587): Homolog of NCBI NO: 1076331 NR Description: histidine transport protein - Arabidopsis thaliana
  misc_feature (12)..(586): Homolog of NCBI NO: 30696666 NR Description: oligopeptide transporter -related [Arabidopsis >gi|16604436|gb|AAL24224.1| At1g62200/F19K23_13 [Arabidopsis
  misc_feature (28)..(586): Homolog of NCBI NO: 25404366 NR Description: hypothetical protein F19K23.13 [imported] - thaliana >gi|2160144|gb|AAB60766.1| Strong similarity to
  misc_feature (26)..(586): Homolog of NCBI NO: 15232435 NR Description: peptide transport - like protein [Arabidopsis
  misc_feature (21)..(585): Homolog of NCBI NO: 15240905 NR Description: oligopeptide transporter - like protein
MAGAERAEAVALEQGLLDPEESNQVVYTGDGSVDFSGNPVVKERTGRWKACPFILGNECCERLAYYGISTNLVTYLTKKLHAGNASAASSVTTWSGTCYLTPLIGAILADAYWGRYWTIATFSTVYFIGMTLLTLSASVPMLMPPSCEGSFCPAASPFQYTVFFLGLYLIALGTGGIKPCVSSFGADQFDDTDPAERIQKGSFFNWFYFSINIGALISSSFLVWVQDNVGWGLGFGIPTVFMGLAIISFFSGTSLYRFQKPGGSPITRVCQVIVASLRKWNVPVPEDSSLLYELPNGVSTIEGSRQIEHTDELRCLDKAATVTEVDVKTADFNNPWRICTVTQVEELKILVRMFPVWATTIVFSAVYAQMSTMFVEQGMVLDPSLGSFKIPPASLSTFDTLSVIICVPMYDYIVVPIARRFTGNERGFTELQRMGIGLVISIMAMSVAAVLEIKRLAVAREAHLVDQNVPVPLSIFWQIPQYFLIGLAEIFTFIGALEFFYDQSPDAMRSLCSALNLLTTAFGNYLSTFILTMVAYFTTRGGNPGWIPDNLNEGHLDYFFLLIAGISFLNLIVYVLCAGKYKSKKAA

SEQ ID NO: 15418 - protein, 458 aa, Zea mays subsp. mays
  peptide (1)..(458): Ceres Seq. ID no. 15179410
  misc_feature (1)..(391): Pfam Name: POT family Pfam Description: POT family
  misc_feature (1)..(458): Homolog of NCBI NO: 15076661 NR Description: peptide transporter [Oryza sativa (japonica >gi|15076663|dbj|BAB62327.1| peptide transporter [Oryza sativa
  misc_feature (1)..(458): Homolog of NCBI NO: 4102839 NR Description: LeOPT1 [Lycopersicon esculentum]
  misc_feature (1)..(458): Homolog of NCBI NO: 31088360 NR Description: peptide transporter 1 [Vicia faba]
  misc_feature (1)..(430): Homolog of NCBI NO: 6635838 NR Description: amino acid/peptide transporter [Prunus dulcis]
  misc_feature (1)..(458): Homolog of NCBI NO: 15226861 NR Description: histidine transport protein (PTR2-B) [Arabidopsis
  misc_feature (1)..(458): Homolog of NCBI NO: 1076331 NR Description: histidine transport protein - Arabidopsis thaliana
  misc_feature (1)..(457): Homolog of NCBI NO: 30696666 NR Description: oligopeptide transporter -related [Arabidopsis >gi|16604436|gb|AAL24224.1| At1g62200/F19K23_13 [Arabidopsis
  misc_feature (1)..(457): Homolog of NCBI NO: 25404366 NR Description: hypothetical protein F19K23.13 [imported] - thaliana >gi|2160144|gb|AAB60766.1| Strong similarity to
  misc_feature (1)..(457): Homolog of NCBI NO: 15232435 NR Description: peptide transport - like protein [Arabidopsis
  misc_feature (1)..(456): Homolog of NCBI NO: 15240905 NR Description: oligopeptide transporter - like protein
MTLLTLSASVPMLMPPSCEGSFCPAASPFQYTVFFLGLYLIALGTGGIKPCVSSFGADQFDDTDPAERIQKGSFFNWFYFSINIGALISSSFLVWVQDNVGWGLGFGIPTVFMGLAIISFFSGTSLYRFQKPGGSPITRVCQVIVASLRKWNVPVPEDSSLLYELPNGVSTIEGSRQIEHTDELRCLDKAATVTEVDVKTADFNNPWRICTVTQVEELKILVRMFPVWATTIVFSAVYAQMSTMFVEQGMVLDPSLGSFKIPPASLSTFDTLSVIICVPMYDYIVVPIARRFTGNERGFTELQRMGIGLVISIMAMSVAAVLEIKRLAVAREAHLVDQNVPVPLSIFWQIPQYFLIGLAEIFTFIGALEFFYDQSPDAMRSLCSALNLLTTAFGNYLSTFILTMVAYFTTRGGNPGWIPDNLNEGHLDYFFLLIAGISFLNLIVYVLCAGKYKSKKAA

SEQ ID NO: 15419 - protein, 447 aa, Zea mays subsp. mays
  peptide (1)..(447): Ceres Seq. ID no. 15179411
  misc_feature (1)..(380): Pfam Name: POT family Pfam Description: POT family
  misc_feature (1)..(447): Homolog of NCBI NO: 15076661 NR Description: peptide transporter [Oryza sativa (japonica >gi|15076663|dbj|BAB62327.1| peptide transporter [Oryza sativa
  misc_feature (1)..(447): Homolog of NCBI NO: 4102839 NR Description: LeOPT1 [Lycopersicon esculentum]
  misc_feature (1)..(447): Homolog of NCBI NO: 31088360 NR Description: peptide transporter 1 [Vicia faba]
  misc_feature (1)..(419): Homolog of NCBI NO: 6635838 NR Description: amino acid/peptide transporter [Prunus dulcis]
  misc_feature (1)..(447): Homolog of NCBI NO: 15226861 NR Description: histidine transport protein (PTR2-B) [Arabidopsis
  misc_feature (1)..(447): Homolog of NCBI NO: 1076331 NR Description: histidine transport protein - Arabidopsis thaliana
  misc_feature (1)..(446): Homolog of NCBI NO: 30696666 NR Description: oligopeptide transporter -related [Arabidopsis >gi|16604436|gb|AAL24224.1| At1g62200/F19K23_13 [Arabidopsis
  misc_feature (1)..(446): Homolog of NCBI NO: 25404366 NR Description: hypothetical protein F19K23.13 [imported] - thaliana >gi|2160144|gb|AAB60766.1| Strong similarity to
  misc_feature (1)..(446): Homolog of NCBI NO: 15232435 NR Description: peptide transport - like protein [Arabidopsis
  misc_feature (1)..(445): Homolog of NCBI NO: 15240905 NR Description: oligopeptide transporter - like protein
MLMPPSCEGSFCPAASPFQYTVFFLGLYLIALGTGGIKPCVSSFGADQFDDTDPAERIQKGSFFNWFYFSINIGALISSSFLVWVQDNVGWGLGFGIPTVFMGLAIISFFSGTSLYRFQKPGGSPITRVCQVIVASLRKWNVPVPEDSSLLYELPNGVSTIEGSRQIEHTDELRCLDKAATVTEVDVKTADFNNPWRICTVTQVEELKILVRMFPVWATTIVFSAVYAQMSTMFVEQGMVLDPSLGSFKIPPASLSTFDTLSVIICVPMYDYIVVPIARRFTGNERGFTELQRMGIGLVISIMAMSVAAVLEIKRLAVAREAHLVDQNVPVPLSIFWQIPQYFLIGLAEIFTFIGALEFFYDQSPDAMRSLCSALNLLTTAFGNYLSTFILTMVAYFTTRGGNPGWIPDNLNEGHLDYFFLLIAGISFLNLIVYVLCAGKYKSKKAA

SEQ ID NO: 15420 - DNA, 2013 bp, Zea mays subsp. mays
  misc_feature (1)..(2013): Ceres Seq. ID no. 12417337
  misc_feature: MA Experiment ID: 108522 Result: Down-regulated in Transcription
  misc_feature: MA Experiment 108522 PARAMETER Experiment Name: Zm_42deg_Heat_P Parameter: Age (day) Value: 8
  misc_feature: MA Experiment 108522 PARAMETER Experiment Name: Zm_42deg_Heat_P Parameter: Organism Value: Zea mays
  misc_feature: MA Experiment 108522 PARAMETER Experiment Name: Zm_42deg_Heat_P Parameter: Plant Line Value: 35A19
  misc_feature: MA Experiment 108522 PARAMETER Experiment Name: Zm_42deg_Heat_P Parameter: Temperature (deg C) Value: 42 vs. 22
  misc_feature: MA Experiment 108522 PARAMETER Experiment Name: Zm_42deg_Heat_P Parameter: Timepoint (hr) Value: 1
  misc_feature: MA Experiment 108522 PARAMETER Experiment Name: Zm_42deg_Heat_P Parameter: Tissue Value: Aerial
  misc_feature: MA Experiment ID: 108534 Result: Up-regulated in Transcription
  misc_feature: MA Experiment 108534 PARAMETER Experiment Name: Zm_4deg_Cold_P Parameter: Age (hr) Value: 8
  misc_feature: MA Experiment 108534 PARAMETER Experiment Name: Zm_4deg_Cold_P Parameter: Organism Value: Zea mays
  misc_feature: MA Experiment 108534 PARAMETER Experiment Name: Zm_4deg_Cold_P Parameter: Plant Line Value: 35A19
  misc_feature: MA Experiment 108534 PARAMETER Experiment Name: Zm_4deg_Cold_P Parameter: Temperature (deg C) Value: 4 vs. 22
  misc_feature: MA Experiment 108534 PARAMETER Experiment Name: Zm_4deg_Cold_P Parameter: Timepoint (hr) Value: 6
  misc_feature: MA Experiment 108534 PARAMETER Experiment Name: Zm_4deg_Cold_P Parameter: Tissue Value: Aerial
  misc_feature: MA Experiment ID: 108536 Result: Up-regulated in Transcription
  misc_feature: MA Experiment 108536 PARAMETER Experiment Name: Zm_Meristem_P Parameter: Age (day) Value: 8
  misc_feature: MA Experiment 108536 PARAMETER Experiment Name: Zm_Meristem_P Parameter: Organism Value: Zea mays
  misc_feature: MA Experiment 108536 PARAMETER Experiment Name: Zm_Meristem_P Parameter: Plant Line Value: 35A19
  misc_feature: MA Experiment 108536 PARAMETER Experiment Name: Zm_Meristem_P Parameter: Tissue Value: Shoot Meristem vs. Above Shoot Meristem
  misc_feature: MA Experiment ID: 108543 Result: Down-regulated in Transcription
  misc_feature: MA Experiment ID: 108544 Result: Up-regulated in Transcription
  misc_feature: MA Experiment ID: 108545 Result: Down-regulated in Transcription
  misc_feature: MA Experiment 108545 PARAMETER Experiment Name: Zm_Imbibed_Seeds_P Parameter: Age (day) Value: 3 vs. 2
  misc_feature: MA Experiment 108545 PARAMETER Experiment Name: Zm_Imbibed_Seeds_P Parameter: Organism Value: Zea mays
  misc_feature: MA Experiment 108545 PARAMETER Experiment Name: Zm_Imbibed_Seeds_P Parameter: Plant Line Value: 35A19
  misc_feature: MA Experiment 108545 PARAMETER Experiment Name: Zm_Imbibed_Seeds_P Parameter: Tissue Value: Aerial vs. Embryo
  misc_feature: MA Experiment ID: 20000535 Result: Down-regulated in Transcription
  misc_feature: MA Experiment 20000535 PARAMETER Experiment Name: Zm_Hybrid_Seed_Dev_P Parameter: DAP Value: 30 vs. 12
  misc_feature: MA Experiment 20000535 PARAMETER Experiment Name: Zm_Hybrid_Seed_Dev_P Parameter: Organism Value: Zea mays
  misc_feature: MA Experiment 20000535 PARAMETER Experiment Name: Zm_Hybrid_Seed_Dev_P Parameter: Plant Line Value: 35A19
  misc_feature: MA Experiment 20000535 PARAMETER Experiment Name: Zm_Hybrid_Seed_Dev_P Parameter: Tissue Value: Embryo vs. Unfert Floret
gcacgagaccattacctagaacatcctaatcgaaaacttcagtaatcagtgctcgctagcccaccacgccctgaacctagcccggacaccagccagaacaggccatgtccatgggctccccggtgcagctcaggcggctgaagcctctgtaccagttcgtggtgaacaacatcctggccatcgtggccgtgccgctcgccaccgcggtcctgctcaaggcgtcgtcgctcgggcccgaggagatcctggcgctccggccggcgcacctgttcctggccgcgttcctgcctgccgcggccacggtgctgtacctgatgctccggccgcgcacggtgtacctggtggactacgcgtgcttccgcaccagccccaactgccgcgtcccgttcgcgacgttcctggagcactcccgcgtgtggccgggcttcgacgagcgcagcgtccggttcatgacgcgcctgctggagcggtcggggctcggggaggagacgtgcctgccgtacgcgcagcactacatcccgccgtcgcgcgacctggagtcctcccgcgccgaggccgagctcgtcatcttctcggccatcgacgacctgctcgccaagaccggggtctccccgcgggacatcgacatcctggtggtgaactgcagcctgttcgcgccgacgccgtccttcgcggacatggtcacgcaccggtacaggctccgcggggacgtgcgcaacgtgcacctcgccgggatggggtgcagcgcggggctcgtctccgtggagctggcccggaacctgctgcaggtggcgccgcggggcacgcgcgctctggtggtgtccacggagaccatcacccccaattactacatgggcgaggagcgcgcgatgctgctgcccaactgcctgttccgcatgggcggcgcggcggcgctgctgtccaccgacggcgccggcgcgcggttccgcctggcgcgcgtggtgcgcacgctgcgcggcgcgtcggacggcgcgtaccgctgcgtgtaccaggaggaggacgagcgcggcaacgtgggcatcaacctgtccaaggacctgatgagcatccgcgggcgacgcgctgaaggcgaacatcacggcgatggggcccctggtgctgccggcgtcggagcagctgctgttcgcgctgtccttcatcgcgcgcaaggtgctgaacaaccggatcaggccctacatcccggacttccgcacggcgttcgagcacttctgcatccacgcgggcgggcgcgccgtgatcgacgagctccagcgcagcctgacgctgtcggacgagcaggtggaggcgtcgcggatgacgctgcaccggttcggcaacacctccagcagctccctctggtacgagctcgcctacgtcgaggccaagggccgcatgcgcaggggagaccgcgtctggatgatcggcttcggctccggtttcaagtgcaacagcgccgcctgggagtgcatccgccccgccgccaacgccgacgggccgtgggccaactgcatccaccggtaccccgtgcacattcccgacgtgctcaagcactgagcccggcgccagctccagttccgtgccgtgccttgcctttcccttttcctcctcgcccggttgccattgcacctgctgctacatttggtttgtggacatcaaaacgaaccgctggaacagcgattggccgtggtcgtgaactaggttggtggaatatgtgatggagagtgacagagtacttgtcgtgtcgtatcaaggcggcggggtggtcgtcataaaggaggcgaggtcgggccaggctgccgtacatgggcgcccggggaacggacgtgtgttgtgcttgtccggggcgttgtattatctaccattttcctatttcttattacaattcattcctgcagtataccatgaaaagagatatgacatgagctagagctactagtagacgacaagacgagcaaaagctttgatgtatgtgtgcacctactctttatacaatcaagtgttctcatttaagtg

SEQ ID NO: 15421 - protein, 536 aa, Zea mays subsp. mays
  peptide (1)..(536): Ceres Seq. ID no. 12417338
  misc_feature (116)..(272): Pfam Name: Chalcone and stilbene synthases, N-terminal domain Pfam Description: Chalcone and stilbene synthases, N-terminal
  misc_feature (1)..(324): Homolog of NCBI NO: 17979464 NR Description: At1g68530/T26J14_10 [Arabidopsis thaliana]
  misc_feature (5)..(324): Homolog of NCBI NO: 21618184 NR Description: fatty acid condensing enzyme CUT1, putative
  misc_feature (1)..(324): Homolog of NCBI NO: 15221431 NR Description: very-long-chain fatty acid condensing enzyme protein id: At1g68530.1, supported by cDNA: 36276. [Arabidopsis
  misc_feature (5)..(324): Homolog of NCBI NO: 15222592 NR Description: fatty acid condensing enzyme CUT1, putative; id: At1g25450.1, supported by cDNA: 99793. [Arabidopsis thaliana]
  misc_feature (5)..(324): Homolog of NCBI NO: 21593111 NR Description: very-long-chain fatty acid condensing enzyme CUT1
  misc_feature (5)..(324): Homolog of NCBI NO: 28393607 NR Description: putative fatty acid condensing enzyme CUT1
  misc_feature (12)..(324): Homolog of NCBI NO: 34913436 NR Description: putative fatty acid condensing enzyme CUT1 [Oryza
  misc_feature (7)..(324): Homolog of NCBI NO: 15223556 NR Description: very-long-chain fatty acid condensing enzyme putative; protein id: At1g19440.1, supported by cDNA: 158882.
  misc_feature (7)..(324): Homolog of NCBI NO: 15226724 NR Description: putative beta-ketoacyl-CoA synthase; protein id:
  misc_feature (4)..(324): Homolog of NCBI NO: 15236133 NR Description: putative ketoacyl-CoA synthase; protein id:
MSMGSPVQLRRLKPLYQFVVNNILAIVAVPLATAVLLKASSLGPEEILALRPAHLFLAAFLPAAATVLYLMLRPRTVYLVDYACFRTSPNCRVPFATFLEHSRVWPGFDERSVRFMTRLLERSGLGEETCLPYAQHYIPPSRDLESSRAEAELVIFSAIDDLLAKTGVSPRDIDILVVNCSLFAPTPSFADMVTHRYRLRGDVRNVHLAGMGCSAGLVSVELARNLLQVAPRGTRALVVSTETITPNYYMGEERAMLLPNCLFRMGGAAALLSTDGAGARFRLARVVRTLRGASDGAYRCVYQEEDERGNVGINLSKDLMSIRGRRAEGEHHGDGAPGAAGVGAAAVRAVLHRAQGAEQPDQALHPGLPHGVRALLHPRGRARRDRRAPAQPDAVGRAGGGVADDAAPVRQHLQQLPLVRARLRRGQGPHAQGRPRLDDRLRLRFQVQQRRLGVHPPRRQRRRAVGQLHPPVPRAHSRRAQALSPAPAPVPCRALPFPFPPRPVAIAPAATFGLWTSKRTAGTAIGRGRELGWWNM

SEQ ID NO: 15422 - protein, 534 aa, Zea mays subsp. mays
  peptide (1)..(534): Ceres Seq. ID no. 12417339
  misc_feature (114)..(270): Pfam Name: Chalcone and stilbene synthases, N-terminal domain Pfam Description: Chalcone and stilbene synthases, N-terminal
  misc_feature (1)..(322): Homolog of NCBI NO: 17979464 NR Description: At1g68530/T26J14_10 [Arabidopsis thaliana]
  misc_feature (3)..(322): Homolog of NCBI NO: 21618184 NR Description: fatty acid condensing enzyme CUT1, putative
  misc_feature (1)..(322): Homolog of NCBI NO: 15221431 NR Description: very-long-chain fatty acid condensing enzyme protein id: At1g68530.1, supported by cDNA: 36276. [Arabidopsis
  misc_feature (3)..(322): Homolog of NCBI NO: 15222592 NR Description: fatty acid condensing enzyme CUT1, putative; id: At1g25450.1, supported by cDNA: 99793. [Arabidopsis thaliana]
  misc_feature (3)..(322): Homolog of NCBI NO: 21593111 NR Description: very-long-chain fatty acid condensing enzyme CUT1
  misc_feature (3)..(322): Homolog of NCBI NO: 28393607 NR Description: putative fatty acid condensing enzyme CUT1
  misc_feature (10)..(322): Homolog of NCBI NO: 34913436 NR Description: putative fatty acid condensing enzyme CUT1 [Oryza
  misc_feature (5)..(322): Homolog of NCBI NO: 15223556 NR Description: very-long-chain fatty acid condensing enzyme putative; protein id: At1g19440.1, supported by cDNA: 158882.
  misc_feature (5)..(322): Homolog of NCBI NO: 15226724 NR Description: putative beta-ketoacyl-CoA synthase; protein id:
  misc_feature (2)..(322): Homolog of NCBI NO: 15236133 NR Description: putative ketoacyl-CoA synthase; protein id:
MGSPVQLRRLKPLYQFVVNNILAIVAVPLATAVLLKASSLGPEEILALRPAHLFLAAFLPAAATVLYLMLRPRTVYLVDYACFRTSPNCRVPFATFLEHSRVWPGFDERSVRFMTRLLERSGLGEETCLPYAQHYIPPSRDLESSRAEAELVIFSAIDDLLAKTGVSPRDIDILVVNCSLFAPTPSFADMVTHRYRLRGDVRNVHLAGMGCSAGLVSVELARNLLQVAPRGTRALVVSTETITPNYYMGEERAMLLPNCLFRMGGAAALLSTDGAGARFRLARVVRTLRGASDGAYRCVYQEEDERGNVGINLSKDLMSIRGRRAEGEHHGDGAPGAAGVGAAAVRAVLHRAQGAEQPDQALHPGLPHGVRALLHPRGRARRDRRAPAQPDAVGRAGGGVADDAAPVRQHLQQLPLVRARLRRGQGPHAQGRPRLDDRLRLRFQVQQRRLGVHPPRRQRRRAVGQLHPPVPRAHSRRAQALSPAPAPVPCRALPFPFPPRPVAIAPAATFGLWTSKRTAGTAIGRGRELGWWNM

SEQ ID NO: 15423 - protein, 466 aa, Zea mays subsp. mays
  peptide (1)..(466): Ceres Seq. ID no. 12417340
  misc_feature (46)..(202): Pfam Name: Chalcone and stilbene synthases, N-terminal domain Pfam Description: Chalcone and stilbene synthases, N-terminal
  misc_feature (1)..(254): Homolog of NCBI NO: 17979464 NR Description: At1g68530/T26J14_10 [Arabidopsis thaliana]
  misc_feature (1)..(254): Homolog of NCBI NO: 21618184 NR Description: fatty acid condensing enzyme CUT1, putative
  misc_feature (1)..(254): Homolog of NCBI NO: 15221431 NR Description: very-long-chain fatty acid condensing enzyme protein id: At1g68530.1, supported by cDNA: 36276. [Arabidopsis
  misc_feature (1)..(254): Homolog of NCBI NO: 15222592 NR Description: fatty acid condensing enzyme CUT1, putative; id: At1g25450.1, supported by cDNA: 99793. [Arabidopsis thaliana]
  misc_feature (1)..(254): Homolog of NCBI NO: 21593111 NR Description: very-long-chain fatty acid condensing enzyme CUT1
  misc_feature (1)..(254): Homolog of NCBI NO: 28393607 NR Description: putative fatty acid condensing enzyme CUT1
  misc_feature (1)..(254): Homolog of NCBI NO: 34913436 NR Description: putative fatty acid condensing enzyme CUT1 [Oryza
  misc_feature (1)..(254): Homolog of NCBI NO: 15223556 NR Description: very-long-chain fatty acid condensing enzyme putative; protein id: At1g19440.1, supported by cDNA: 158882.
  misc_feature (1)..(254): Homolog of NCBI NO: 15226724 NR Description: putative beta-ketoacyl-CoA synthase; protein id:
  misc_feature (1)..(254): Homolog of NCBI NO: 15236133 NR Description: putative ketoacyl-CoA synthase; protein id:
MLRPRTVYLVDYACFRTSPNCRVPFATFLEHSRVWPGFDERSVRFMTRLLERSGLGEETCLPYAQHYIPPSRDLESSRAEAELVIFSAIDDLLAKTGVSPRDIDILVVNCSLFAPTPSFADMVTHRYRLRGDVRNVHLAGMGCSAGLVSVELARNLLQVAPRGTRALVVSTETITPNYYMGEERAMLLPNCLFRMGGAAALLSTDGAGARFRLARVVRTLRGASDGAYRCVYQEEDERGNVGINLSKDLMSIRGRRAEGEHHGDGAPGAAGVGAAAVRAVLHRAQGAEQPDQALHPGLPHGVRALLHPRGRARRDRRAPAQPDAVGRAGGGVADDAAPVRQHLQQLPLVRARLRRGQGPHAQGRPRLDDRLRLRFQVQQRRLGVHPPRRQRRRAVGQLHPPVPRAHSRRAQALSPAPAPVPCRALPFPFPPRPVAIAPAATFGLWTSKRTAGTAIGRGRELGWWNM

SEQ ID NO: 15424 - DNA, 1958 bp, Zea mays subsp. mays; identical to SEQ ID NO: 8207
  misc_feature (1)..(1958): Ceres Seq. ID no. 13636500
  misc_feature: MA Experiment ID: 108534 Result: Up-regulated in Transcription
  misc_feature: MA Experiment 108534 PARAMETER Experiment Name: Zm_4deg_Cold_P Parameter: Age (hr) Value: 8
  misc_feature: MA Experiment 108534 PARAMETER Experiment Name: Zm_4deg_Cold_P Parameter: Organism Value: Zea mays
  misc_feature: MA Experiment 108534 PARAMETER Experiment Name: Zm_4deg_Cold_P Parameter: Plant Line Value: 35A19
  misc_feature: MA Experiment 108534 PARAMETER Experiment Name: Zm_4deg_Cold_P Parameter: Temperature (deg C) Value: 4 vs. 22
  misc_feature: MA Experiment 108534 PARAMETER Experiment Name: Zm_4deg_Cold_P Parameter: Timepoint (hr) Value: 6
  misc_feature: MA Experiment 108534 PARAMETER Experiment Name: Zm_4deg_Cold_P Parameter: Tissue Value: Aerial
  misc_feature: MA Experiment ID: 108535 Result: Down-regulated in Transcription
  misc_feature: MA Experiment 108535 PARAMETER Experiment Name: Zm_Meristem_P Parameter: Age (day) Value: 8
  misc_feature: MA Experiment 108535 PARAMETER Experiment Name: Zm_Meristem_P Parameter: Organism Value: Zea mays
  misc_feature: MA Experiment 108535 PARAMETER Experiment Name: Zm_Meristem_P Parameter: Plant Line Value: 35A19
  misc_feature: MA Experiment 108535 PARAMETER Experiment Name: Zm_Meristem_P Parameter: Tissue Value: Root Meristem vs. Above Root Meristem
  misc_feature: MA Experiment ID: 108556 Result: Down-regulated in Transcription
  misc_feature: MA Experiment 108556 PARAMETER Experiment Name: Zm_Drought_P Parameter: Age (day) Value: 9
  misc_feature: MA Experiment 108556 PARAMETER Experiment Name: Zm_Drought_P Parameter: Organism Value: Zea mays
  misc_feature: MA Experiment 108556 PARAMETER Experiment Name: Zm_Drought_P Parameter: Plant Line Value: 35A19
  misc_feature: MA Experiment 108556 PARAMETER Experiment Name: Zm_Drought_P Parameter: Timepoint (hr) Value: 24
  misc_feature: MA Experiment 108556 PARAMETER Experiment Name: Zm_Drought_P Parameter: Tissue Value: Aerial
  misc_feature: MA Experiment 108556 PARAMETER Experiment Name: Zm_Drought_P Parameter: Treatment Value: Drought vs. No Drought
  misc_feature: MA Experiment ID: 20000479 Result: Down-regulated in Transcription
  misc_feature: MA Experiment 20000479 PARAMETER Experiment Name: Zm_Drought_P Parameter: Age (day) Value: 10
  misc_feature: MA Experiment 20000479 PARAMETER Experiment Name: Zm_Drought_P Parameter: Organism Value: Zea mays
  misc_feature: MA Experiment 20000479 PARAMETER Experiment Name: Zm_Drought_P Parameter: Plant Line Value: 35A19
  misc_feature: MA Experiment 20000479 PARAMETER Experiment Name: Zm_Drought_P Parameter: Timepoint (hr) Value: 48
  misc_feature: MA Experiment 20000479 PARAMETER Experiment Name: Zm_Drought_P Parameter: Tissue Value: Aerial
  misc_feature: MA Experiment 20000479 PARAMETER Experiment Name: Zm_Drought_P Parameter: Treatment Value: Drought vs. No Drought
  misc_feature: MA Experiment ID: 20000480 Result: Down-regulated in Transcription
  misc_feature: MA Experiment 20000480 PARAMETER Experiment Name: Zm_Drought_P Parameter: Age (day) Value: 11
  misc_feature: MA Experiment 20000480 PARAMETER Experiment Name: Zm_Drought_P Parameter: Organism Value: Zea mays
  misc_feature: MA Experiment 20000480 PARAMETER Experiment Name: Zm_Drought_P Parameter: Plant Line Value: 35A19
  misc_feature: MA Experiment 20000480 PARAMETER Experiment Name: Zm_Drought_P Parameter: Timepoint (hr) Value: 72
  misc_feature: MA Experiment 20000480 PARAMETER Experiment Name: Zm_Drought_P Parameter: Tissue Value: Aerial
  misc_feature: MA Experiment 20000480 PARAMETER Experiment Name: Zm_Drought_P Parameter: Treatment Value: Drought vs. No Drought
  misc_feature: MA Experiment ID: 20000535 Result: Down-regulated in Transcription
  misc_feature: MA Experiment 20000535 PARAMETER Experiment Name: Zm_Hybrid_Seed_Dev_P Parameter: DAP Value: 30 vs. 12
  misc_feature: MA Experiment 20000535 PARAMETER Experiment Name: Zm_Hybrid_Seed_Dev_P Parameter: Organism Value: Zea mays
  misc_feature: MA Experiment 20000535 PARAMETER Experiment Name: Zm_Hybrid_Seed_Dev_P Parameter: Plant Line Value: 35A19
  misc_feature: MA Experiment 20000535 PARAMETER Experiment Name: Zm_Hybrid_Seed_Dev_P Parameter: Tissue Value: Embryo vs. Unfert Floret

SEQ ID NO: 15425 - protein, 427 aa, Zea mays subsp. mays; identical to SEQ ID NO: 8208
  peptide (1)..(427): Ceres Seq. ID no. 13636501
  misc_feature (1)..(188): Homolog of NCBI NO: 27819499 NR Description: putative arabinogalactan-protein [Oryza sativa
  misc_feature (11)..(274): Homolog of NCBI NO: 33146739 NR Description: GPI-anchored protein -like [Oryza sativa
  misc_feature (11)..(274): Homolog of NCBI NO: 34899886 NR Description: OJ1714_H10.26 [Oryza sativa (japonica
  misc_feature (1)..(274): Homolog of NCBI NO: 15240029 NR Description: expressed protein [Arabidopsis thaliana] gb|AAF02137.1~gene_id:MHF15.9~strong similarity to unknown
  misc_feature (48)..(272): Homolog of NCBI NO: 25370583 NR Description: hypothetical protein At2g35860 [imported] - thaliana >gi|4510383|gb|AAD21471.1| unknown protein [Arabidopsis
  misc_feature (48)..(272): Homolog of NCBI NO: 30686588 NR Description: expressed protein [Arabidopsis thaliana] unknown protein [Arabidopsis thaliana]
  misc_feature (35)..(279): Homolog of NCBI NO: 6041822 NR Description: unknown protein [Arabidopsis thaliana]
  misc_feature (35)..(279): Homolog of NCBI NO: 18399319 NR Description: expressed protein [Arabidopsis thaliana] unknown protein [Arabidopsis thaliana] AT3g11700/T19F11_10 [Arabidopsis thaliana]
  misc_feature (48)..(274): Homolog of NCBI NO: 15231197 NR Description: predicted GPI-anchored protein [Arabidopsis
  misc_feature (200)..(427): Homolog of NCBI NO: 23018055 NR Description: hypothetical protein [Thermobifida fusca]
  misc_feature (1)..(188): Homolog of NCBI NO: 27819499 NR Description: putative arabinogalactan-protein [Oryza sativa
  misc_feature (11)..(274): Homolog of NCBI NO: 33146739 NR Description: GPI-anchored protein -like [Oryza sativa
  misc_feature (11)..(274): Homolog of NCBI NO: 34899886 NR Description: OJ1714_H10.26 [Oryza sativa (japonica
  misc_feature (1)..(274): Homolog of NCBI NO: 15240029 NR Description: expressed protein [Arabidopsis thaliana] gb|AAF02137.1~gene_id:MHF15.9~strong similarity to unknown
  misc_feature (48)..(272): Homolog of NCBI NO: 25370583 NR Description: hypothetical protein At2g35860 [imported] - thaliana >gi|4510383|gb|AAD21471.1| unknown protein [Arabidopsis
  misc_feature (48)..(272): Homolog of NCBI NO: 30686588 NR Description: expressed protein [Arabidopsis thaliana] unknown protein [Arabidopsis thaliana]
  misc_feature (35)..(279): Homolog of NCBI NO: 6041822 NR Description: unknown protein [Arabidopsis thaliana]
  misc_feature (35)..(279): Homolog of NCBI NO: 18399319 NR Description: expressed protein [Arabidopsis thaliana] unknown protein [Arabidopsis thaliana] AT3g11700/T19F11_10 [Arabidopsis thaliana]
  misc_feature (48)..(274): Homolog of NCBI NO: 15231197 NR Description: predicted GPI-anchored protein [Arabidopsis
  misc_feature (200)..(427): Homolog of NCBI NO: 23018055 NR Description: hypothetical protein [Thermobifida fusca]
  misc_feature (29)..(29): Xaa is any aa, unknown or other
  misc_feature (42)..(42): Xaa is any aa, unknown or other

SEQ ID NO: 15426 - protein, 382 aa, Zea mays subsp. mays; identical to SEQ ID NO: 8209
  peptide (1)..(382): Ceres Seq. ID no. 13636502
  misc_feature (299)..(382): Pfam Name: Equine herpesvirus glycoprotein gp2 Pfam Description: Equine herpesvirus glycoprotein gp2
  misc_feature (299)..(382): Pfam Name: Equine herpesvirus glycoprotein gp2 Pfam Description: Equine herpesvirus glycoprotein gp2
  misc_feature (13)..(382): Homolog of NCBI NO: 29247944 NR Description: GLP_26_54603_52153 [Giardia lamblia ATCC 50803]
  misc_feature (164)..(382): Homolog of NCBI NO: 39592411 NR Description: Hypothetical protein CBG07956 [Caenorhabditis
  misc_feature (115)..(382): Homolog of NCBI NO: 25143299 NR Description: pre-mRNA splicing SR protein related RSR-1 (68.2
  misc_feature (2)..(382): Homolog of NCBI NO: 30424862 NR Description: RIKEN cDNA 5033413A03 [Mus musculus]
  misc_feature (3)..(382): Homolog of NCBI NO: 11360494 NR Description: antifreeze glycopeptide AFGP polyprotein precursor
  misc_feature (164)..(382): Homolog of NCBI NO: 39592411 NR Description: Hypothetical protein CBG07956 [Caenorhabditis
  misc_feature (2)..(382): Homolog of NCBI NO: 30424862 NR Description: RIKEN cDNA 5033413A03 [Mus musculus]
  misc_feature (220)..(382): Homolog of NCBI NO: 28574039 NR Description: Salivary gland secretion 1 CG3047-PA [Drosophila
  misc_feature (15)..(382): Homolog of NCBI NO: 5821143 NR Description: RNA binding protein [Homo sapiens]
  misc_feature (15)..(382): Homolog of NCBI NO: 5821145 NR Description: RNA binding protein [Homo sapiens]
  misc_feature (164)..(382): Homolog of NCBI NO: 11360318 NR Description: probable mucin DKFZp434C196.1 - human (fragment)
  misc_feature (261)..(382): Homolog of NCBI NO: 6322209 NR Description: Required for invasion and pseudohyphae formation response to nitrogen starvation; Muc1p [Saccharomyces cerevisiae] Glucoamylase S1/S2 precursor sta1, len: 1367, CAI: 0.3,
  misc_feature (3)..(382): Homolog of NCBI NO: 11360494 NR Description: antifreeze glycopeptide AFGP polyprotein precursor
  misc_feature (115)..(382): Homolog of NCBI NO: 25143299 NR Description: pre-mRNA splicing SR protein related RSR-1 (68.2
  misc_feature (13)..(382): Homolog of NCBI NO: 29247944 NR Description: GLP_26_54603_52153 [Giardia lamblia ATCC 50803]
  misc_feature (261)..(382): Homolog of NCBI NO: 6322209 NR Description: Required for invasion and pseudohyphae formation response to nitrogen starvation; Muc1p [Saccharomyces cerevisiae] Glucoamylase S1/S2 precursor sta1, len: 1367, CAI: 0.3,
  misc_feature (164)..(382): Homolog of NCBI NO: 11360318 NR Description: probable mucin DKFZp434C196.1 - human (fragment)
  misc_feature (15)..(382): Homolog of NCBI NO: 5821145 NR Description: RNA binding protein [Homo sapiens]
  misc_feature (15)..(382): Homolog of NCBI NO: 5821143 NR Description: RNA binding protein [Homo sapiens]
  misc_feature (220)..(382): Homolog of NCBI NO: 28574039 NR Description: Salivary gland secretion 1 CG3047-PA [Drosophila
  misc_feature (70)..(70): Xaa is any aa, unknown or other
  misc_feature (83)..(83): Xaa is any aa, unknown or other

SEQ ID NO: 15427 - protein, 269 aa, Zea mays subsp. mays; identical to SEQ ID NO: 8210
  peptide (1)..(269): Ceres Seq. ID no. 13636503
  misc_feature (1)..(30): Homolog of NCBI NO: 27819499 NR Description: putative arabinogalactan-protein [Oryza sativa
  misc_feature (1)..(116): Homolog of NCBI NO: 33146739 NR Description: GPI-anchored protein -like [Oryza sativa
  misc_feature (1)..(116): Homolog of NCBI NO: 34899886 NR Description: OJ1714_H10.26 [Oryza sativa (japonica
  misc_feature (1)..(116): Homolog of NCBI NO: 15240029 NR Description: expressed protein [Arabidopsis thaliana] gb|AAF02137.1~gene_id:MHF15.9~strong similarity to unknown
  misc_feature (1)..(114): Homolog of NCBI NO: 25370583 NR Description: hypothetical protein At2g35860 [imported] - thaliana >gi|4510383|gb|AAD21471.1| unknown protein [Arabidopsis
  misc_feature (1)..(114): Homolog of NCBI NO: 30686588 NR Description: expressed protein [Arabidopsis thaliana] unknown protein [Arabidopsis thaliana]
  misc_feature (1)..(121): Homolog of NCBI NO: 6041822 NR Description: unknown protein [Arabidopsis thaliana]
  misc_feature (1)..(121): Homolog of NCBI NO: 18399319 NR Description: expressed protein [Arabidopsis thaliana] unknown protein [Arabidopsis thaliana] AT3g11700/T19F11_10 [Arabidopsis thaliana]
  misc_feature (1)..(116): Homolog of NCBI NO: 15231197 NR Description: predicted GPI-anchored protein [Arabidopsis
  misc_feature (42)..(269): Homolog of NCBI NO: 23018055 NR Description: hypothetical protein [Thermobifida fusca]
  misc_feature (1)..(114): Homolog of NCBI NO: 30686588 NR Description: expressed protein [Arabidopsis thaliana] unknown protein [Arabidopsis thaliana]
  misc_feature (1)..(121): Homolog of NCBI NO: 6041822 NR Description: unknown protein [Arabidopsis thaliana]
  misc_feature (1)..(121): Homolog of NCBI NO: 18399319 NR Description: expressed protein [Arabidopsis thaliana] unknown protein [Arabidopsis thaliana] AT3g11700/T19F11_10 [Arabidopsis thaliana]
  misc_feature (1)..(116): Homolog of NCBI NO: 15231197 NR Description: predicted GPI-anchored protein [Arabidopsis
  misc_feature (42)..(269): Homolog of NCBI NO: 23018055 NR Description: hypothetical protein [Thermobifida fusca]
  misc_feature (1)..(30): Homolog of NCBI NO: 27819499 NR Description: putative arabinogalactan-protein [Oryza sativa
  misc_feature (1)..(116): Homolog of NCBI NO: 33146739 NR Description: GPI-anchored protein -like [Oryza sativa
  misc_feature (1)..(116): Homolog of NCBI NO: 34899886 NR Description: OJ1714_H10.26 [Oryza sativa (japonica
  misc_feature (1)..(116): Homolog of NCBI NO: 15240029 NR Description: expressed protein [Arabidopsis thaliana] gb|AAF02137.1~gene_id:MHF15.9~strong similarity to unknown
  misc_feature (1)..(114): Homolog of NCBI NO: 25370583 NR Description: hypothetical protein At2g35860 [imported] - thaliana >gi|4510383|gb|AAD21471.1| unknown protein [Arabidopsis

SEQ ID NO: 15428 - DNA, 455 bp, Zea mays subsp. mays
  misc_feature (1)..(455): Ceres Seq. ID no. 7113127
  misc_feature: MA Experiment ID: 20000487 Result: Up-regulated in Transcription
  misc_feature: MA Experiment 20000487 PARAMETER Experiment Name: Zm_50mM_NH4NO3_L_to_H_P Parameter: Organism Value: Zea mays
  misc_feature: MA Experiment 20000487 PARAMETER Experiment Name: Zm_50mM_NH4NO3_L_to_H_P Parameter: Timepoint (hr) Value: 4
  misc_feature: MA Experiment 20000487 PARAMETER Experiment Name: Zm_50mM_NH4NO3_L_to_H_P Parameter: Tissue Value: Leaves
  misc_feature: MA Experiment 20000487 PARAMETER Experiment Name: Zm_50mM_NH4NO3_L_to_H_P Parameter: Treatment Value: 50mM NH4NO3 vs. 100mM Mannitol
gaacaaaaaccttttgattccaattgttcttctctcttcttcttcttcttcttcttcttcttcttcgccgcttcttctctctcgaattcaccccatctcaagtgtacgttagcctcctccctctaatggcgactcgtcttcagtttgagaacaactgcgaagttggtgtcttttccaaactcactaatgcctattgcttagtcgctataggaggctctgagaacttttacagtgcttttgagtcggagttagcagatgttatccctattgttaagacctctattggaggaacacgaattattgggcgtctttgtgctggaaacaagaatgggcttcttgtacctcatacaacaactgaccaagagcttcaacacttaaggaacagtctacctgatcaagttgtggtccagcgaattgatgaacgtctgtctgctcttggaaattgcattgcctgc

SEQ ID NO: 15429 - protein, 110 aa, Zea mays subsp. mays
  peptide (1)..(110): Ceres Seq. ID no. 7113128
  misc_feature (3)..(109): Pfam Name: eIF-6 family Pfam Description: eIF-6 family
  misc_feature (1)..(109): Homolog of NCBI NO: 27261099 NR Description: putative eukaryotic translation initiation factor
  misc_feature (1)..(109): Homolog of NCBI NO: 6016330 NR Description: EUKARYOTIC TRANSLATION INITIATION FACTOR 6 (EIF-6)
  misc_feature (1)..(109): Homolog of NCBI NO: 34903364 NR Description: unnamed protein product [Oryza sativa (japonica group)] >gi|6498439|dbj|BAA87842.1| unnamed protein product
  misc_feature (1)..(109): Homolog of NCBI NO: 6325273 NR Description: similar to human translation initiation factor 6 however, TIF6 does not act as a true translation initiation protein may be involved in the biogenesis and or stability of the
  misc_feature (1)..(109): Homolog of NCBI NO: 11513605 NR Description: Chain A, Crystal Structure Of S.Cerevisiae Eif6
  misc_feature (1)..(109): Homolog of NCBI NO: 15228161 NR Description: eukaryotic translation initiation factor 6 - like protein; protein id: At3g55620.1 [Arabidopsis thaliana]
  misc_feature (1)..(109): Homolog of NCBI NO: 31242655 NR Description: ENSANGP00000017466 [Anopheles gambiae]
  misc_feature (1)..(109): Homolog of NCBI NO: 27501448 NR Description: integrin beta 4 binding protein [Mus musculus]
  misc_feature (1)..(109): Homolog of NCBI NO: 6381991 NR Description: b4 integrin interactor homolog [Mus musculus]
  misc_feature (1)..(109): Homolog of NCBI NO: 4504771 NR Description: integrin beta 4 binding protein; eukaryotic initiation factor 3A; p27BBP [Homo sapiens]
MATRLQFENNCEVGVFSKLTNAYCLVAIGGSENFYSAFESELADVIPIVKTSIGGTRIIGRLCAGNKNGLLVPHTTTDQELQHLRNSLPDQVVVQRIDERLSALGNCIAC

SEQ ID NO: 15430 - DNA, 1080 bp, Zea mays subsp. mays
  misc_feature (1)..(1080): Ceres Seq. ID no. 13600524
  misc_feature: MA Experiment ID: 108545 Result: Up-regulated in Transcription
  misc_feature: MA Experiment 108545 PARAMETER Experiment Name: Zm_Imbibed_Seeds_P Parameter: Age (day) Value: 3 vs. 2
  misc_feature: MA Experiment 108545 PARAMETER Experiment Name: Zm_Imbibed_Seeds_P Parameter: Organism Value: Zea mays
  misc_feature: MA Experiment 108545 PARAMETER Experiment Name: Zm_Imbibed_Seeds_P Parameter: Plant Line Value: 35A19
  misc_feature: MA Experiment 108545 PARAMETER Experiment Name: Zm_Imbibed_Seeds_P Parameter: Tissue Value: Aerial vs. Embryo
  misc_feature: MA Experiment ID: 20000632 Result: Down-regulated in Transcription
  misc_feature: MA Experiment 20000632 PARAMETER Experiment Name: Zm_Herbicide-Treatments_P Parameter: Timepoint (hr) Value: 4
  misc_feature: MA Experiment 20000632 PARAMETER Experiment Name: Zm_Herbicide-Treatments_P Parameter: Tissue Value: Aerial
  misc_feature: MA Experiment 20000632 PARAMETER Experiment Name: Zm_Herbicide-Treatments_P Parameter: Treatment Value: Glean vs. No Treatment
atttctcaaacaagagcagattccattacatatgatgttaaagttcagatgattgaaatatacaatgagcaagagggatttattaatgactgatggtgcaaacaaaagattagagatacgcaataattctcatgtaaatggactcaacatcccagatgccaatattgtgccagtcaagtgcgcacaagatgttttggatctgatgaaagttggccagagaaaccgagcagttggatcaactgctcttaatgaacgaagtagccgctcacacagtgtgttgacagctcatgtacaaggaaaggaggtaatttcaggctcaactctaagagggtgtcttcatctagtggatctcgcgggaagtgagagggtagacaaatctgaagcgactggagaaagactaactgaagccaagcacataaacaaatctctgtcagcacttggtgatgttatatctgcacttgcccaaaagagttcccatgttccatatagaaatagcaagtttacacaagtgctgcaggatgccttaggtggtcaagcaaaaacattgatgtttgtgcatgtgaaccctgaaacagactcttttagtgaaacaatgagcactctcaaattcgctgagcgtgtagctacaatagaacttggtgccgcccgtgcaaacaaggaagcaggccaggtcaaagacctaaaggaagagatcgccaagcttaaattggcattagatgaaaaggaaaatgaagtggcacagtttaaagatcttgctaaccgtgtgacttctgagatgagaaatgcaagaacaagatcacctttaaccgccagcatgtccttgaaacctgaagtcagtcaagaatccagtgtagacacctgtacaagtgagataagaagttcatcatctggcaagcaaagaaggttccgttcaccgttgtcagtgagagagctagacgataagtcacctgtcatcagcagggaactgtacctgagtgcgcgaaagtacaagactccctctcctccggttagaagctcactctctgtcgagagaggcagctttgccaaaatcgtggagaacactggaagcatcgactgcac

SEQ ID NO: 15431 - protein, 338 aa, Zea mays subsp. mays
  peptide (1)..(338): Ceres Seq. ID no. 13600525
  misc_feature (17)..(337): Homolog of NCBI NO: 38606523 NR Description: OSJNBa0016O02.10 [Oryza sativa (japonica
  misc_feature (1)..(328): Homolog of NCBI NO: 18201934 NR Description: kinesin-like protein heavy chain [Arabidopsis
  misc_feature (1)..(328): Homolog of NCBI NO: 30692267 NR Description: kinesin-related protein [Arabidopsis thaliana]
  misc_feature (1)..(267): Homolog of NCBI NO: 28393382 NR Description: putative kinesin [Arabidopsis thaliana]
  misc_feature (29)..(307): Homolog of NCBI NO: 2392771 NR Description: putative kinesin-like protein [Arabidopsis
  misc_feature (1)..(300): Homolog of NCBI NO: 18421069 NR Description: kinesin-related protein [Arabidopsis thaliana]
  misc_feature (1)..(300): Homolog of NCBI NO: 11358474 NR Description: kinesin-like heavy chain [validated] -
  misc_feature (3)..(267): Homolog of NCBI NO: 7487566 NR Description: probable kinesin heavy chain [imported] - thaliana >gi|2529677|gb|AAC62860.1| putative kinesin heavy chain
  misc_feature (3)..(267): Homolog of NCBI NO: 30690701 NR Description: kinesin-related protein [Arabidopsis thaliana]
  misc_feature (1)..(267): Homolog of NCBI NO: 15208469 NR Description: kinesin heavy chain [Zea mays]
MSKRDLLMTDGANKRLEIRNNSHVNGLNIPDANIVPVKCAQDVLDLMKVGQRNRAVGSTALNERSSRSHSVLTAHVQGKEVISGSTLRGCLHLVDLAGSERVDKSEATGERLTEAKHINKSLSALGDVISALAQKSSHVPYRNSKFTQVLQDALGGQAKTLMFVHVNPETDSFSETMSTLKFAERVATIELGAARANKEAGQVKDLKEEIAKLKLALDEKENEVAQFKDLANRVTSEMRNARTRSPLTASMSLKPEVSQESSVDTCTSEIRSSSSGKQRRFRSPLSVRELDDKSPVISRELYLSARKYKTPSPPVRSSLSVERGSFAKIVENTGSIDC

SEQ ID NO: 15432 - protein, 331 aa, Zea mays subsp. mays
  peptide (1)..(331): Ceres Seq. ID no. 13600526
  misc_feature (10)..(330): Homolog of NCBI NO: 38606523 NR Description: OSJNBa0016O02.10 [Oryza sativa (japonica
  misc_feature (1)..(321): Homolog of NCBI NO: 18201934 NR Description: kinesin-like protein heavy chain [Arabidopsis
  misc_feature (1)..(321): Homolog of NCBI NO: 30692267 NR Description: kinesin-related protein [Arabidopsis thaliana]
  misc_feature (1)..(260): Homolog of NCBI NO: 28393382 NR Description: putative kinesin [Arabidopsis thaliana]
  misc_feature (22)..(300): Homolog of NCBI NO: 2392771 NR Description: putative kinesin-like protein [Arabidopsis
  misc_feature (1)..(293): Homolog of NCBI NO: 18421069 NR Description: kinesin-related protein [Arabidopsis thaliana]
  misc_feature (1)..(293): Homolog of NCBI NO: 11358474 NR Description: kinesin-like heavy chain [validated] -
  misc_feature (1)..(260): Homolog of NCBI NO: 7487566 NR Description: probable kinesin heavy chain [imported] - thaliana >gi|2529677|gb|AAC62860.1| putative kinesin heavy chain
  misc_feature (1)..(260): Homolog of NCBI NO: 30690701 NR Description: kinesin-related protein [Arabidopsis thaliana]
  misc_feature (1)..(260): Homolog of NCBI NO: 15208469 NR Description: kinesin heavy chain [Zea mays]
MTDGANKRLEIRNNSHVNGLNIPDANIVPVKCAQDVLDLMKVGQRNRAVGSTALNERSSRSHSVLTAHVQGKEVISGSTLRGCLHLVDLAGSERVDKSEATGERLTEAKHINKSLSALGDVISALAQKSSHVPYRNSKFTQVLQDALGGQAKTLMFVHVNPETDSFSETMSTLKFAERVATIELGAARANKEAGQVKDLKEEIAKLKLALDEKENEVAQFKDLANRVTSEMRNARTRSPLTASMSLKPEVSQESSVDTCTSEIRSSSSGKQRRFRSPLSVRELDDKSPVISRELYLSARKYKTPSPPVRSSLSVERGSFAKIVENTGSIDC

SEQ ID NO: 15433 - protein, 292 aa, Zea mays subsp. mays
  peptide (1)..(292): Ceres Seq. ID no. 13600527
  misc_feature (1)..(291): Homolog of NCBI NO: 38606523 NR Description: OSJNBa0016O02.10 [Oryza sativa (japonica
  misc_feature (1)..(282): Homolog of NCBI NO: 18201934 NR Description: kinesin-like protein heavy chain [Arabidopsis
  misc_feature (1)..(282): Homolog of NCBI NO: 30692267 NR Description: kinesin-related protein [Arabidopsis thaliana]
  misc_feature (1)..(221): Homolog of NCBI NO: 28393382 NR Description: putative kinesin [Arabidopsis thaliana]
  misc_feature (1)..(261): Homolog of NCBI NO: 2392771 NR Description: putative kinesin-like protein [Arabidopsis
  misc_feature (1)..(254): Homolog of NCBI NO: 18421069 NR Description: kinesin-related protein [Arabidopsis thaliana]
  misc_feature (1)..(254): Homolog of NCBI NO: 11358474 NR Description: kinesin-like heavy chain [validated] -
  misc_feature (1)..(221): Homolog of NCBI NO: 7487566 NR Description: probable kinesin heavy chain [imported] - thaliana >gi|2529677|gb|AAC62860.1| putative kinesin heavy chain
  misc_feature (1)..(221): Homolog of NCBI NO: 30690701 NR Description: kinesin-related protein [Arabidopsis thaliana]
  misc_feature (1)..(221): Homolog of NCBI NO: 15208469 NR Description: kinesin heavy chain [Zea mays]
MKVGQRNRAVGSTALNERSSRSHSVLTAHVQGKEVISGSTLRGCLHLVDLAGSERVDKSEATGERLTEAKHINKSLSALGDVISALAQKSSHVPYRNSKFTQVLQDALGGQAKTLMFVHVNPETDSFSETMSTLKFAERVATIELGAARANKEAGQVKDLKEEIAKLKLALDEKENEVAQFKDLANRVTSEMRNARTRSPLTASMSLKPEVSQESSVDTCTSEIRSSSSGKQRRFRSPLSVRELDDKSPVISRELYLSARKYKTPSPPVRSSLSVERGSFAKIVENTGSIDC

SEQ ID NO: 15434 - DNA, 1222 bp, Zea mays subsp. mays; identical to SEQ ID NO: 14395
  misc_feature (1)..(1222): Ceres Seq. ID no. 13623625
  misc_feature: MA Experiment ID: 20000488 Result: Down-regulated in Transcription
  misc_feature: MA Experiment 20000488 PARAMETER Experiment Name: Zm_50mM_NH4NO3_L_to_H_P Parameter: Organism Value: Zea mays
  misc_feature: MA Experiment 20000488 PARAMETER Experiment Name: Zm_50mM_NH4NO3_L_to_H_P Parameter: Timepoint (hr) Value: 8
  misc_feature: MA Experiment 20000488 PARAMETER Experiment Name: Zm_50mM_NH4NO3_L_to_H_P Parameter: Tissue Value: Leaves
  misc_feature: MA Experiment 20000488 PARAMETER Experiment Name: Zm_50mM_NH4NO3_L_to_H_P Parameter: Treatment Value: 50mM NH4NO3 vs. 100mM Mannitol
  misc_feature: MA Experiment ID: 20000534 Result: Up-regulated in Transcription
  misc_feature: MA Experiment 20000534 PARAMETER Experiment Name: Zm_Hybrid_Pollen_P Parameter: Age (day) Value: 8
  misc_feature: MA Experiment 20000534 PARAMETER Experiment Name: Zm_Hybrid_Pollen_P Parameter: Organism Value: Zea mays
  misc_feature: MA Experiment 20000534 PARAMETER Experiment Name: Zm_Hybrid_Pollen_P Parameter: Plant Line Value: 35A19
  misc_feature: MA Experiment 20000534 PARAMETER Experiment Name: Zm_Hybrid_Pollen_P Parameter: Tissue Value: Pollen vs. Aerial

SEQ ID NO: 15435 - protein, 351 aa, Zea mays subsp. mays; identical to SEQ ID NO: 14396
  peptide (1)..(351): Ceres Seq. ID no. 13623626
  misc_feature (15)..(300): Pfam Name: Uncharacterised protein family (Hly-III / UPF0073) Pfam Description: Uncharacterised protein family (Hly-III /
  misc_feature (15)..(300): Pfam Name: Uncharacterised protein family (Hly-III / UPF0073) Pfam Description: Uncharacterised protein family (Hly-III /
  misc_feature (1)..(300): Homolog of NCBI NO: 20330770 NR Description: Hypothetical protein [Oryza sativa (japonica
  misc_feature (48)..(351): Homolog of NCBI NO: 15235657 NR Description: expressed protein [Arabidopsis thaliana]
  misc_feature (48)..(340): Homolog of NCBI NO: 15233813 NR Description: expressed protein [Arabidopsis thaliana]
  misc_feature (153)..(335): Homolog of NCBI NO: 13272399 NR Description: hypothetical protein [Arabidopsis thaliana]
  misc_feature (153)..(335): Homolog of NCBI NO: 18400468 NR Description: expressed protein [Arabidopsis thaliana] unknown protein [Arabidopsis thaliana] expressed protein [Arabidopsis thaliana]
  misc_feature (48)..(351): Homolog of NCBI NO: 15235657 NR Description: expressed protein [Arabidopsis thaliana]
  misc_feature (153)..(335): Homolog of NCBI NO: 13272399 NR Description: hypothetical protein [Arabidopsis thaliana]
  misc_feature (1)..(44): Homolog of NCBI NO: 18377749 NR Description: unknown protein [Arabidopsis thaliana]
  misc_feature (153)..(346): Homolog of NCBI NO: 30688829 NR Description: expressed protein [Arabidopsis thaliana]
  misc_feature (153)..(346): Homolog of NCBI NO: 18377749 NR Description: unknown protein [Arabidopsis thaliana]
  misc_feature (1)..(44): Homolog of NCBI NO: 18400468 NR Description: expressed protein [Arabidopsis thaliana] unknown protein [Arabidopsis thaliana] expressed protein [Arabidopsis thaliana]
  misc_feature (1)..(44): Homolog of NCBI NO: 13272399 NR Description: hypothetical protein [Arabidopsis thaliana]
  misc_feature (153)..(335): Homolog of NCBI NO: 18400468 NR Description: expressed protein [Arabidopsis thaliana] unknown protein [Arabidopsis thaliana] expressed protein [Arabidopsis thaliana]
  misc_feature (48)..(340): Homolog of NCBI NO: 15233813 NR Description: expressed protein [Arabidopsis thaliana]
  misc_feature (1)..(300): Homolog of NCBI NO: 20330770 NR Description: Hypothetical protein [Oryza sativa (japonica
  misc_feature (1)..(44): Homolog of NCBI NO: 13272399 NR Description: hypothetical protein [Arabidopsis thaliana]
  misc_feature (1)..(44): Homolog of NCBI NO: 18400468 NR Description: expressed protein [Arabidopsis thaliana] unknown protein [Arabidopsis thaliana] expressed protein [Arabidopsis thaliana]
  misc_feature (153)..(346): Homolog of NCBI NO: 18377749 NR Description: unknown protein [Arabidopsis thaliana]
  misc_feature (153)..(346): Homolog of NCBI NO: 30688829 NR Description: expressed protein [Arabidopsis thaliana]
  misc_feature (1)..(44): Homolog of NCBI NO: 18377749 NR Description: unknown protein [Arabidopsis thaliana]

SEQ ID NO: 15436 - protein, 252 aa, Zea mays subsp. mays; identical to SEQ ID NO: 14397
  peptide (1)..(252): Ceres Seq. ID no. 13623627
  misc_feature (1)..(201): Pfam Name: Uncharacterised protein family (Hly-III / UPF0073) Pfam Description: Uncharacterised protein family (Hly-III /
  misc_feature (1)..(201): Pfam Name: Uncharacterised protein family (Hly-III / UPF0073) Pfam Description: Uncharacterised protein family (Hly-III /
  misc_feature (1)..(201): Homolog of NCBI NO: 20330770 NR Description: Hypothetical protein [Oryza sativa (japonica
  misc_feature (1)..(252): Homolog of NCBI NO: 15235657 NR Description: expressed protein [Arabidopsis thaliana]
  misc_feature (1)..(241): Homolog of NCBI NO: 15233813 NR Description: expressed protein [Arabidopsis thaliana]
  misc_feature (54)..(236): Homolog of NCBI NO: 13272399 NR Description: hypothetical protein [Arabidopsis thaliana]
  misc_feature (54)..(236): Homolog of NCBI NO: 18400468 NR Description: expressed protein [Arabidopsis thaliana] unknown protein [Arabidopsis thaliana] expressed protein [Arabidopsis thaliana]
  misc_feature (1)..(252): Homolog of NCBI NO: 15235657 NR Description: expressed protein [Arabidopsis thaliana]
  misc_feature (54)..(236): Homolog of NCBI NO: 13272399 NR Description: hypothetical protein [Arabidopsis thaliana]
  misc_feature (73)..(236): Homolog of NCBI NO: 25309925 NR Description: hypothetical protein At2g24150 [imported] -
  misc_feature (41)..(247): Homolog of NCBI NO: 25407688 NR Description: hypothetical protein AT4g30850 [imported] - thaliana >gi|2980781|emb|CAA18208.1| putative protein thaliana] >gi|7269986|emb|CAB79803.1| putative protein
  misc_feature (1)..(252): Homolog of NCBI NO: 15241302 NR Description: expressed protein [Arabidopsis thaliana] AT5g20270/F5O24_160 [Arabidopsis thaliana] unknown [Arabidopsis thaliana] >gi|23506109|gb|AAN28914.1|
  misc_feature (54)..(247): Homolog of NCBI NO: 30688829 NR Description: expressed protein [Arabidopsis thaliana]
  misc_feature (54)..(247): Homolog of NCBI NO: 18377749 NR Description: unknown protein [Arabidopsis thaliana]
  misc_feature (54)..(236): Homolog of NCBI NO: 18400468 NR Description: expressed protein [Arabidopsis thaliana] unknown protein [Arabidopsis thaliana] expressed protein [Arabidopsis thaliana]
  misc_feature (1)..(241): Homolog of NCBI NO: 15233813 NR Description: expressed protein [Arabidopsis thaliana]
  misc_feature (1)..(201): Homolog of NCBI NO: 20330770 NR Description: Hypothetical protein [Oryza sativa (japonica
  misc_feature (54)..(247): Homolog of NCBI NO: 18377749 NR Description: unknown protein [Arabidopsis thaliana]
  misc_feature (54)..(247): Homolog of NCBI NO: 30688829 NR Description: expressed protein [Arabidopsis thaliana]
  misc_feature (1)..(252): Homolog of NCBI NO: 15241302 NR Description: expressed protein [Arabidopsis thaliana] AT5g20270/F5O24_160 [Arabidopsis thaliana] unknown [Arabidopsis thaliana] >gi|23506109|gb|AAN28914.1|
  misc_feature (41)..(247): Homolog of NCBI NO: 25407688 NR Description: hypothetical protein AT4g30850 [imported] - thaliana >gi|2980781|emb|CAA18208.1| putative protein thaliana] >gi|7269986|emb|CAB79803.1| putative protein
  misc_feature (73)..(236): Homolog of NCBI NO: 25309925 NR Description: hypothetical protein At2g24150 [imported] -

SEQ ID NO: 15437 - protein, 215 aa, Zea mays subsp. mays; identical to SEQ ID NO: 14398
  peptide (1)..(215): Ceres Seq. ID no. 13623628
  misc_feature (1)..(164): Pfam Name: Uncharacterised protein family (Hly-III / UPF0073) Pfam Description: Uncharacterised protein family (Hly-III /
  misc_feature (1)..(164): Pfam Name: Uncharacterised protein family (Hly-III / UPF0073) Pfam Description: Uncharacterised protein family (Hly-III /
  misc_feature (1)..(164): Homolog of NCBI NO: 20330770 NR Description: Hypothetical protein [Oryza sativa (japonica
  misc_feature (1)..(215): Homolog of NCBI NO: 15235657 NR Description: expressed protein [Arabidopsis thaliana]
  misc_feature (1)..(204): Homolog of NCBI NO: 15233813 NR Description: expressed protein [Arabidopsis thaliana]
  misc_feature (17)..(199): Homolog of NCBI NO: 13272399 NR Description: hypothetical protein [Arabidopsis thaliana]
  misc_feature (17)..(199): Homolog of NCBI NO: 18400468 NR Description: expressed protein [Arabidopsis thaliana] unknown protein [Arabidopsis thaliana] expressed protein [Arabidopsis thaliana]
  misc_feature (17)..(210): Homolog of NCBI NO: 18377749 NR Description: unknown protein [Arabidopsis thaliana]
  misc_feature (17)..(210): Homolog of NCBI NO: 30688829 NR Description: expressed protein [Arabidopsis thaliana]
  misc_feature (1)..(215): Homolog of NCBI NO: 15241302 NR Description: expressed protein [Arabidopsis thaliana] AT5g20270/F5O24_160 [Arabidopsis thaliana] unknown [Arabidopsis thaliana] >gi|23506109|gb|AAN28914.1|
  misc_feature (4)..(210): Homolog of NCBI NO: 25407688 NR Description: hypothetical protein AT4g30850 [imported] - thaliana >gi|2980781|emb|CAA18208.1| putative protein thaliana] >gi|7269986|emb|CAB79803.1| putative protein
  misc_feature (36)..(199): Homolog of NCBI NO: 25309925 NR Description: hypothetical protein At2g24150 [imported] -
  misc_feature (17)..(199): Homolog of NCBI NO: 13272399 NR Description: hypothetical protein [Arabidopsis thaliana]
  misc_feature (17)..(199): Homolog of NCBI NO: 18400468 NR Description: expressed protein [Arabidopsis thaliana] unknown protein [Arabidopsis thaliana] expressed protein [Arabidopsis thaliana]
  misc_feature (17)..(210): Homolog of NCBI NO: 18377749 NR Description: unknown protein [Arabidopsis thaliana]
  misc_feature (17)..(210): Homolog of NCBI NO: 30688829 NR Description: expressed protein [Arabidopsis thaliana]
  misc_feature (1)..(215): Homolog of NCBI NO: 15241302 NR Description: expressed protein [Arabidopsis thaliana] AT5g20270/F5O24_160 [Arabidopsis thaliana] unknown [Arabidopsis thaliana] >gi|23506109|gb|AAN28914.1|
  misc_feature (4)..(210): Homolog of NCBI NO: 25407688 NR Description: hypothetical protein AT4g30850 [imported] - thaliana >gi|2980781|emb|CAA18208.1| putative protein thaliana] >gi|7269986|emb|CAB79803.1| putative protein
  misc_feature (1)..(204): Homolog of NCBI NO: 15233813 NR Description: expressed protein [Arabidopsis thaliana]
  misc_feature (1)..(215): Homolog of NCBI NO: 15235657 NR Description: expressed protein [Arabidopsis thaliana]
  misc_feature (1)..(164): Homolog of NCBI NO: 20330770 NR Description: Hypothetical protein [Oryza sativa (japonica
  misc_feature (36)..(199): Homolog of NCBI NO: 25309925 NR Description: hypothetical protein At2g24150 [imported] -

SEQ ID NO: 15438 - DNA, 1027 bp, Zea mays subsp. mays
  misc_feature (1)..(1027): Ceres Seq. ID no. 13600228
  misc_feature: MA Experiment ID: 108543 Result: Up-regulated in Transcription
  misc_feature: MA Experiment ID: 20000487 Result: Up-regulated in Transcription
  misc_feature: MA Experiment 20000487 PARAMETER Experiment Name: Zm_50mM_NH4NO3_L_to_H_P Parameter: Organism Value: Zea mays
  misc_feature: MA Experiment 20000487 PARAMETER Experiment Name: Zm_50mM_NH4NO3_L_to_H_P Parameter: Timepoint (hr) Value: 4
  misc_feature: MA Experiment 20000487 PARAMETER Experiment Name: Zm_50mM_NH4NO3_L_to_H_P Parameter: Tissue Value: Leaves
  misc_feature: MA Experiment 20000487 PARAMETER Experiment Name: Zm_50mM_NH4NO3_L_to_H_P Parameter: Treatment Value: 50mM NH4NO3 vs. 100mM Mannitol
  misc_feature: MA Experiment ID: 20000535 Result: Up-regulated in Transcription
  misc_feature: MA Experiment 20000535 PARAMETER Experiment Name: Zm_Hybrid_Seed_Dev_P Parameter: DAP Value: 30 vs. 12
  misc_feature: MA Experiment 20000535 PARAMETER Experiment Name: Zm_Hybrid_Seed_Dev_P Parameter: Organism Value: Zea mays
  misc_feature: MA Experiment 20000535 PARAMETER Experiment Name: Zm_Hybrid_Seed_Dev_P Parameter: Plant Line Value: 35A19
  misc_feature: MA Experiment 20000535 PARAMETER Experiment Name: Zm_Hybrid_Seed_Dev_P Parameter: Tissue Value: Embryo vs. Unfert Floret
  misc_feature: MA Experiment ID: 20000633 Result: Down-regulated in Transcription
  misc_feature: MA Experiment 20000633 PARAMETER Experiment Name: Zm_Herbicide-Treatments_P Parameter: Timepoint (hr) Value: 4
  misc_feature: MA Experiment 20000633 PARAMETER Experiment Name: Zm_Herbicide-Treatments_P Parameter: Tissue Value: Aerial
  misc_feature: MA Experiment 20000633 PARAMETER Experiment Name: Zm_Herbicide-Treatments_P Parameter: Treatment Value: Trimec vs. No Treatment
  misc_feature: MA Experiment ID: 20001613 Result: Up-regulated in Transcription
  misc_feature: MA Experiment 20001613 PARAMETER Experiment Name: Zm_50ppm_KNO3_L-to-H_P Parameter: Age (day) Value: 20
  misc_feature: MA Experiment 20001613 PARAMETER Experiment Name: Zm_50ppm_KNO3_L-to-H_P Parameter: Organism Value: Zea mays
  misc_feature: MA Experiment 20001613 PARAMETER Experiment Name: Zm_50ppm_KNO3_L-to-H_P Parameter: Plant Line Value: 35A19
  misc_feature: MA Experiment 20001613 PARAMETER Experiment Name: Zm_50ppm_KNO3_L-to-H_P Parameter: Timepoint (hr) Value: 24
  misc_feature: MA Experiment 20001613 PARAMETER Experiment Name: Zm_50ppm_KNO3_L-to-H_P Parameter: Tissue Value: Roots
  misc_feature: MA Experiment 20001613 PARAMETER Experiment Name: Zm_50ppm_KNO3_L-to-H_P Parameter: Treatment Value: 50ppm KNO3 vs. 50ppm KCl
gaccagatcgctacgagacgccgcgcgatcggacccaggccgacgccgacgacccctctcgccgccggcggccatggcgtacggcgaccgcgtcaccaccttcgaggactccgagaaggagagcgagtacggctatgtccgcaaggtctctggacctgtggttgtggctgatggaatgggtggtgctgccatgtatgaacttgttcgtgtcggacatgataacctcattggggaaattatccgtcttgagggcgattcagctacaatccaagtttatgaggaaacagctggactgatggttaatgaccctgtattgagaacaagaaagcctctttcagttgaattgggacctggaattcttggaaacatttttgacggtatccagcggcctctaaaaaccatcgctattaagtcaggagatgtgtatattcctcgtggtgtttcagttcctgcccttgacaaagatgtattgtgggaatttcagccaacgaagctaggtgttggagatgtcatcacaggtggagatctatacgctactgtttttgagaacacattgatgcagcaccatgttgctcttccaccgggttctatggggaaaataagttacattgcaccagctggccagtacaacctgcaggacacagtgctagaattggaatttcagggcataaaaaagaaatttaccatgcttcagacatggcctgtgcgttcaccaaggcctgttgcatcgaagcttgctgcggatacacctcttctgacagggcagcgtgtactggatgcactattcccctcggttctgggaggcacttgctgtattccaggagcatttggctgtggtaaaactgtcattagtcaggcactttccaagtactccaattccgaagctgtggtttatgtgggctgtggtgaacgaggaaacgagatggctgaggttctcatggactttccccagttgacaatgcaattcgctgatggccgtagagagtctgtcatgaaaagaacaacactggtggctaacacatcaaac

SEQ ID NO: 15439 - protein, 342 aa, Zea mays subsp. mays
  peptide (1)..(342): Ceres Seq. ID no. 13600229
  misc_feature (46)..(107): Pfam Name: ATP synthase alpha/beta family, beta-barrel domain Pfam Description: ATP synthase alpha/beta family, beta-barrel
  misc_feature (25)..(341): Homolog of NCBI NO: 11527563 NR Description: vacuolar proton-ATPase [Hordeum vulgare subsp.
  misc_feature (27)..(341): Homolog of NCBI NO: 137460 NR Description: Vacuolar ATP synthase catalytic subunit A
  misc_feature (27)..(341): Homolog of NCBI NO: 15982954 NR Description: V-ATPase catalytic subunit A [Prunus persica]
  misc_feature (27)..(341): Homolog of NCBI NO: 401322 NR Description: Vacuolar ATP synthase catalytic subunit A
  misc_feature (27)..(341): Homolog of NCBI NO: 2506211 NR Description: Vacuolar ATP synthase catalytic subunit A
  misc_feature (27)..(341): Homolog of NCBI NO: 3169287 NR Description: vacuolar H+-ATPase catalytic subunit [Gossypium
  misc_feature (27)..(341): Homolog of NCBI NO: 12585490 NR Description: Vacuolar ATP synthase catalytic subunit A
  misc_feature (27)..(341): Homolog of NCBI NO: 27884018 NR Description: vacuolar H+-ATPase A2 subunit isoform; V-ATPase
  misc_feature (28)..(341): Homolog of NCBI NO: 27883932 NR Description: vacuolar H+-ATPase A1 subunit isoform; V-ATPase
  misc_feature (27)..(341): Homolog of NCBI NO: 1929027 NR Description: BV-70/5 [Beta vulgaris]
TRSLRDAARSDPGRRRRPLSPPAAMAYGDRVTTFEDSEKESEYGYVRKVSGPVVVADGMGGAAMYELVRVGHDNLIGEIIRLEGDSATIQVYEETAGLMVNDPVLRTRKPLSVELGPGILGNIFDGIQRPLKTIAIKSGDVYIPRGVSVPALDKDVLWEFQPTKLGVGDVITGGDLYATVFENTLMQHHVALPPGSMGKISYIAPAGQYNLQDTVLELEFQGIKKKFTMLQTWPVRSPRPVASKLAADTPLLTGQRVLDALFPSVLGGTCCIPGAFGCGKTVISQALSKYSNSEAVVYVGCGERGNEMAEVLMDFPQLTMQFADGRRESVMKRTTLVANTSN

SEQ ID NO: 15440 - protein, 318 aa, Zea mays subsp. mays
  peptide (1)..(318): Ceres Seq. ID no. 13600230
  misc_feature (22)..(83): Pfam Name: ATP synthase alpha/beta family, beta-barrel domain Pfam Description: ATP synthase alpha/beta family, beta-barrel
  misc_feature (1)..(317): Homolog of NCBI NO: 11527563 NR Description: vacuolar proton-ATPase [Hordeum vulgare subsp.
  misc_feature (3)..(317): Homolog of NCBI NO: 137460 NR Description: Vacuolar ATP synthase catalytic subunit A
  misc_feature (3)..(317): Homolog of NCBI NO: 15982954 NR Description: V-ATPase catalytic subunit A [Prunus persica]
  misc_feature (3)..(317): Homolog of NCBI NO: 401322 NR Description: Vacuolar ATP synthase catalytic subunit A
  misc_feature (3)..(317): Homolog of NCBI NO: 2506211 NR Description: Vacuolar ATP synthase catalytic subunit A
  misc_feature (3)..(317): Homolog of NCBI NO: 3169287 NR Description: vacuolar H+-ATPase catalytic subunit [Gossypium
  misc_feature (3)..(317): Homolog of NCBI NO: 12585490 NR Description: Vacuolar ATP synthase catalytic subunit A
  misc_feature (3)..(317): Homolog of NCBI NO: 27884018 NR Description: vacuolar H+-ATPase A2 subunit isoform; V-ATPase
  misc_feature (4)..(317): Homolog of NCBI NO: 27883932 NR Description: vacuolar H+-ATPase A1 subunit isoform; V-ATPase
  misc_feature (3)..(317): Homolog of NCBI NO: 1929027 NR Description: BV-70/5 [Beta vulgaris]
MAYGDRVTTFEDSEKESEYGYVRKVSGPVVVADGMGGAAMYELVRVGHDNLIGEIIRLEGDSATIQVYEETAGLMVNDPVLRTRKPLSVELGPGILGNIFDGIQRPLKTIAIKSGDVYIPRGVSVPALDKDVLWEFQPTKLGVGDVITGGDLYATVFENTLMQHHVALPPGSMGKISYIAPAGQYNLQDTVLELEFQGIKKKFTMLQTWPVRSPRPVASKLAADTPLLTGQRVLDALFPSVLGGTCCIPGAFGCGKTVISQALSKYSNSEAVVYVGCGERGNEMAEVLMDFPQLTMQFADGRRESVMKRTTLVANTSN

SEQ ID NO: 15441 - protein, 284 aa, Zea mays subsp. mays
  peptide (1)..(284): Ceres Seq. ID no. 13600231
  misc_feature (1)..(49): Pfam Name: ATP synthase alpha/beta family, beta-barrel domain Pfam Description: ATP synthase alpha/beta family, beta-barrel
  misc_feature (1)..(283): Homolog of NCBI NO: 11527563 NR Description: vacuolar proton-ATPase [Hordeum vulgare subsp.
  misc_feature (1)..(283): Homolog of NCBI NO: 137460 NR Description: Vacuolar ATP synthase catalytic subunit A
  misc_feature (1)..(283): Homolog of NCBI NO: 15982954 NR Description: V-ATPase catalytic subunit A [Prunus persica]
  misc_feature (1)..(283): Homolog of NCBI NO: 401322 NR Description: Vacuolar ATP synthase catalytic subunit A
  misc_feature (1)..(283): Homolog of NCBI NO: 2506211 NR Description: Vacuolar ATP synthase catalytic subunit A
  misc_feature (1)..(283): Homolog of NCBI NO: 3169287 NR Description: vacuolar H+-ATPase catalytic subunit [Gossypium
  misc_feature (1)..(283): Homolog of NCBI NO: 12585490 NR Description: Vacuolar ATP synthase catalytic subunit A
  misc_feature (1)..(283): Homolog of NCBI NO: 27884018 NR Description: vacuolar H+-ATPase A2 subunit isoform; V-ATPase
  misc_feature (1)..(283): Homolog of NCBI NO: 27883932 NR Description: vacuolar H+-ATPase A1 subunit isoform; V-ATPase
  misc_feature (1)..(283): Homolog of NCBI NO: 1929027 NR Description: BV-70/5 [Beta vulgaris]
MGGAAMYELVRVGHDNLIGEIIRLEGDSATIQVYEETAGLMVNDPVLRTRKPLSVELGPGILGNIFDGIQRPLKTIAIKSGDVYIPRGVSVPALDKDVLWEFQPTKLGVGDVITGGDLYATVFENTLMQHHVALPPGSMGKISYIAPAGQYNLQDTVLELEFQGIKKKFTMLQTWPVRSPRPVASKLAADTPLLTGQRVLDALFPSVLGGTCCIPGAFGCGKTVISQALSKYSNSEAVVYVGCGERGNEMAEVLMDFPQLTMQFADGRRESVMKRTTLVANTSN

SEQ ID NO: 15442 - DNA, 1984 bp, Zea mays subsp. mays; identical to SEQ ID NO: 2138
  misc_feature (1)..(1984): Ceres Seq. ID no. 12595533
  misc_feature: MA Experiment ID: 108522 Result: Up-regulated in Transcription
  misc_feature: MA Experiment 108522 PARAMETER Experiment Name: Zm_42deg_Heat_P Parameter: Age (day) Value: 8
  misc_feature: MA Experiment 108522 PARAMETER Experiment Name: Zm_42deg_Heat_P Parameter: Organism Value: Zea mays
  misc_feature: MA Experiment 108522 PARAMETER Experiment Name: Zm_42deg_Heat_P Parameter: Plant Line Value: 35A19
  misc_feature: MA Experiment 108522 PARAMETER Experiment Name: Zm_42deg_Heat_P Parameter: Temperature (deg C) Value: 42 vs. 22
  misc_feature: MA Experiment 108522 PARAMETER Experiment Name: Zm_42deg_Heat_P Parameter: Timepoint (hr) Value: 1
  misc_feature: MA Experiment 108522 PARAMETER Experiment Name: Zm_42deg_Heat_P Parameter: Tissue Value: Aerial
  misc_feature: MA Experiment ID: 108527 Result: Down-regulated in Transcription
  misc_feature: MA Experiment 108527 PARAMETER Experiment Name: Zm_5mM_NO_P Parameter: Age (day) Value: 8
  misc_feature: MA Experiment 108527 PARAMETER Experiment Name: Zm_5mM_NO_P Parameter: Organism Value: Zea mays
  misc_feature: MA Experiment 108527 PARAMETER Experiment Name: Zm_5mM_NO_P Parameter: Plant Line Value: 35A19
  misc_feature: MA Experiment 108527 PARAMETER Experiment Name: Zm_5mM_NO_P Parameter: Timepoint (hr) Value: 6
  misc_feature: MA Experiment 108527 PARAMETER Experiment Name: Zm_5mM_NO_P Parameter: Tissue Value: Aerial
  misc_feature: MA Experiment 108527 PARAMETER Experiment Name: Zm_5mM_NO_P Parameter: Treatment Value: 5mM NO vs. No Treatment
  misc_feature: MA Experiment ID: 108528 Result: Up-regulated in Transcription
  misc_feature: MA Experiment 108528 PARAMETER Experiment Name: Zm_Imbibed_Seeds_P Parameter: Age (day) Value: 5 vs. 2
  misc_feature: MA Experiment 108528 PARAMETER Experiment Name: Zm_Imbibed_Seeds_P Parameter: Organism Value: Zea mays
  misc_feature: MA Experiment 108528 PARAMETER Experiment Name: Zm_Imbibed_Seeds_P Parameter: Plant Line Value: 35A19
  misc_feature: MA Experiment 108528 PARAMETER Experiment Name: Zm_Imbibed_Seeds_P Parameter: Tissue Value: Aerial vs. Embryo
  misc_feature: MA Experiment ID: 108529 Result: Down-regulated in Transcription
  misc_feature: MA Experiment 108529 PARAMETER Experiment Name: Zm_Imbibed_Seeds_P Parameter: Age (day) Value: 5 vs. 2
  misc_feature: MA Experiment 108529 PARAMETER Experiment Name: Zm_Imbibed_Seeds_P Parameter: Organism Value: Zea mays
  misc_feature: MA Experiment 108529 PARAMETER Experiment Name: Zm_Imbibed_Seeds_P Parameter: Plant Line Value: 35A19
  misc_feature: MA Experiment 108529 PARAMETER Experiment Name: Zm_Imbibed_Seeds_P Parameter: Tissue Value: Roots vs. Embryo
  misc_feature: MA Experiment ID: 108530 Result: Up-regulated in Transcription
  misc_feature: MA Experiment 108530 PARAMETER Experiment Name: Zm_Imbibed_Seeds_P Parameter: Age (day) Value: 6 vs. 2
  misc_feature: MA Experiment 108530 PARAMETER Experiment Name: Zm_Imbibed_Seeds_P Parameter: Organism Value: Zea mays
  misc_feature: MA Experiment 108530 PARAMETER Experiment Name: Zm_Imbibed_Seeds_P Parameter: Plant Line Value: 35A19
  misc_feature: MA Experiment 108530 PARAMETER Experiment Name: Zm_Imbibed_Seeds_P Parameter: Tissue Value: Aerial vs. Embryo
  misc_feature: MA Experiment ID: 108536 Result: Down-regulated in Transcription
  misc_feature: MA Experiment 108536 PARAMETER Experiment Name: Zm_Meristem_P Parameter: Age (day) Value: 8
  misc_feature: MA Experiment 108536 PARAMETER Experiment Name: Zm_Meristem_P Parameter: Organism Value: Zea mays
  misc_feature: MA Experiment 108536 PARAMETER Experiment Name: Zm_Meristem_P Parameter: Plant Line Value: 35A19
  misc_feature: MA Experiment 108536 PARAMETER Experiment Name: Zm_Meristem_P Parameter: Tissue Value: Shoot Meristem vs. Above Shoot Meristem
  misc_feature: MA Experiment ID: 108543 Result: Up-regulated in Transcription
  misc_feature: MA Experiment ID: 108545 Result: Up-regulated in Transcription
  misc_feature: MA Experiment 108545 PARAMETER Experiment Name: Zm_Imbibed_Seeds_P Parameter: Age (day) Value: 3 vs. 2
  misc_feature: MA Experiment 108545 PARAMETER Experiment Name: Zm_Imbibed_Seeds_P Parameter: Organism Value: Zea mays
  misc_feature: MA Experiment 108545 PARAMETER Experiment Name: Zm_Imbibed_Seeds_P Parameter: Plant Line Value: 35A19
  misc_feature: MA Experiment 108545 PARAMETER Experiment Name: Zm_Imbibed_Seeds_P Parameter: Tissue Value: Aerial vs. Embryo
  misc_feature: MA Experiment ID: 108546 Result: Down-regulated in Transcription
  misc_feature: MA Experiment 108546 PARAMETER Experiment Name: Zm_Imbibed_Seeds_P Parameter: Age (day) Value: 3 vs. 2
  misc_feature: MA Experiment 108546 PARAMETER Experiment Name: Zm_Imbibed_Seeds_P Parameter: Organism Value: Zea mays
  misc_feature: MA Experiment 108546 PARAMETER Experiment Name: Zm_Imbibed_Seeds_P Parameter: Plant Line Value: 35A19
  misc_feature: MA Experiment 108546 PARAMETER Experiment Name: Zm_Imbibed_Seeds_P Parameter: Tissue Value: Roots vs. Embryo
  misc_feature: MA Experiment ID: 108547 Result: Up-regulated in Transcription
  misc_feature: MA Experiment 108547 PARAMETER Experiment Name: Zm_Imbibed_Seeds_P Parameter: Age (day) Value: 4 vs. 2
  misc_feature: MA Experiment 108547 PARAMETER Experiment Name: Zm_Imbibed_Seeds_P Parameter: Organism Value: Zea mays
  misc_feature: MA Experiment 108547 PARAMETER Experiment Name: Zm_Imbibed_Seeds_P Parameter: Plant Line Value: 35A19
  misc_feature: MA Experiment 108547 PARAMETER Experiment Name: Zm_Imbibed_Seeds_P Parameter: Tissue Value: Aerial vs. Embryo
  misc_feature: MA Experiment ID: 108556 Result: Down-regulated in Transcription
  misc_feature: MA Experiment 108556 PARAMETER Experiment Name: Zm_Drought_P Parameter: Age (day) Value: 9
  misc_feature: MA Experiment 108556 PARAMETER Experiment Name: Zm_Drought_P Parameter: Organism Value: Zea mays
  misc_feature: MA Experiment 108556 PARAMETER Experiment Name: Zm_Drought_P Parameter: Plant Line Value: 35A19
  misc_feature: MA Experiment 108556 PARAMETER Experiment Name: Zm_Drought_P Parameter: Timepoint (hr) Value: 24
  misc_feature: MA Experiment 108556 PARAMETER Experiment Name: Zm_Drought_P Parameter: Tissue Value: Aerial
  misc_feature: MA Experiment 108556 PARAMETER Experiment Name: Zm_Drought_P Parameter: Treatment Value: Drought vs. No Drought
  misc_feature: MA Experiment ID: 108689 Result: Down-regulated in Transcription
  misc_feature: MA Experiment 108689 PARAMETER Experiment Name: Zm_Drought_Roots_P Parameter: Age (day) Value: 9
  misc_feature: MA Experiment 108689 PARAMETER Experiment Name: Zm_Drought_Roots_P Parameter: Organism Value: Zea mays
  misc_feature: MA Experiment 108689 PARAMETER Experiment Name: Zm_Drought_Roots_P Parameter: Plant Line Value: 35A19
  misc_feature: MA Experiment 108689 PARAMETER Experiment Name: Zm_Drought_Roots_P Parameter: Timepoint (hr) Value: 24
  misc_feature: MA Experiment 108689 PARAMETER Experiment Name: Zm_Drought_Roots_P Parameter: Tissue Value: Roots
  misc_feature: MA Experiment 108689 PARAMETER Experiment Name: Zm_Drought_Roots_P Parameter: Treatment Value: Drought vs. No Drought
  misc_feature: MA Experiment ID: 20000480 Result: Down-regulated in Transcription
  misc_feature: MA Experiment 20000480 PARAMETER Experiment Name: Zm_Drought_P Parameter: Age (day) Value: 11
  misc_feature: MA Experiment 20000480 PARAMETER Experiment Name: Zm_Drought_P Parameter: Organism Value: Zea mays
  misc_feature: MA Experiment 20000480 PARAMETER Experiment Name: Zm_Drought_P Parameter: Plant Line Value: 35A19
  misc_feature: MA Experiment 20000480 PARAMETER Experiment Name: Zm_Drought_P Parameter: Timepoint (hr) Value: 72
  misc_feature: MA Experiment 20000480 PARAMETER Experiment Name: Zm_Drought_P Parameter: Tissue Value: Aerial
  misc_feature: MA Experiment 20000480 PARAMETER Experiment Name: Zm_Drought_P Parameter: Treatment Value: Drought vs. No Drought
  misc_feature: MA Experiment ID: 20000626 Result: Down-regulated in Transcription
  misc_feature: MA Experiment 20000626 PARAMETER Experiment Name: Zm_Herbicide-Treatments_P Parameter: Timepoint (hr) Value: 12
  misc_feature: MA Experiment 20000626 PARAMETER Experiment Name: Zm_Herbicide-Treatments_P Parameter: Tissue Value: Aerial
  misc_feature: MA Experiment 20000626 PARAMETER Experiment Name: Zm_Herbicide-Treatments_P Parameter: Treatment Value: Roundup vs. No Treatment
  misc_feature: MA Experiment ID: 20001606 Result: Up-regulated in Transcription
  misc_feature: MA Experiment 20001606 PARAMETER Experiment Name: Zm_50ppm_KNO3_L-to-H_P Parameter: Age (day) Value: 19
  misc_feature: MA Experiment 20001606 PARAMETER Experiment Name: Zm_50ppm_KNO3_L-to-H_P Parameter: Organism Value: Zea mays
  misc_feature: MA Experiment 20001606 PARAMETER Experiment Name: Zm_50ppm_KNO3_L-to-H_P Parameter: Plant Line Value: 35A19
  misc_feature: MA Experiment 20001606 PARAMETER Experiment Name: Zm_50ppm_KNO3_L-to-H_P Parameter: Timepoint (hr) Value: 8
  misc_feature: MA Experiment 20001606 PARAMETER Experiment Name: Zm_50ppm_KNO3_L-to-H_P Parameter: Tissue Value: Shoots
  misc_feature: MA Experiment 20001606 PARAMETER Experiment Name: Zm_50ppm_KNO3_L-to-H_P Parameter: Treatment Value: 50ppm KNO3 vs. 50ppm KCl
  misc_feature: MA Experiment ID: 20001608 Result: Up-regulated in Transcription
  misc_feature: MA Experiment 20001608 PARAMETER Experiment Name: Zm_50ppm_KNO3_L-to-H_P Parameter: Age (day) Value: 21
  misc_feature: MA Experiment 20001608 PARAMETER Experiment Name: Zm_50ppm_KNO3_L-to-H_P Parameter: Organism Value: Zea mays
  misc_feature: MA Experiment 20001608 PARAMETER Experiment Name: Zm_50ppm_KNO3_L-to-H_P Parameter: Plant Line Value: 35A19
  misc_feature: MA Experiment 20001608 PARAMETER Experiment Name: Zm_50ppm_KNO3_L-to-H_P Parameter: Timepoint (hr) Value: 48
  misc_feature: MA Experiment 20001608 PARAMETER Experiment Name: Zm_50ppm_KNO3_L-to-H_P Parameter: Tissue Value: Shoots
  misc_feature: MA Experiment 20001608 PARAMETER Experiment Name: Zm_50ppm_KNO3_L-to-H_P Parameter: Treatment Value: 50ppm KNO3 vs. 50ppm KCl

SEQ ID NO: 15443 - protein, 598 aa, Zea mays subsp. mays; identical to SEQ ID NO: 2139
  peptide (1)..(598): Ceres Seq. ID no. 12595534
  misc_feature (79)..(582): Pfam Name: TCP-1/cpn60 chaperonin family Pfam Description: TCP-1/cpn60 chaperonin family
  misc_feature (57)..(598): Homolog of NCBI NO: 134102 NR Description: RuBisCO subunit binding-protein alpha subunit,
  misc_feature (54)..(598): Homolog of NCBI NO: 31193919 NR Description: putative rubisco subunit binding-protein alpha
  misc_feature (27)..(598): Homolog of NCBI NO: 1710807 NR Description: RuBisCO subunit binding-protein alpha subunit,
  misc_feature (52)..(596): Homolog of NCBI NO: 1351030 NR Description: RuBisCO subunit binding-protein alpha subunit,
  misc_feature (27)..(596): Homolog of NCBI NO: 15226314 NR Description: putative rubisco subunit binding-protein alpha protein id: At2g28000.1, supported by cDNA: 25773. [Arabidopsis
  misc_feature (27)..(596): Homolog of NCBI NO: 21554572 NR Description: putative rubisco subunit binding-protein alpha
  misc_feature (27)..(598): Homolog of NCBI NO: 3790441 NR Description: chaperonin 60 alpha subunit [Canavalia lineata]
  misc_feature (51)..(596): Homolog of NCBI NO: 99801 NR Description: chaperonine 60K alpha chain - rape (fragment)
  misc_feature (27)..(596): Homolog of NCBI NO: 464727 NR Description: RuBisCO subunit binding-protein alpha subunit,
  misc_feature (69)..(564): Homolog of NCBI NO: 5650721 NR Description: rubisco subunit binding-protein alpha subunit ( AA) (1 is 3rd base in codon) (1488 is 2nd base in codon) [Ricinus

SEQ ID NO: 15444 - protein, 572 aa, Zea mays subsp. mays; identical to SEQ ID NO: 2140
  peptide (1)..(572): Ceres Seq. ID no. 12595535
  misc_feature (53)..(556): Pfam Name: TCP-1/cpn60 chaperonin family Pfam Description: TCP-1/cpn60 chaperonin family
  misc_feature (31)..(572): Homolog of NCBI NO: 134102 NR Description: RuBisCO subunit binding-protein alpha subunit,
  misc_feature (28)..(572): Homolog of NCBI NO: 31193919 NR Description: putative rubisco subunit binding-protein alpha
  misc_feature (1)..(572): Homolog of NCBI NO: 1710807 NR Description: RuBisCO subunit binding-protein alpha subunit,
  misc_feature (26)..(570): Homolog of NCBI NO: 1351030 NR Description: RuBisCO subunit binding-protein alpha subunit,
  misc_feature (1)..(570): Homolog of NCBI NO: 15226314 NR Description: putative rubisco subunit binding-protein alpha protein id: At2g28000.1, supported by cDNA: 25773. [Arabidopsis
  misc_feature (1)..(570): Homolog of NCBI NO: 21554572 NR Description: putative rubisco subunit binding-protein alpha
  misc_feature (1)..(572): Homolog of NCBI NO: 3790441 NR Description: chaperonin 60 alpha subunit [Canavalia lineata]
  misc_feature (25)..(570): Homolog of NCBI NO: 99801 NR Description: chaperonine 60K alpha chain - rape (fragment)
  misc_feature (1)..(570): Homolog of NCBI NO: 464727 NR Description: RuBisCO subunit binding-protein alpha subunit,
  misc_feature (43)..(538): Homolog of NCBI NO: 5650721 NR Description: rubisco subunit binding-protein alpha subunit ( AA) (1 is 3rd base in codon) (1488 is 2nd base in codon) [Ricinus

SEQ ID NO: 15445 - protein, 478 aa, Zea mays subsp. mays; identical to SEQ ID NO: 2141
  peptide (1)..(478): Ceres Seq. ID no. 12595536
  misc_feature (1)..(462): Pfam Name: TCP-1/cpn60 chaperonin family Pfam Description: TCP-1/cpn60 chaperonin family
  misc_feature (1)..(476): Homolog of NCBI NO: 1351030 NR Description: RuBisCO subunit binding-protein alpha subunit,
  misc_feature (1)..(476): Homolog of NCBI NO: 15226314 NR Description: putative rubisco subunit binding-protein alpha protein id: At2g28000.1, supported by cDNA: 25773. [Arabidopsis
  misc_feature (1)..(476): Homolog of NCBI NO: 21554572 NR Description: putative rubisco subunit binding-protein alpha
  misc_feature (1)..(478): Homolog of NCBI NO: 3790441 NR Description: chaperonin 60 alpha subunit [Canavalia lineata]
  misc_feature (1)..(478): Homolog of NCBI NO: 31193919 NR Description: putative rubisco subunit binding-protein alpha
  misc_feature (1)..(478): Homolog of NCBI NO: 1710807 NR Description: RuBisCO subunit binding-protein alpha subunit,
  misc_feature (1)..(478): Homolog of NCBI NO: 134102 NR Description: RuBisCO subunit binding-protein alpha subunit,
  misc_feature (1)..(476): Homolog of NCBI NO: 99801 NR Description: chaperonine 60K alpha chain - rape (fragment)
  misc_feature (1)..(476): Homolog of NCBI NO: 464727 NR Description: RuBisCO subunit binding-protein alpha subunit,
  misc_feature (1)..(444): Homolog of NCBI NO: 5650721 NR Description: rubisco subunit binding-protein alpha subunit ( AA) (1 is 3rd base in codon) (1488 is 2nd base in codon) [Ricinus

SEQ ID NO: 15446 - DNA, 1129 bp, Zea mays subsp. mays
  misc_feature (1)..(1129): Ceres Seq. ID no. 13589476
  misc_feature: MA Experiment ID: 108522 Result: Up-regulated in Transcription
  misc_feature: MA Experiment 108522 PARAMETER Experiment Name: Zm_42deg_Heat_P Parameter: Age (day) Value: 8
  misc_feature: MA Experiment 108522 PARAMETER Experiment Name: Zm_42deg_Heat_P Parameter: Organism Value: Zea mays
  misc_feature: MA Experiment 108522 PARAMETER Experiment Name: Zm_42deg_Heat_P Parameter: Plant Line Value: 35A19
  misc_feature: MA Experiment 108522 PARAMETER Experiment Name: Zm_42deg_Heat_P Parameter: Temperature (deg C) Value: 42 vs. 22
  misc_feature: MA Experiment 108522 PARAMETER Experiment Name: Zm_42deg_Heat_P Parameter: Timepoint (hr) Value: 1
  misc_feature: MA Experiment 108522 PARAMETER Experiment Name: Zm_42deg_Heat_P Parameter: Tissue Value: Aerial
  misc_feature: MA Experiment ID: 108523 Result: Up-regulated in Transcription
  misc_feature: MA Experiment 108523 PARAMETER Experiment Name: Zm_42deg_Heat_P Parameter: Age (day) Value: 8
  misc_feature: MA Experiment 108523 PARAMETER Experiment Name: Zm_42deg_Heat_P Parameter: Organism Value: Zea mays
  misc_feature: MA Experiment 108523 PARAMETER Experiment Name: Zm_42deg_Heat_P Parameter: Plant Line Value: 35A19
  misc_feature: MA Experiment 108523 PARAMETER Experiment Name: Zm_42deg_Heat_P Parameter: Temperature (deg C) Value: 42 vs. 22
  misc_feature: MA Experiment 108523 PARAMETER Experiment Name: Zm_42deg_Heat_P Parameter: Timepoint (hr) Value: 6
  misc_feature: MA Experiment 108523 PARAMETER Experiment Name: Zm_42deg_Heat_P Parameter: Tissue Value: Aerial
ttctcgccgaacggaaaaccctgcccggaccttcgttgcagcgctacgagcttcgacgggccgctcgatctccacctctgaagtggctgcttgtgatctagatctgaaagctgcagtggttgacagctgagtgtgaaactgtgaatcgaagatgagcgtggtgggcttcgacctcggcaatgagagctgcatcgtggcggtcgcgcggcagcgcggcatcgacgtggtcctcaacgaggagtccaagcgcgagacacccgccatcgtctgcttcggggacaagcagcggttcatcggcaccgccggcgccgcgtcctctaccatgaaccccaagaactccatttctcagatcaagcgcttgctaggccgcaagtactccgaccccgagctacagagagatctcgcctccttcccgttccgtgtcacggagggccccgatggttttcccctggtccatgtacgatacctgggcgaggaacggacgttcacctctaccaagctgcttgccatggtgctgtccaatttgaagggcattgctgagggtaacctgaatgctgcagttgttgattgttgcattggtattccagtctactttacggatctgcagcgcagggctgttcttgatgctgctactattgcgggtctccagccattgcgattgttccatgagacaacagccactgcactggcatatggtatttataagactgatctcccggagaatgaccagttgaacgttgcatttgttgatgtcggtcatgcaagcatgcaggtcagtgttgtcggttacaagaagggacagctcaagatgttgtcgcatacgtatgaccagtctcttggcgggagggactttgatgaggccctgtttaagcactttgcagctaaattcaaagaggaatataagattgatgtgtaccagaatgcgcgtgcatgcattaggttgcgtgtggcatgtgagaaacttaagaaggtactgagcgccaacccagaggccccactgaacattgagtgtttgatggatgagaaggatgtgcggggttttattaaaagggaggagttcgaacagatcagtgcctcggtgctggaacgcgtgaaaggaccactggaaaaggccttggctgaagctggg

SEQ ID NO: 15447 - protein, 326 aa, Zea mays subsp. mays
  peptide (1)..(326): Ceres Seq. ID no. 13589477
  misc_feature (3)..(325): Pfam Name: Hsp70 protein Pfam Description: Hsp70 protein
  misc_feature (1)..(325): Homolog of NCBI NO: 34906196 NR Description: putative heat-shock protein [Oryza sativa
  misc_feature (1)..(325): Homolog of NCBI NO: 15220026 NR Description: putative heat-shock protein [Arabidopsis thaliana]
  misc_feature (1)..(325): Homolog of NCBI NO: 7450157 NR Description: heat shock protein 91 - Arabidopsis thaliana
  misc_feature (1)..(325): Homolog of NCBI NO: 17473863 NR Description: putative heat-shock protein [Arabidopsis thaliana]
  misc_feature (1)..(325): Homolog of NCBI NO: 30699467 NR Description: heat shock protein hsp70, putative [Arabidopsis
  misc_feature (1)..(325): Homolog of NCBI NO: 30699465 NR Description: heat shock protein hsp70, putative [Arabidopsis
  misc_feature (1)..(325): Homolog of NCBI NO: 15221072 NR Description: heat shock protein, putative [Arabidopsis
  misc_feature (1)..(325): Homolog of NCBI NO: 25326732 NR Description: hypothetical protein [imported] - Arabidopsis
  misc_feature (1)..(324): Homolog of NCBI NO: 2495362 NR Description: 97 KDA HEAT SHOCK PROTEIN (HEAT SHOCK PROTEIN >gi|1568627|gb|AAB09038.1| heat shock protein 110
  misc_feature (1)..(324): Homolog of NCBI NO: 1649012 NR Description: egg receptor for sperm [Strongylocentrotus
MSVVGFDLGNESCIVAVARQRGIDVVLNEESKRETPAIVCFGDKQRFIGTAGAASSTMNPKNSISQIKRLLGRKYSDPELQRDLASFPFRVTEGPDGFPLVHVRYLGEERTFTSTKLLAMVLSNLKGIAEGNLNAAVVDCCIGIPVYFTDLQRRAVLDAATIAGLQPLRLFHETTATALAYGIYKTDLPENDQLNVAFVDVGHASMQVSVVGYKKGQLKMLSHTYDQSLGGRDFDEALFKHFAAKFKEEYKIDVYQNARACIRLRVACEKLKKVLSANPEAPLNIECLMDEKDVRGFIKREEFEQISASVLERVKGPLEKALAEAG

SEQ ID NO: 15448 - protein, 269 aa, Zea mays subsp. mays
  peptide (1)..(269): Ceres Seq. ID no. 13589478
  misc_feature (1)..(268): Pfam Name: Hsp70 protein Pfam Description: Hsp70 protein
  misc_feature (1)..(268): Homolog of NCBI NO: 34906196 NR Description: putative heat-shock protein [Oryza sativa
  misc_feature (1)..(268): Homolog of NCBI NO: 15220026 NR Description: putative heat-shock protein [Arabidopsis thaliana]
  misc_feature (1)..(268): Homolog of NCBI NO: 7450157 NR Description: heat shock protein 91 - Arabidopsis thaliana
  misc_feature (1)..(268): Homolog of NCBI NO: 17473863 NR Description: putative heat-shock protein [Arabidopsis thaliana]
  misc_feature (1)..(268): Homolog of NCBI NO: 30699465 NR Description: heat shock protein hsp70, putative [Arabidopsis
  misc_feature (1)..(268): Homolog of NCBI NO: 30699467 NR Description: heat shock protein hsp70, putative [Arabidopsis
  misc_feature (1)..(268): Homolog of NCBI NO: 15221072 NR Description: heat shock protein, putative [Arabidopsis
  misc_feature (1)..(268): Homolog of NCBI NO: 25326732 NR Description: hypothetical protein [imported] - Arabidopsis
  misc_feature (1)..(267): Homolog of NCBI NO: 2495362 NR Description: 97 KDA HEAT SHOCK PROTEIN (HEAT SHOCK PROTEIN >gi|1568627|gb|AAB09038.1| heat shock protein 110
  misc_feature (1)..(267): Homolog of NCBI NO: 1649012 NR Description: egg receptor for sperm [Strongylocentrotus
MNPKNSISQIKRLLGRKYSDPELQRDLASFPFRVTEGPDGFPLVHVRYLGEERTFTSTKLLAMVLSNLKGIAEGNLNAAVVDCCIGIPVYFTDLQRRAVLDAATIAGLQPLRLFHETTATALAYGIYKTDLPENDQLNVAFVDVGHASMQVSVVGYKKGQLKMLSHTYDQSLGGRDFDEALFKHFAAKFKEEYKIDVYQNARACIRLRVACEKLKKVLSANPEAPLNIECLMDEKDVRGFIKREEFEQISASVLERVKGPLEKALAEAG

SEQ ID NO: 15449 - protein, 207 aa, Zea mays subsp. mays
  peptide (1)..(207): Ceres Seq. ID no. 13589479
  misc_feature (1)..(206): Pfam Name: Hsp70 protein Pfam Description: Hsp70 protein
  misc_feature (1)..(206): Homolog of NCBI NO: 34906196 NR Description: putative heat-shock protein [Oryza sativa
  misc_feature (1)..(206): Homolog of NCBI NO: 15220026 NR Description: putative heat-shock protein [Arabidopsis thaliana]
  misc_feature (1)..(206): Homolog of NCBI NO: 7450157 NR Description: heat shock protein 91 - Arabidopsis thaliana
  misc_feature (1)..(206): Homolog of NCBI NO: 17473863 NR Description: putative heat-shock protein [Arabidopsis thaliana]
  misc_feature (1)..(206): Homolog of NCBI NO: 30699467 NR Description: heat shock protein hsp70, putative [Arabidopsis
  misc_feature (1)..(206): Homolog of NCBI NO: 30699465 NR Description: heat shock protein hsp70, putative [Arabidopsis
  misc_feature (1)..(206): Homolog of NCBI NO: 15221072 NR Description: heat shock protein, putative [Arabidopsis
  misc_feature (1)..(206): Homolog of NCBI NO: 25326732 NR Description: hypothetical protein [imported] - Arabidopsis
  misc_feature (1)..(205): Homolog of NCBI NO: 2495362 NR Description: 97 KDA HEAT SHOCK PROTEIN (HEAT SHOCK PROTEIN >gi|1568627|gb|AAB09038.1| heat shock protein 110
  misc_feature (1)..(205): Homolog of NCBI NO: 1649012 NR Description: egg receptor for sperm [Strongylocentrotus
MVLSNLKGIAEGNLNAAVVDCCIGIPVYFTDLQRRAVLDAATIAGLQPLRLFHETTATALAYGIYKTDLPENDQLNVAFVDVGHASMQVSVVGYKKGQLKMLSHTYDQSLGGRDFDEALFKHFAAKFKEEYKIDVYQNARACIRLRVACEKLKKVLSANPEAPLNIECLMDEKDVRGFIKREEFEQISASVLERVKGPLEKALAEAG

SEQ ID NO: 15450 - DNA, 986 bp, Zea mays subsp. mays
  misc_feature (1)..(986): Ceres Seq. ID no. 13589517
  misc_feature: MA Experiment ID: 108523 Result: Up-regulated in Transcription
  misc_feature: MA Experiment 108523 PARAMETER Experiment Name: Zm_42deg_Heat_P Parameter: Age (day) Value: 8
  misc_feature: MA Experiment 108523 PARAMETER Experiment Name: Zm_42deg_Heat_P Parameter: Organism Value: Zea mays
  misc_feature: MA Experiment 108523 PARAMETER Experiment Name: Zm_42deg_Heat_P Parameter: Plant Line Value: 35A19
  misc_feature: MA Experiment 108523 PARAMETER Experiment Name: Zm_42deg_Heat_P Parameter: Temperature (deg C) Value: 42 vs. 22
  misc_feature: MA Experiment 108523 PARAMETER Experiment Name: Zm_42deg_Heat_P Parameter: Timepoint (hr) Value: 6
  misc_feature: MA Experiment 108523 PARAMETER Experiment Name: Zm_42deg_Heat_P Parameter: Tissue Value: Aerial
gaggccagggcggagtccgagccctggggtcgggcgaggcggagtttcgtcgtcttccgggtcttagcccgagtccgagccctggggtcgggcggagcggagttcgccgtcttccgggtcttagcccgagtccgagccctggggtcgggcggagcggagttcgccgtcttccgggtcttagcccgagtccgagccctggggtcgggcggagcggagttcgccgtcttccgggtcttagcccgagtccgagccctggggtcgggcggagcggagttcgccgtcttccgggtcttagcccgagtccgagccctggggtcgggcggagcggagttcgccgtcttccgggtcttagcccgagtccgagccctggggtcgggcggagcggagttcgccgtggcgcctctggcaaggcctgactgcctgtcagactcactctgtcgagtggcaccgcagtcggggtggcgcaggcggcgctgtccttctgtcagactggtcagtggagcggtggagtgacagcggtcacttcggctctgccgggggggcgcgtgtcaggataaaggtgtcaggccacctttgcgttaaatgctcctgcaacttggtcagtcggtgtggtgatttagtcagggttgcttctgagcgaagccaaggcctcgggcgagccggtgatgtgtccgccgtaaaaaggggggcctcgggcgagacggaagntctctcgaggtcggctgccttcggccgaggctaggctcgggtggaagngcgatcgagtcactcgtgtggactggatccctggacttaatcggtgcccatcaggcctttgcagcttttngcttnatgggggttaccaagctgagaaattangcngtcttggagggtacccctaattatggtccccgacagtagcccccgaagctcncaaggggagtggtagcactcgcttgggaggcttttgtcgcactttttttgcaaggggacagcccttttctccg

SEQ ID NO: 15451 - protein, 170 aa, Zea mays subsp. mays
  peptide (1)..(170): Ceres Seq. ID no. 13589518
EARAESEPWGRARRSFVVFRVLARVRALGSGGAEFAVFRVLARVRALGSGGAEFAVFRVLARVRALGSGGAEFAVFRVLARVRALGSGGAEFAVFRVLARVRALGSGGAEFAVFRVLARVRALGSGGAEFAVAPLARPDCLSDSLCRVAPQSGWRRRRCPSVRLVSGAVE

SEQ ID NO: 15452 - protein, 137 aa, Zea mays subsp. mays
  peptide (1)..(137): Ceres Seq. ID no. 13589519
  misc_feature (1)..(137): Homolog of NCBI NO: 40745634 NR Description: hypothetical protein AN1670.2 [Aspergillus
  misc_feature (4)..(137): Homolog of NCBI NO: 12644429 NR Description: Aggrecan core protein precursor proteoglycan core protein) (CSPCP) >gi|7534274|gb|AAB06238.2|
GQGGVRALGSGEAEFRRLPGLSPSPSPGVGRSGVRRLPGLSPSPSPGVGRSGVRRLPGLSPSPSPGVGRSGVRRLPGLSPSPSPGVGRSGVRRLPGLSPSPSPGVGRSGVRRLPGLSPSPSPGVGRSGVRRGASGKA

SEQ ID NO: 15453 - DNA, 606 bp, Zea mays subsp. mays
  misc_feature (1)..(606): Ceres Seq. ID no. 12594624
  misc_feature: MA Experiment ID: 108522 Result: Up-regulated in Transcription
  misc_feature: MA Experiment 108522 PARAMETER Experiment Name: Zm_42deg_Heat_P Parameter: Age (day) Value: 8
  misc_feature: MA Experiment 108522 PARAMETER Experiment Name: Zm_42deg_Heat_P Parameter: Organism Value: Zea mays
  misc_feature: MA Experiment 108522 PARAMETER Experiment Name: Zm_42deg_Heat_P Parameter: Plant Line Value: 35A19
  misc_feature: MA Experiment 108522 PARAMETER Experiment Name: Zm_42deg_Heat_P Parameter: Temperature (deg C) Value: 42 vs. 22
  misc_feature: MA Experiment 108522 PARAMETER Experiment Name: Zm_42deg_Heat_P Parameter: Timepoint (hr) Value: 1
  misc_feature: MA Experiment 108522 PARAMETER Experiment Name: Zm_42deg_Heat_P Parameter: Tissue Value: Aerial
  misc_feature: MA Experiment ID: 108527 Result: Down-regulated in Transcription
  misc_feature: MA Experiment 108527 PARAMETER Experiment Name: Zm_5mM_NO_P Parameter: Age (day) Value: 8
  misc_feature: MA Experiment 108527 PARAMETER Experiment Name: Zm_5mM_NO_P Parameter: Organism Value: Zea mays
  misc_feature: MA Experiment 108527 PARAMETER Experiment Name: Zm_5mM_NO_P Parameter: Plant Line Value: 35A19
  misc_feature: MA Experiment 108527 PARAMETER Experiment Name: Zm_5mM_NO_P Parameter: Timepoint (hr) Value: 6
  misc_feature: MA Experiment 108527 PARAMETER Experiment Name: Zm_5mM_NO_P Parameter: Tissue Value: Aerial
  misc_feature: MA Experiment 108527 PARAMETER Experiment Name: Zm_5mM_NO_P Parameter: Treatment Value: 5mM NO vs. No Treatment
  misc_feature: MA Experiment ID: 108543 Result: Up-regulated in Transcription
tttgccgtgtgctgcatctggggaagagctacgtacccatcagcctaaagcatctggggaagctgttgcatctcaagttcctagagatagtatacacgcctattgatgagctccctaaggaaattgggcatctgaggtctcttcagacactgatattagaccgtactggactagacgagctgccaccggttgtttgctcgcttacacggttgatgtgcctgatagcccaggggttcgaaaggttgccagctgacaggatggggaacctaacgtccctggaggagctacgactacgtagggtagttggccggagtgccacccaagccctagtggcagagcttggcaagctgacgaggttgagggtggtcgacatcaccttttcagagcagctagaggagagcttgcaagaagcattggtgcaatctctgtccaatctgcggggactccaggaactaacgcttttgtttaaaatgacacggtggggaagcgatatgtggggagactgggagccaccaaggcagctccggcgcctgattattgaaggcatcatcgtcttctcacgacagcctcgatggatcaaccgctcctgtctgccacgcctctgct

SEQ ID NO: 15454 - protein, 201 aa, Zea mays subsp. mays
  peptide (1)..(201): Ceres Seq. ID no. 12594625
  misc_feature (15)..(200): Homolog of NCBI NO: 34394780 NR Description: putative CC-NBS-LRR resistance protein MLA13
  misc_feature (15)..(200): Homolog of NCBI NO: 34904708 NR Description: P0446G09.19 [Oryza sativa (japonica
  misc_feature (2)..(197): Homolog of NCBI NO: 22208468 NR Description: putative stripe rust resistance protein Yr10/Mla1
  misc_feature (2)..(197): Homolog of NCBI NO: 22208504 NR Description: putative stripe rust resistance protein Yr10
  misc_feature (13)..(200): Homolog of NCBI NO: 34912398 NR Description: putative Mla1 [Oryza sativa (japonica
  misc_feature (14)..(200): Homolog of NCBI NO: 40253772 NR Description: putative RGH1A [Oryza sativa (japonica
  misc_feature (5)..(200): Homolog of NCBI NO: 40253763 NR Description: putative RGH1A [Oryza sativa (japonica
  misc_feature (5)..(197): Homolog of NCBI NO: 20513867 NR Description: RGH1A [Hordeum vulgare]
  misc_feature (7)..(175): Homolog of NCBI NO: 38532140 NR Description: Mal-like protein [Triticum aestivum]
  misc_feature (15)..(200): Homolog of NCBI NO: 22208466 NR Description: putative Mla1 [Sorghum bicolor]
CRVLHLGKSYVPISLKHLGKLLHLKFLEIVYTPIDELPKEIGHLRSLQTLILDRTGLDELPPVVCSLTRLMCLIAQGFERLPADRMGNLTSLEELRLRRVVGRSATQALVAELGKLTRLRVVDITFSEQLEESLQEALVQSLSNLRGLQELTLLFKMTRWGSDMWGDWEPPRQLRRLIIEGIIVFSRQPRWINRSCLPRLC

SEQ ID NO: 15455 - protein, 131 aa, Zea mays subsp. mays
  peptide (1)..(131): Ceres Seq. ID no. 12594626
  misc_feature (1)..(130): Homolog of NCBI NO: 34394780 NR Description: putative CC-NBS-LRR resistance protein MLA13
  misc_feature (1)..(130): Homolog of NCBI NO: 34904708 NR Description: P0446G09.19 [Oryza sativa (japonica
  misc_feature (1)..(127): Homolog of NCBI NO: 22208468 NR Description: putative stripe rust resistance protein Yr10/Mla1
  misc_feature (1)..(127): Homolog of NCBI NO: 22208504 NR Description: putative stripe rust resistance protein Yr10
  misc_feature (1)..(130): Homolog of NCBI NO: 34912398 NR Description: putative Mla1 [Oryza sativa (japonica
  misc_feature (1)..(130): Homolog of NCBI NO: 40253772 NR Description: putative RGH1A [Oryza sativa (japonica
  misc_feature (1)..(130): Homolog of NCBI NO: 40253763 NR Description: putative RGH1A [Oryza sativa (japonica
  misc_feature (1)..(127): Homolog of NCBI NO: 20513867 NR Description: RGH1A [Hordeum vulgare]
  misc_feature (1)..(105): Homolog of NCBI NO: 38532140 NR Description: Mal-like protein [Triticum aestivum]
  misc_feature (1)..(130): Homolog of NCBI NO: 22208466 NR Description: putative Mla1 [Sorghum bicolor]
MCLIAQGFERLPADRMGNLTSLEELRLRRVVGRSATQALVAELGKLTRLRVVDITFSEQLEESLQEALVQSLSNLRGLQELTLLFKMTRWGSDMWGDWEPPRQLRRLIIEGIIVFSRQPRWINRSCLPRLC

SEQ ID NO: 15456 - protein, 116 aa, Zea mays subsp. mays
  peptide (1)..(116): Ceres Seq. ID no. 12594627
  misc_feature (1)..(115): Homolog of NCBI NO: 34394780 NR Description: putative CC-NBS-LRR resistance protein MLA13
  misc_feature (1)..(115): Homolog of NCBI NO: 34904708 NR Description: P0446G09.19 [Oryza sativa (japonica
  misc_feature (1)..(112): Homolog of NCBI NO: 22208468 NR Description: putative stripe rust resistance protein Yr10/Mla1
  misc_feature (1)..(112): Homolog of NCBI NO: 22208504 NR Description: putative stripe rust resistance protein Yr10
  misc_feature (1)..(115): Homolog of NCBI NO: 34912398 NR Description: putative Mla1 [Oryza sativa (japonica
  misc_feature (1)..(115): Homolog of NCBI NO: 40253772 NR Description: putative RGH1A [Oryza sativa (japonica
  misc_feature (1)..(115): Homolog of NCBI NO: 40253763 NR Description: putative RGH1A [Oryza sativa (japonica
  misc_feature (1)..(112): Homolog of NCBI NO: 20513867 NR Description: RGH1A [Hordeum vulgare]
  misc_feature (1)..(90): Homolog of NCBI NO: 38532140 NR Description: Mal-like protein [Triticum aestivum]
  misc_feature (1)..(115): Homolog of NCBI NO: 22208466 NR Description: putative Mla1 [Sorghum bicolor]
MGNLTSLEELRLRRVVGRSATQALVAELGKLTRLRVVDITFSEQLEESLQEALVQSLSNLRGLQELTLLFKMTRWGSDMWGDWEPPRQLRRLIIEGIIVFSRQPRWINRSCLPRLC

SEQ ID NO: 15457 - DNA, 2388 bp, Zea mays subsp. mays
  misc_feature (1)..(2388): Ceres Seq. ID no. 13579684
  misc_feature: MA Experiment ID: 108527 Result: Down-regulated in Transcription
  misc_feature: MA Experiment 108527 PARAMETER Experiment Name: Zm_5mM_NO_P Parameter: Age (day) Value: 8
  misc_feature: MA Experiment 108527 PARAMETER Experiment Name: Zm_5mM_NO_P Parameter: Organism Value: Zea mays
  misc_feature: MA Experiment 108527 PARAMETER Experiment Name: Zm_5mM_NO_P Parameter: Plant Line Value: 35A19
  misc_feature: MA Experiment 108527 PARAMETER Experiment Name: Zm_5mM_NO_P Parameter: Timepoint (hr) Value: 6
  misc_feature: MA Experiment 108527 PARAMETER Experiment Name: Zm_5mM_NO_P Parameter: Tissue Value: Aerial
  misc_feature: MA Experiment 108527 PARAMETER Experiment Name: Zm_5mM_NO_P Parameter: Treatment Value: 5mM NO vs. No Treatment
  misc_feature: MA Experiment ID: 108532 Result: Down-regulated in Transcription
  misc_feature: MA Experiment 108532 PARAMETER Experiment Name: Zm_20uM_KNO3_H-to-L_P Parameter: Age (day) Value: 11
  misc_feature: MA Experiment 108532 PARAMETER Experiment Name: Zm_20uM_KNO3_H-to-L_P Parameter: Organism Value: Zea mays
  misc_feature: MA Experiment 108532 PARAMETER Experiment Name: Zm_20uM_KNO3_H-to-L_P Parameter: Plant Line Value: 35A19
  misc_feature: MA Experiment 108532 PARAMETER Experiment Name: Zm_20uM_KNO3_H-to-L_P Parameter: Timepoint (hr) Value: 16
  misc_feature: MA Experiment 108532 PARAMETER Experiment Name: Zm_20uM_KNO3_H-to-L_P Parameter: Tissue Value: Roots
  misc_feature: MA Experiment 108532 PARAMETER Experiment Name: Zm_20uM_KNO3_H-to-L_P Parameter: Treatment Value: 20uM KNO3 vs. 60mM KNO3
  misc_feature: MA Experiment ID: 108543 Result: Up-regulated in Transcription
  misc_feature: MA Experiment ID: 108544 Result: Up-regulated in Transcription
  misc_feature: MA Experiment ID: 108556 Result: Up-regulated in Transcription
  misc_feature: MA Experiment 108556 PARAMETER Experiment Name: Zm_Drought_P Parameter: Age (day) Value: 9
  misc_feature: MA Experiment 108556 PARAMETER Experiment Name: Zm_Drought_P Parameter: Organism Value: Zea mays
  misc_feature: MA Experiment 108556 PARAMETER Experiment Name: Zm_Drought_P Parameter: Plant Line Value: 35A19
  misc_feature: MA Experiment 108556 PARAMETER Experiment Name: Zm_Drought_P Parameter: Timepoint (hr) Value: 24
  misc_feature: MA Experiment 108556 PARAMETER Experiment Name: Zm_Drought_P Parameter: Tissue Value: Aerial
  misc_feature: MA Experiment 108556 PARAMETER Experiment Name: Zm_Drought_P Parameter: Treatment Value: Drought vs. No Drought
  misc_feature: MA Experiment ID: 108597 Result: Up-regulated in Transcription
  misc_feature: MA Experiment 108597 PARAMETER Experiment Name: Zm_100uM_ABA_P Parameter: Age (day) Value: 9
  misc_feature: MA Experiment 108597 PARAMETER Experiment Name: Zm_100uM_ABA_P Parameter: Organism Value: Zea mays
  misc_feature: MA Experiment 108597 PARAMETER Experiment Name: Zm_100uM_ABA_P Parameter: Plant Line Value: 35A19
  misc_feature: MA Experiment 108597 PARAMETER Experiment Name: Zm_100uM_ABA_P Parameter: Timepoint (hr) Value: 24
  misc_feature: MA Experiment 108597 PARAMETER Experiment Name: Zm_100uM_ABA_P Parameter: Tissue Value: Aerial
  misc_feature: MA Experiment 108597 PARAMETER Experiment Name: Zm_100uM_ABA_P Parameter: Treatment Value: 100uM ABA vs. No Treatment
  misc_feature: MA Experiment ID: 20000480 Result: Up-regulated in Transcription
  misc_feature: MA Experiment 20000480 PARAMETER Experiment Name: Zm_Drought_P Parameter: Age (day) Value: 11
  misc_feature: MA Experiment 20000480 PARAMETER Experiment Name: Zm_Drought_P Parameter: Organism Value: Zea mays
  misc_feature: MA Experiment 20000480 PARAMETER Experiment Name: Zm_Drought_P Parameter: Plant Line Value: 35A19
  misc_feature: MA Experiment 20000480 PARAMETER Experiment Name: Zm_Drought_P Parameter: Timepoint (hr) Value: 72
  misc_feature: MA Experiment 20000480 PARAMETER Experiment Name: Zm_Drought_P Parameter: Tissue Value: Aerial
  misc_feature: MA Experiment 20000480 PARAMETER Experiment Name: Zm_Drought_P Parameter: Treatment Value: Drought vs. No Drought
cggatttggaggagtcgaataaacaaggaaactcctcccggcccagaaagcacttcacttgcaacagtccccgtcagggagggagcattgctgtgcgggatggcgataaggaagagcggaggcggtggcggggtggggggtgtggcgcggcggctgctgcttctggcctgctgctgcatttggcctggtggacggatcttcactgctgcggacactgaccccaacgatcttaatgtcctcaatacgctcttcaccagtctgaattctcctgggcagctcagagcttggcgggcgaatggcggtgatccttgtggccagtcatggcagggcattacctgctcaggatcaggggtcactaaaatcctattaccaaacttgtcactcaccggaaatctggcctacaacatgaataacttgggttcattagttgagcttgacatgagccaaaataaccttggcggtggaggtcaaatacagtacaatcttcccaatatgaagcttgagaaactcaatcttgcaggaaatcaatttggtggaaatttaccctactcaatttcgacgatgcctaatcttaagtatttaaaccttaatcataaccaactacaaggaaacatcactgatgtattttccaacctttatagtttgtcagagctggatctctcctttaattctcttactggtgatctaccacaaagtttcactggattgtcaagcctgaaaagaatgtatttgcagaacaaccaatttactggttatatcaatgtcttagccaaccttccccttgaaaccctgaatgttggaaacaaccatttcactggttggattcccagtcagcttaagaagataaacaatctacagaccgacggaaattcttggagcacaggaccagcgccacctccacctccatatacagcgcctcctcctccaaaccattggaatggcgcgggtcagaatggtgatggttcatcaagttctggtggaagacctgggataggtggtggaggtgtagcaggaatcattatatcattgctgattgttggatcagttgttgcattttttctaatcaaaagaagaaaacacaaagctattatggaagaacaatttgaacagcatcagccgttcacttccttcccttcaaatgaagttaacgacatgaagcctatctatgagtccaccacagtagacatagagtctttggcttcacctgcttcgattaatctgaaaccacccccgaagatagaacagaacaaatcatttgatgatgatgatgatttttcaaacaagactgctgcaaatagaagtaatataacacctatgaaggcaactgtttattcagttgcagatctacagatggcaacagatagcttcagcttcgataaccttgttggagagggtacttttggacgtgtttacagggcacagttcaatggtggaaaggttctggccatcaagaaattagacattactgtgatgccatttcaatcgtctgatgactttgctgaactggtctcgaacatttcaaaattgcaccatccgaatctgaatgagcttgtaggctattgcatggaacatggccagcacttgcttgtgtatgatttccataggaatggatcgcttcatgatctacgccacctttcagatgagtacagcaaggcacttagctggaactctcgcatcaagttcgcactcggctctgcccgtgcactggagtaccttcatgaaatatgttctccatccatcatccataagaatttcaaggcatcaaatattttgctggactcagaattcaatccacacctttcagatactggacttgcaagcttcattcctggtgctgaattccaggcagcagaacaaagtgccggatacactgccccagaagtggacatgaccggtcagtacaccctcaagagtgatgtttacagctttggagttgtcatgcttgagctactgacaggacgtagaccatttgacagctctagacccaggtcagagcagtcacttgtgcggtgggcagcacctcagctgcatgacatcgatgcattggacagaatggtcgatcctgcactcaagggtctatacccagccaaatctctatcccgatttgctgatgtcctcgccctgtgtgtccagcctgaaccagaattcaggccaccaatgtcagaggtggtgcaagcattggttcgacttgtgcagagggccaacatgacgaagaggatgcttgatggaggagatacttctcgtggaccagatgatcaggaccaatatttcatatgacaagctgaactcgagcttttcagctacctctcagattgtatttatctcgtctcgttccactagcgcccggcagagacataatcacacaagtggaagagacagaactctgtc

SEQ ID NO: 15458 - protein, 758 aa, Zea mays subsp. mays
  peptide (1)..(758): Ceres Seq. ID no. 13579685
  misc_feature (52)..(758): Homolog of NCBI NO: 29367551 NR Description: putative leucine-rich repeat transmembrane
  misc_feature (151)..(483): Homolog of NCBI NO: 37533916 NR Description: putative leucine-rich repeat transmembrane
  misc_feature (479)..(758): Homolog of NCBI NO: 37533916 NR Description: putative leucine-rich repeat transmembrane
  misc_feature (67)..(754): Homolog of NCBI NO: 15220928 NR Description: leucine-rich repeat transmembrane protein kinase putative [Arabidopsis thaliana] >gi|25387064|pir||F96577
  misc_feature (50)..(752): Homolog of NCBI NO: 30683104 NR Description: leucine-rich repeat transmembrane protein kinase, [Arabidopsis thaliana] >gi|9279582|dbj|BAB01040.1|
  misc_feature (69)..(755): Homolog of NCBI NO: 34906746 NR Description: similar to leucine-rich repeat transmembrane
  misc_feature (52)..(345): Homolog of NCBI NO: 37533916 NR Description: putative leucine-rich repeat transmembrane
  misc_feature (94)..(451): Homolog of NCBI NO: 7489785 NR Description: leucine-rich repeat transmembrane protein kinase
  misc_feature (70)..(754): Homolog of NCBI NO: 15219262 NR Description: leucine-rich repeat transmembrane protein kinase,
  misc_feature (444)..(733): Homolog of NCBI NO: 34899766 NR Description: putative leucine-rich repeat transmembrane
RIWRSRINKETPPGPESTSLATVPVREGALLCGMAIRKSGGGGGVGGVARRLLLLACCCIWPGGRIFTAADTDPNDLNVLNTLFTSLNSPGQLRAWRANGGDPCGQSWQGITCSGSGVTKILLPNLSLTGNLAYNMNNLGSLVELDMSQNNLGGGGQIQYNLPNMKLEKLNLAGNQFGGNLPYSISTMPNLKYLNLNHNQLQGNITDVFSNLYSLSELDLSFNSLTGDLPQSFTGLSSLKRMYLQNNQFTGYINVLANLPLETLNVGNNHFTGWIPSQLKKINNLQTDGNSWSTGPAPPPPPYTAPPPPNHWNGAGQNGDGSSSSGGRPGIGGGGVAGIIISLLIVGSVVAFFLIKRRKHKAIMEEQFEQHQPFTSFPSNEVNDMKPIYESTTVDIESLASPASINLKPPPKIEQNKSFDDDDDFSNKTAANRSNITPMKATVYSVADLQMATDSFSFDNLVGEGTFGRVYRAQFNGGKVLAIKKLDITVMPFQSSDDFAELVSNISKLHHPNLNELVGYCMEHGQHLLVYDFHRNGSLHDLRHLSDEYSKALSWNSRIKFALGSARALEYLHEICSPSIIHKNFKASNILLDSEFNPHLSDTGLASFIPGAEFQAAEQSAGYTAPEVDMTGQYTLKSDVYSFGVVMLELLTGRRPFDSSRPRSEQSLVRWAAPQLHDIDALDRMVDPALKGLYPAKSLSRFADVLALCVQPEPEFRPPMSEVVQALVRLVQRANMTKRMLDGGDTSRGPDDQDQYFI

SEQ ID NO: 15459 - protein, 725 aa, Zea mays subsp. mays
  peptide (1)..(725): Ceres Seq. ID no. 13579686
  misc_feature (19)..(725): Homolog of NCBI NO: 29367551 NR Description: putative leucine-rich repeat transmembrane
  misc_feature (118)..(450): Homolog of NCBI NO: 37533916 NR Description: putative leucine-rich repeat transmembrane
  misc_feature (446)..(725): Homolog of NCBI NO: 37533916 NR Description: putative leucine-rich repeat transmembrane
  misc_feature (34)..(721): Homolog of NCBI NO: 15220928 NR Description: leucine-rich repeat transmembrane protein kinase putative [Arabidopsis thaliana] >gi|25387064|pir||F96577
  misc_feature (17)..(719): Homolog of NCBI NO: 30683104 NR Description: leucine-rich repeat transmembrane protein kinase, [Arabidopsis thaliana] >gi|9279582|dbj|BAB01040.1|
  misc_feature (36)..(722): Homolog of NCBI NO: 34906746 NR Description: similar to leucine-rich repeat transmembrane
  misc_feature (19)..(312): Homolog of NCBI NO: 37533916 NR Description: putative leucine-rich repeat transmembrane
  misc_feature (61)..(418): Homolog of NCBI NO: 7489785 NR Description: leucine-rich repeat transmembrane protein kinase
  misc_feature (37)..(721): Homolog of NCBI NO: 15219262 NR Description: leucine-rich repeat transmembrane protein kinase,
  misc_feature (411)..(700): Homolog of NCBI NO: 34899766 NR Description: putative leucine-rich repeat transmembrane
MAIRKSGGGGGVGGVARRLLLLACCCIWPGGRIFTAADTDPNDLNVLNTLFTSLNSPGQLRAWRANGGDPCGQSWQGITCSGSGVTKILLPNLSLTGNLAYNMNNLGSLVELDMSQNNLGGGGQIQYNLPNMKLEKLNLAGNQFGGNLPYSISTMPNLKYLNLNHNQLQGNITDVFSNLYSLSELDLSFNSLTGDLPQSFTGLSSLKRMYLQNNQFTGYINVLANLPLETLNVGNNHFTGWIPSQLKKINNLQTDGNSWSTGPAPPPPPYTAPPPPNHWNGAGQNGDGSSSSGGRPGIGGGGVAGIIISLLIVGSVVAFFLIKRRKHKAIMEEQFEQHQPFTSFPSNEVNDMKPIYESTTVDIESLASPASINLKPPPKIEQNKSFDDDDDFSNKTAANRSNITPMKATVYSVADLQMATDSFSFDNLVGEGTFGRVYRAQFNGGKVLAIKKLDITVMPFQSSDDFAELVSNISKLHHPNLNELVGYCMEHGQHLLVYDFHRNGSLHDLRHLSDEYSKALSWNSRIKFALGSARALEYLHEICSPSIIHKNFKASNILLDSEFNPHLSDTGLASFIPGAEFQAAEQSAGYTAPEVDMTGQYTLKSDVYSFGVVMLELLTGRRPFDSSRPRSEQSLVRWAAPQLHDIDALDRMVDPALKGLYPAKSLSRFADVLALCVQPEPEFRPPMSEVVQALVRLVQRANMTKRMLDGGDTSRGPDDQDQYFI

SEQ ID NO: 15460 - protein, 623 aa, Zea mays subsp. mays
  peptide (1)..(623): Ceres Seq. ID no. 13579687
  misc_feature (1)..(623): Homolog of NCBI NO: 29367551 NR Description: putative leucine-rich repeat transmembrane
  misc_feature (16)..(348): Homolog of NCBI NO: 37533916 NR Description: putative leucine-rich repeat transmembrane
  misc_feature (344)..(623): Homolog of NCBI NO: 37533916 NR Description: putative leucine-rich repeat transmembrane
  misc_feature (1)..(619): Homolog of NCBI NO: 15220928 NR Description: leucine-rich repeat transmembrane protein kinase putative [Arabidopsis thaliana] >gi|25387064|pir||F96577
  misc_feature (1)..(617): Homolog of NCBI NO: 30683104 NR Description: leucine-rich repeat transmembrane protein kinase, [Arabidopsis thaliana] >gi|9279582|dbj|BAB01040.1|
  misc_feature (1)..(620): Homolog of NCBI NO: 34906746 NR Description: similar to leucine-rich repeat transmembrane
  misc_feature (1)..(210): Homolog of NCBI NO: 37533916 NR Description: putative leucine-rich repeat transmembrane
  misc_feature (1)..(316): Homolog of NCBI NO: 7489785 NR Description: leucine-rich repeat transmembrane protein kinase
  misc_feature (1)..(619): Homolog of NCBI NO: 15219262 NR Description: leucine-rich repeat transmembrane protein kinase,
  misc_feature (309)..(598): Homolog of NCBI NO: 34899766 NR Description: putative leucine-rich repeat transmembrane
MNNLGSLVELDMSQNNLGGGGQIQYNLPNMKLEKLNLAGNQFGGNLPYSISTMPNLKYLNLNHNQLQGNITDVFSNLYSLSELDLSFNSLTGDLPQSFTGLSSLKRMYLQNNQFTGYINVLANLPLETLNVGNNHFTGWIPSQLKKINNLQTDGNSWSTGPAPPPPPYTAPPPPNHWNGAGQNGDGSSSSGGRPGIGGGGVAGIIISLLIVGSVVAFFLIKRRKHKAIMEEQFEQHQPFTSFPSNEVNDMKPIYESTTVDIESLASPASINLKPPPKIEQNKSFDDDDDFSNKTAANRSNITPMKATVYSVADLQMATDSFSFDNLVGEGTFGRVYRAQFNGGKVLAIKKLDITVMPFQSSDDFAELVSNISKLHHPNLNELVGYCMEHGQHLLVYDFHRNGSLHDLRHLSDEYSKALSWNSRIKFALGSARALEYLHEICSPSIIHKNFKASNILLDSEFNPHLSDTGLASFIPGAEFQAAEQSAGYTAPEVDMTGQYTLKSDVYSFGVVMLELLTGRRPFDSSRPRSEQSLVRWAAPQLHDIDALDRMVDPALKGLYPAKSLSRFADVLALCVQPEPEFRPPMSEVVQALVRLVQRANMTKRMLDGGDTSRGPDDQDQYFI

SEQ ID NO: 15461 - DNA, 487 bp, Zea mays subsp. mays
  misc_feature (1)..(487): Ceres Seq. ID no. 7117870
  misc_feature: MA Experiment ID: 108523 Result: Down-regulated in Transcription
  misc_feature: MA Experiment 108523 PARAMETER Experiment Name: Zm_42deg_Heat_P Parameter: Age (day) Value: 8
  misc_feature: MA Experiment 108523 PARAMETER Experiment Name: Zm_42deg_Heat_P Parameter: Organism Value: Zea mays
  misc_feature: MA Experiment 108523 PARAMETER Experiment Name: Zm_42deg_Heat_P Parameter: Plant Line Value: 35A19
  misc_feature: MA Experiment 108523 PARAMETER Experiment Name: Zm_42deg_Heat_P Parameter: Temperature (deg C) Value: 42 vs. 22
  misc_feature: MA Experiment 108523 PARAMETER Experiment Name: Zm_42deg_Heat_P Parameter: Timepoint (hr) Value: 6
  misc_feature: MA Experiment 108523 PARAMETER Experiment Name: Zm_42deg_Heat_P Parameter: Tissue Value: Aerial
  misc_feature: MA Experiment ID: 108527 Result: Down-regulated in Transcription
  misc_feature: MA Experiment 108527 PARAMETER Experiment Name: Zm_5mM_NO_P Parameter: Age (day) Value: 8
  misc_feature: MA Experiment 108527 PARAMETER Experiment Name: Zm_5mM_NO_P Parameter: Organism Value: Zea mays
  misc_feature: MA Experiment 108527 PARAMETER Experiment Name: Zm_5mM_NO_P Parameter: Plant Line Value: 35A19
  misc_feature: MA Experiment 108527 PARAMETER Experiment Name: Zm_5mM_NO_P Parameter: Timepoint (hr) Value: 6
  misc_feature: MA Experiment 108527 PARAMETER Experiment Name: Zm_5mM_NO_P Parameter: Tissue Value: Aerial
  misc_feature: MA Experiment 108527 PARAMETER Experiment Name: Zm_5mM_NO_P Parameter: Treatment Value: 5mM NO vs. No Treatment
  misc_feature: MA Experiment ID: 108544 Result: Up-regulated in Transcription
  misc_feature: MA Experiment ID: 108689 Result: Up-regulated in Transcription
  misc_feature: MA Experiment 108689 PARAMETER Experiment Name: Zm_Drought_Roots_P Parameter: Age (day) Value: 9
  misc_feature: MA Experiment 108689 PARAMETER Experiment Name: Zm_Drought_Roots_P Parameter: Organism Value: Zea mays
  misc_feature: MA Experiment 108689 PARAMETER Experiment Name: Zm_Drought_Roots_P Parameter: Plant Line Value: 35A19
  misc_feature: MA Experiment 108689 PARAMETER Experiment Name: Zm_Drought_Roots_P Parameter: Timepoint (hr) Value: 24
  misc_feature: MA Experiment 108689 PARAMETER Experiment Name: Zm_Drought_Roots_P Parameter: Tissue Value: Roots
  misc_feature: MA Experiment 108689 PARAMETER Experiment Name: Zm_Drought_Roots_P Parameter: Treatment Value: Drought vs. No Drought
aatctgattggggagaaaacaaaggctcaagatcgtattgctggtgcacacttctttagtcctgcgcatgtgatgccacttctggaaatagttcgtactcagcacacttcaccacaagttgttgttgacttgctggatgttgggaagaagattaaaaagacaccaatagtcgtcgggaactgtactggctttgcagttaataggatgttctttccatacactcaatcagcactcttttatgttgatcttgggtatggatgtttataagattgatcgtgcttgtaccaaatttggaatgcctatgggtcctttcagactggagaatctggtggggtttggggggggctggggccactggnatgcaataccttgaaaatttcccagagagggnctacaaatcaatgctacttcctctggatgatggaggacaatagggcaggngaagccacccnaaaaggattttacaagtatgagggcaagaggaaag

SEQ ID NO: 15462 - protein, 88 aa, Zea mays subsp. mays
  peptide (1)..(88): Ceres Seq. ID no. 7117871
  misc_feature (1)..(61): Pfam Name: 3-hydroxyacyl-CoA dehydrogenase, NAD binding domain Pfam Description: 3-hydroxyacyl-CoA dehydrogenase, NAD binding
  misc_feature (1)..(88): Homolog of NCBI NO: 34895142 NR Description: putative tetrafunctional protein of glyoxysomal
  misc_feature (1)..(88): Homolog of NCBI NO: 15231317 NR Description: fatty acid multifunctional protein (AtMFP2); id: At3g06860.1, supported by cDNA: gi_17065089, supported by gi_4337026 [Arabidopsis thaliana] >gi|4337027|gb|AAD18042.1| MFP2
  misc_feature (1)..(88): Homolog of NCBI NO: 39931684 NR Description: Peroxisomal fatty acid beta-oxidation
  misc_feature (1)..(88): Homolog of NCBI NO: 15235527 NR Description: AIM1 protein; protein id: At4g29010.1, supported cDNA: gi_16648890, supported by cDNA: gi_18175605, supported by gi_20465648 [Arabidopsis thaliana] >gi|7436974|pir||T08956 AIM1
  misc_feature (3)..(77): Homolog of NCBI NO: 23061608 NR Description: hypothetical protein [Pseudomonas fluorescens
  misc_feature (3)..(84): Homolog of NCBI NO: 22975280 NR Description: hypothetical protein [Ralstonia metallidurans]
  misc_feature (3)..(82): Homolog of NCBI NO: 15600381 NR Description: probable 3-hydroxyacyl-CoA dehydrogenase
  misc_feature (1)..(73): Homolog of NCBI NO: 23060657 NR Description: hypothetical protein [Pseudomonas fluorescens
  misc_feature (1)..(73): Homolog of NCBI NO: 15598210 NR Description: fatty-acid oxidation complex alpha-subunit
  misc_feature (1)..(73): Homolog of NCBI NO: 13310123 NR Description: FadB [Pseudomonas putida]
NLIGEKTKAQDRIAGAHFFSPAHVMPLLEIVRTQHTSPQVVVDLLDVGKKIKKTPIVVGNCTGFAVNRMFFPYTQSALFYVDLGYGCL

SEQ ID NO: 15463 - protein, 64 aa, Zea mays subsp. mays
  peptide (1)..(64): Ceres Seq. ID no. 7117872
  misc_feature (1)..(64): Homolog of NCBI NO: 34895142 NR Description: putative tetrafunctional protein of glyoxysomal
  misc_feature (1)..(64): Homolog of NCBI NO: 15231317 NR Description: fatty acid multifunctional protein (AtMFP2); id: At3g06860.1, supported by cDNA: gi_17065089, supported by gi_4337026 [Arabidopsis thaliana] >gi|4337027|gb|AAD18042.1| MFP2
  misc_feature (1)..(64): Homolog of NCBI NO: 39931684 NR Description: Peroxisomal fatty acid beta-oxidation
  misc_feature (1)..(64): Homolog of NCBI NO: 15235527 NR Description: AIM1 protein; protein id: At4g29010.1, supported cDNA: gi_16648890, supported by cDNA: gi_18175605, supported by gi_20465648 [Arabidopsis thaliana] >gi|7436974|pir||T08956 AIM1
  misc_feature (1)..(53): Homolog of NCBI NO: 23061608 NR Description: hypothetical protein [Pseudomonas fluorescens
  misc_feature (1)..(60): Homolog of NCBI NO: 22975280 NR Description: hypothetical protein [Ralstonia metallidurans]
  misc_feature (1)..(58): Homolog of NCBI NO: 15600381 NR Description: probable 3-hydroxyacyl-CoA dehydrogenase
  misc_feature (1)..(49): Homolog of NCBI NO: 23060657 NR Description: hypothetical protein [Pseudomonas fluorescens
  misc_feature (1)..(49): Homolog of NCBI NO: 15598210 NR Description: fatty-acid oxidation complex alpha-subunit
  misc_feature (1)..(49): Homolog of NCBI NO: 13310123 NR Description: FadB [Pseudomonas putida]
MPLLEIVRTQHTSPQVVVDLLDVGKKIKKTPIVVGNCTGFAVNRMFFPYTQSALFYVDLGYGCL

SEQ ID NO: 15464 - protein, 58 aa, Zea mays subsp. mays
  peptide (1)..(58): Ceres Seq. ID no. 7117873
  misc_feature (26)..(53): Homolog of NCBI NO: 34897626 NR Description: putative tetrafunctional protein for glyoxysomal
  misc_feature (26)..(53): Homolog of NCBI NO: 34922417 NR Description: Glyoxysomal fatty acid beta-oxidation
  misc_feature (26)..(53): Homolog of NCBI NO: 551444 NR Description: protein MFP-b [Cucumis sativus]
  misc_feature (26)..(53): Homolog of NCBI NO: 34922495 NR Description: Glyoxysomal fatty acid beta-oxidation
  misc_feature (34)..(34): Xaa is any aa, unknown or other
  misc_feature (45)..(45): Xaa is any aa, unknown or other
MFIRLIVLVPNLECLWVLSDWRIWWGLGGAGATXMQYLENFPERXYKSMLLPLDDGGQ

SEQ ID NO: 15465 - DNA, 1856 bp, Zea mays subsp. mays; identical to SEQ ID NO: 4052
  misc_feature (1)..(1856): Ceres Seq. ID no. 13635560
  misc_feature: MA Experiment ID: 108522 Result: Up-regulated in Transcription
  misc_feature: MA Experiment 108522 PARAMETER Experiment Name: Zm_42deg_Heat_P Parameter: Age (day) Value: 8
  misc_feature: MA Experiment 108522 PARAMETER Experiment Name: Zm_42deg_Heat_P Parameter: Organism Value: Zea mays
  misc_feature: MA Experiment 108522 PARAMETER Experiment Name: Zm_42deg_Heat_P Parameter: Plant Line Value: 35A19
  misc_feature: MA Experiment 108522 PARAMETER Experiment Name: Zm_42deg_Heat_P Parameter: Temperature (deg C) Value: 42 vs. 22
  misc_feature: MA Experiment 108522 PARAMETER Experiment Name: Zm_42deg_Heat_P Parameter: Timepoint (hr) Value: 1
  misc_feature: MA Experiment 108522 PARAMETER Experiment Name: Zm_42deg_Heat_P Parameter: Tissue Value: Aerial
  misc_feature: MA Experiment ID: 108523 Result: Up-regulated in Transcription
  misc_feature: MA Experiment 108523 PARAMETER Experiment Name: Zm_42deg_Heat_P Parameter: Age (day) Value: 8
  misc_feature: MA Experiment 108523 PARAMETER Experiment Name: Zm_42deg_Heat_P Parameter: Organism Value: Zea mays
  misc_feature: MA Experiment 108523 PARAMETER Experiment Name: Zm_42deg_Heat_P Parameter: Plant Line Value: 35A19
  misc_feature: MA Experiment 108523 PARAMETER Experiment Name: Zm_42deg_Heat_P Parameter: Temperature (deg C) Value: 42 vs. 22
  misc_feature: MA Experiment 108523 PARAMETER Experiment Name: Zm_42deg_Heat_P Parameter: Timepoint (hr) Value: 6
  misc_feature: MA Experiment 108523 PARAMETER Experiment Name: Zm_42deg_Heat_P Parameter: Tissue Value: Aerial
  misc_feature: MA Experiment ID: 108535 Result: Up-regulated in Transcription
  misc_feature: MA Experiment 108535 PARAMETER Experiment Name: Zm_Meristem_P Parameter: Age (day) Value: 8
  misc_feature: MA Experiment 108535 PARAMETER Experiment Name: Zm_Meristem_P Parameter: Organism Value: Zea mays
  misc_feature: MA Experiment 108535 PARAMETER Experiment Name: Zm_Meristem_P Parameter: Plant Line Value: 35A19
  misc_feature: MA Experiment 108535 PARAMETER Experiment Name: Zm_Meristem_P Parameter: Tissue Value: Root Meristem vs. Above Root Meristem
  misc_feature: MA Experiment ID: 108544 Result: Down-regulated in Transcription

SEQ ID NO: 15466 - protein, 549 aa, Zea mays subsp. mays; identical to SEQ ID NO: 4053
  peptide (1)..(549): Ceres Seq. ID no. 13635561
  misc_feature (25)..(381): Pfam Name: Calreticulin family Pfam Description: Calreticulin family
  misc_feature (1)..(531): Homolog of NCBI NO: 21740628 NR Description: OSJNBb0012E08.10 [Oryza sativa (japonica
  misc_feature (107)..(482): Homolog of NCBI NO: 7441503 NR Description: calnexin - maize (fragment)
  misc_feature (2)..(531): Homolog of NCBI NO: 3334138 NR Description: CALNEXIN HOMOLOG PRECURSOR
  misc_feature (7)..(533): Homolog of NCBI NO: 15240353 NR Description: calnexin 1 (CNX1) [Arabidopsis thaliana]
  misc_feature (6)..(533): Homolog of NCBI NO: 31321896 NR Description: putative papillar cell-specific calnexin
  misc_feature (2)..(531): Homolog of NCBI NO: 11131469 NR Description: Calnexin homolog precursor
  misc_feature (7)..(531): Homolog of NCBI NO: 15240773 NR Description: calnexin, putative [Arabidopsis thaliana]
  misc_feature (7)..(531): Homolog of NCBI NO: 473878 NR Description: calnexin homolog
  misc_feature (10)..(531): Homolog of NCBI NO: 11131766 NR Description: Calnexin homolog precursor
  misc_feature (24)..(535): Homolog of NCBI NO: 18564808 NR Description: calnexin [Aspergillus niger]
  misc_feature (496)..(496): Xaa is any aa, unknown or other

SEQ ID NO: 15467 - protein, 548 aa, Zea mays subsp. mays; identical to SEQ ID NO: 4054
  peptide (1)..(548): Ceres Seq. ID no. 13635562
  misc_feature (24)..(380): Pfam Name: Calreticulin family Pfam Description: Calreticulin family
  misc_feature (1)..(530): Homolog of NCBI NO: 3334138 NR Description: CALNEXIN HOMOLOG PRECURSOR
  misc_feature (6)..(532): Homolog of NCBI NO: 15240353 NR Description: calnexin 1 (CNX1) [Arabidopsis thaliana]
  misc_feature (5)..(532): Homolog of NCBI NO: 31321896 NR Description: putative papillar cell-specific calnexin
  misc_feature (1)..(530): Homolog of NCBI NO: 11131469 NR Description: Calnexin homolog precursor
  misc_feature (1)..(530): Homolog of NCBI NO: 21740628 NR Description: OSJNBb0012E08.10 [Oryza sativa (japonica
  misc_feature (106)..(481): Homolog of NCBI NO: 7441503 NR Description: calnexin - maize (fragment)
  misc_feature (6)..(530): Homolog of NCBI NO: 15240773 NR Description: calnexin, putative [Arabidopsis thaliana]
  misc_feature (6)..(530): Homolog of NCBI NO: 473878 NR Description: calnexin homolog
  misc_feature (9)..(530): Homolog of NCBI NO: 11131766 NR Description: Calnexin homolog precursor
  misc_feature (23)..(534): Homolog of NCBI NO: 18564808 NR Description: calnexin [Aspergillus niger]
  misc_feature (495)..(495): Xaa is any aa, unknown or other

SEQ ID NO: 15468 - protein, 418 aa, Zea mays subsp. mays; identical to SEQ ID NO: 4055
  peptide (1)..(418): Ceres Seq. ID no. 13635563
  misc_feature (1)..(250): Pfam Name: Calreticulin family Pfam Description: Calreticulin family
  misc_feature (1)..(400): Homolog of NCBI NO: 21740628 NR Description: OSJNBb0012E08.10 [Oryza sativa (japonica
  misc_feature (1)..(351): Homolog of NCBI NO: 7441503 NR Description: calnexin - maize (fragment)
  misc_feature (1)..(400): Homolog of NCBI NO: 3334138 NR Description: CALNEXIN HOMOLOG PRECURSOR
  misc_feature (1)..(402): Homolog of NCBI NO: 15240353 NR Description: calnexin 1 (CNX1) [Arabidopsis thaliana]
  misc_feature (1)..(402): Homolog of NCBI NO: 31321896 NR Description: putative papillar cell-specific calnexin
  misc_feature (1)..(400): Homolog of NCBI NO: 11131469 NR Description: Calnexin homolog precursor
  misc_feature (1)..(400): Homolog of NCBI NO: 15240773 NR Description: calnexin, putative [Arabidopsis thaliana]
  misc_feature (1)..(400): Homolog of NCBI NO: 473878 NR Description: calnexin homolog
  misc_feature (1)..(400): Homolog of NCBI NO: 11131766 NR Description: Calnexin homolog precursor
  misc_feature (1)..(404): Homolog of NCBI NO: 18564808 NR Description: calnexin [Aspergillus niger]
  misc_feature (365)..(365): Xaa is any aa, unknown or other

SEQ ID NO: 15469 - DNA, 767 bp, Zea mays subsp. mays
  misc_feature (1)..(767): Ceres Seq. ID no. 13635648
  misc_feature: MA Experiment ID: 108527 Result: Down-regulated in Transcription
  misc_feature: MA Experiment 108527 PARAMETER Experiment Name: Zm_5mM_NO_P Parameter: Age (day) Value: 8
  misc_feature: MA Experiment 108527 PARAMETER Experiment Name: Zm_5mM_NO_P Parameter: Organism Value: Zea mays
  misc_feature: MA Experiment 108527 PARAMETER Experiment Name: Zm_5mM_NO_P Parameter: Plant Line Value: 35A19
  misc_feature: MA Experiment 108527 PARAMETER Experiment Name: Zm_5mM_NO_P Parameter: Timepoint (hr) Value: 6
  misc_feature: MA Experiment 108527 PARAMETER Experiment Name: Zm_5mM_NO_P Parameter: Tissue Value: Aerial
  misc_feature: MA Experiment 108527 PARAMETER Experiment Name: Zm_5mM_NO_P Parameter: Treatment Value: 5mM NO vs. No Treatment
acggcccggggaagggtttcaccgactttgctgctgtgaggaaagagattgctgatgaaacagatcgcataactgggaaaactaaagctatttcaaacgttcccatccatttgagtatatattcaccacatgttgttaacttgacacttatcgatcttcctggactgacaaaggtcgctgtagaggggcaaccagaatctattgttcaagatattgaaaacatggttcgagcttatgttgacaagccaaattgcatcatcttggctatctccccagctaaccaagatattgcaacgtcagatgctatcaagcttgctagggatgttgatccttcaggtgacaggacttttggagtcttaacaaagcttgatttaatggacaagggtaccaatgctgttgatgtgcttgaagggaggcaatatcgcttacaacacccctgggttggaattgtcaatcgctcacaagctgatatcaacaagaatgtcgatatgctctcagcaagacgcaaagaaaaagagtactttgagagtagtcctgaatatggtcacttggcacataaaatgggtgcagagtatcttgccaagcttctgtcacagcatttagaggctgtgatcagggcaaaaattccaagtattatagctatgattaacaaaacaattgatgaaatagaagcccagttggatcgacttggtaggccaattggaggtgacgctggggctcagttgtacacaatcttggatatgtgtcgggcatttgaccgtgtcttt

SEQ ID NO: 15470 - protein, 255 aa, Zea mays subsp. mays
  peptide (1)..(255): Ceres Seq. ID no. 13635649
  misc_feature (131)..(254): Pfam Name: Dynamin central region Pfam Description: Dynamin central region
  misc_feature (2)..(254): Homolog of NCBI NO: 18071348 NR Description: putative GTP-binding protein [Oryza sativa
  misc_feature (2)..(254): Homolog of NCBI NO: 37536976 NR Description: putative phragmoplastin [Oryza sativa (japonica group)] >gi|18854996|gb|AAL79688.1| putative phragmoplastin sativa] >gi|31433579|gb|AAP55077.1| putative phragmoplastin
  misc_feature (2)..(254): Homolog of NCBI NO: 6651403 NR Description: dynamin-like protein 5 [Arabidopsis thaliana]
  misc_feature (2)..(254): Homolog of NCBI NO: 19569772 NR Description: dynamin-like protein C [Arabidopsis thaliana]
  misc_feature (2)..(254): Homolog of NCBI NO: 21537304 NR Description: dynamin, putative [Arabidopsis thaliana]
  misc_feature (2)..(254): Homolog of NCBI NO: 15223914 NR Description: dynamin -related [Arabidopsis thaliana]
  misc_feature (2)..(254): Homolog of NCBI NO: 11357275 NR Description: dynamin-like protein 4 (ADL4) - Arabidopsis
  misc_feature (2)..(254): Homolog of NCBI NO: 18411520 NR Description: dynamin-related protein 4 (ADL4) [Arabidopsis
  misc_feature (2)..(254): Homolog of NCBI NO: 6651401 NR Description: dynamin-like protein 4 [Arabidopsis thaliana]
  misc_feature (4)..(254): Homolog of NCBI NO: 7484944 NR Description: probable phragmoplastin At2g44590 [imported] - thaliana >gi|3341679|gb|AAC27461.1| putative phragmoplastin
GPGKGFTDFAAVRKEIADETDRITGKTKAISNVPIHLSIYSPHVVNLTLIDLPGLTKVAVEGQPESIVQDIENMVRAYVDKPNCIILAISPANQDIATSDAIKLARDVDPSGDRTFGVLTKLDLMDKGTNAVDVLEGRQYRLQHPWVGIVNRSQADINKNVDMLSARRKEKEYFESSPEYGHLAHKMGAEYLAKLLSQHLEAVIRAKIPSIIAMINKTIDEIEAQLDRLGRPIGGDAGAQLYTILDMCRAFDRVF

SEQ ID NO: 15471 - protein, 182 aa, Zea mays subsp. mays
  peptide (1)..(182): Ceres Seq. ID no. 13635650
  misc_feature (58)..(181): Pfam Name: Dynamin central region Pfam Description: Dynamin central region
  misc_feature (1)..(181): Homolog of NCBI NO: 18071348 NR Description: putative GTP-binding protein [Oryza sativa
  misc_feature (1)..(181): Homolog of NCBI NO: 37536976 NR Description: putative phragmoplastin [Oryza sativa (japonica group)] >gi|18854996|gb|AAL79688.1| putative phragmoplastin sativa] >gi|31433579|gb|AAP55077.1| putative phragmoplastin
  misc_feature (1)..(181): Homolog of NCBI NO: 6651403 NR Description: dynamin-like protein 5 [Arabidopsis thaliana]
  misc_feature (1)..(181): Homolog of NCBI NO: 19569772 NR Description: dynamin-like protein C [Arabidopsis thaliana]
  misc_feature (1)..(181): Homolog of NCBI NO: 21537304 NR Description: dynamin, putative [Arabidopsis thaliana]
  misc_feature (1)..(181): Homolog of NCBI NO: 15223914 NR Description: dynamin -related [Arabidopsis thaliana]
  misc_feature (1)..(181): Homolog of NCBI NO: 11357275 NR Description: dynamin-like protein 4 (ADL4) - Arabidopsis
  misc_feature (1)..(181): Homolog of NCBI NO: 18411520 NR Description: dynamin-related protein 4 (ADL4) [Arabidopsis
  misc_feature (1)..(181): Homolog of NCBI NO: 6651401 NR Description: dynamin-like protein 4 [Arabidopsis thaliana]
  misc_feature (1)..(181): Homolog of NCBI NO: 7484944 NR Description: probable phragmoplastin At2g44590 [imported] - thaliana >gi|3341679|gb|AAC27461.1| putative phragmoplastin
MVRAYVDKPNCIILAISPANQDIATSDAIKLARDVDPSGDRTFGVLTKLDLMDKGTNAVDVLEGRQYRLQHPWVGIVNRSQADINKNVDMLSARRKEKEYFESSPEYGHLAHKMGAEYLAKLLSQHLEAVIRAKIPSIIAMINKTIDEIEAQLDRLGRPIGGDAGAQLYTILDMCRAFDRVF

SEQ ID NO: 15472 - protein, 131 aa, Zea mays subsp. mays
  peptide (1)..(131): Ceres Seq. ID no. 13635651
  misc_feature (7)..(130): Pfam Name: Dynamin central region Pfam Description: Dynamin central region
  misc_feature (1)..(130): Homolog of NCBI NO: 18071348 NR Description: putative GTP-binding protein [Oryza sativa
  misc_feature (1)..(130): Homolog of NCBI NO: 37536976 NR Description: putative phragmoplastin [Oryza sativa (japonica group)] >gi|18854996|gb|AAL79688.1| putative phragmoplastin sativa] >gi|31433579|gb|AAP55077.1| putative phragmoplastin
  misc_feature (1)..(130): Homolog of NCBI NO: 6651403 NR Description: dynamin-like protein 5 [Arabidopsis thaliana]
  misc_feature (1)..(130): Homolog of NCBI NO: 21537304 NR Description: dynamin, putative [Arabidopsis thaliana]
  misc_feature (1)..(130): Homolog of NCBI NO: 19569772 NR Description: dynamin-like protein C [Arabidopsis thaliana]
  misc_feature (1)..(130): Homolog of NCBI NO: 15223914 NR Description: dynamin -related [Arabidopsis thaliana]
  misc_feature (1)..(130): Homolog of NCBI NO: 11357275 NR Description: dynamin-like protein 4 (ADL4) - Arabidopsis
  misc_feature (1)..(130): Homolog of NCBI NO: 18411520 NR Description: dynamin-related protein 4 (ADL4) [Arabidopsis
  misc_feature (1)..(130): Homolog of NCBI NO: 6651401 NR Description: dynamin-like protein 4 [Arabidopsis thaliana]
  misc_feature (1)..(130): Homolog of NCBI NO: 7484944 NR Description: probable phragmoplastin At2g44590 [imported] - thaliana >gi|3341679|gb|AAC27461.1| putative phragmoplastin
MDKGTNAVDVLEGRQYRLQHPWVGIVNRSQADINKNVDMLSARRKEKEYFESSPEYGHLAHKMGAEYLAKLLSQHLEAVIRAKIPSIIAMINKTIDEIEAQLDRLGRPIGGDAGAQLYTILDMCRAFDRVF

SEQ ID NO: 15473 - DNA, 936 bp, Zea mays subsp. mays
  misc_feature (1)..(936): Ceres Seq. ID no. 12636639
  misc_feature: MA Experiment ID: 108530 Result: Down-regulated in Transcription
  misc_feature: MA Experiment 108530 PARAMETER Experiment Name: Zm_Imbibed_Seeds_P Parameter: Age (day) Value: 6 vs. 2
  misc_feature: MA Experiment 108530 PARAMETER Experiment Name: Zm_Imbibed_Seeds_P Parameter: Organism Value: Zea mays
  misc_feature: MA Experiment 108530 PARAMETER Experiment Name: Zm_Imbibed_Seeds_P Parameter: Plant Line Value: 35A19
  misc_feature: MA Experiment 108530 PARAMETER Experiment Name: Zm_Imbibed_Seeds_P Parameter: Tissue Value: Aerial vs. Embryo
  misc_feature: MA Experiment ID: 108559 Result: Up-regulated in Transcription
  misc_feature: MA Experiment 108559 PARAMETER Experiment Name: Zm_5mM_NO_P Parameter: Age (day) Value: 8
  misc_feature: MA Experiment 108559 PARAMETER Experiment Name: Zm_5mM_NO_P Parameter: Organism Value: Zea mays
  misc_feature: MA Experiment 108559 PARAMETER Experiment Name: Zm_5mM_NO_P Parameter: Plant Line Value: 35A19
  misc_feature: MA Experiment 108559 PARAMETER Experiment Name: Zm_5mM_NO_P Parameter: Timepoint (hr) Value: 12
  misc_feature: MA Experiment 108559 PARAMETER Experiment Name: Zm_5mM_NO_P Parameter: Tissue Value: Aerial
  misc_feature: MA Experiment 108559 PARAMETER Experiment Name: Zm_5mM_NO_P Parameter: Treatment Value: 5mM NO vs. No Treatment
agagagagagagctcactagtccccccccccccccccgagcccatcaaggaggagttccccaccctctcctatgccgacttctaccagcttgccggagttgtggccgtcgaggtcaccggtgggcctgagatccccttccacccaggcagggaggacaagcctcagccgccacctgagggccgtcttcctgatgccaccaagggttctgaccacctgaggcaagtctttggcaagcagatgggtttgagtgatcaggacatcgttgccctctctggtggccacaccttgggaaggtgccacaaagagcggtctggttttgagggtgcctggactacgaaccctttggtctttgacaactcttacttcaaggaacttctgagtggtgacaaggagggccttcttcagctcccaagtgacaaagccctgctgagcgaccctgtcttccgccctcttgtggagaaatatgctgcagatgagaaggcattctttgatgactacaaagaggcccacctcaagctctccgaactggggtatgctgatgcttaaatggtccatatcctggagcgggacacaaactgctgcctgtatggactcgtgcgattcagggtgaaccatcagattgtctagtgtcttctctgtaataaatttatctgttcttggtactttgtctatggttgaatcggaacccattttccgtttgcctagattcttaatttctggtgctgtatccagctgaaactagtagatctatgatcttgtggctgcagcatgttcttgtcacttaccttttatctggtctccgttggttcggttcacaggttgtgtgctttaaaaggctgtgcttaagtcctgcaattcgagtccaccaaactgtagggtgcaagtcgagattttattagtgatgcaagttgctggtattggtgcattatcgggct

SEQ ID NO: 15474 - protein, 181 aa, Zea mays subsp. mays
  peptide (1)..(181): Ceres Seq. ID no. 12636640
  misc_feature (13)..(158): Pfam Name: Peroxidase Pfam Description: Peroxidase
  misc_feature (13)..(181): Homolog of NCBI NO: 3688398 NR Description: ascorbate peroxidase [Hordeum vulgare subsp.
  misc_feature (13)..(181): Homolog of NCBI NO: 7489542 NR Description: L-ascorbate peroxidase (EC 1.11.1.11) [validated] rice >gi|1321661|dbj|BAA08264.1| ascorbate peroxidase [Oryza >gi|27476069|gb|AAO17000.1| Putative ascorbate peroxidase [Oryza
  misc_feature (13)..(181): Homolog of NCBI NO: 18265379 NR Description: ascorbate peroxidase [Brassica oleracea]
  misc_feature (13)..(181): Homolog of NCBI NO: 1076800 NR Description: L-ascorbate peroxidase (EC 1.11.1.11), cytosolic - maize >gi|600116|emb|CAA84406.1| cytosolic ascorbate peroxidase
  misc_feature (13)..(181): Homolog of NCBI NO: 541927 NR Description: L-ascorbate peroxidase (EC 1.11.1.11) - radish
  misc_feature (13)..(180): Homolog of NCBI NO: 2997688 NR Description: ascorbate peroxidase [Zantedeschia aethiopica]
  misc_feature (13)..(181): Homolog of NCBI NO: 18265381 NR Description: ascorbate peroxidase [Brassica oleracea]
  misc_feature (13)..(181): Homolog of NCBI NO: 24421233 NR Description: ascorbate peroxidase [Brassica juncea]
  misc_feature (13)..(181): Homolog of NCBI NO: 28627542 NR Description: putative ascorbate peroxidase [Capsicum annuum]
  misc_feature (13)..(181): Homolog of NCBI NO: 1420938 NR Description: ascorbate peroxidase [Vigna unguiculata]
ERESSLVPPPPPEPIKEEFPTLSYADFYQLAGVVAVEVTGGPEIPFHPGREDKPQPPPEGRLPDATKGSDHLRQVFGKQMGLSDQDIVALSGGHTLGRCHKERSGFEGAWTTNPLVFDNSYFKELLSGDKEGLLQLPSDKALLSDPVFRPLVEKYAADEKAFFDDYKEAHLKLSELGYADA

SEQ ID NO: 15475 - protein, 102 aa, Zea mays subsp. mays
  peptide (1)..(102): Ceres Seq. ID no. 12636641
  misc_feature (1)..(79): Pfam Name: Peroxidase Pfam Description: Peroxidase
  misc_feature (1)..(102): Homolog of NCBI NO: 3688398 NR Description: ascorbate peroxidase [Hordeum vulgare subsp.
  misc_feature (1)..(102): Homolog of NCBI NO: 7489542 NR Description: L-ascorbate peroxidase (EC 1.11.1.11) [validated] rice >gi|1321661|dbj|BAA08264.1| ascorbate peroxidase [Oryza >gi|27476069|gb|AAO17000.1| Putative ascorbate peroxidase [Oryza
  misc_feature (1)..(102): Homolog of NCBI NO: 18265379 NR Description: ascorbate peroxidase [Brassica oleracea]
  misc_feature (1)..(102): Homolog of NCBI NO: 1076800 NR Description: L-ascorbate peroxidase (EC 1.11.1.11), cytosolic - maize >gi|600116|emb|CAA84406.1| cytosolic ascorbate peroxidase
  misc_feature (1)..(102): Homolog of NCBI NO: 541927 NR Description: L-ascorbate peroxidase (EC 1.11.1.11) - radish
  misc_feature (1)..(101): Homolog of NCBI NO: 2997688 NR Description: ascorbate peroxidase [Zantedeschia aethiopica]
  misc_feature (1)..(102): Homolog of NCBI NO: 18265381 NR Description: ascorbate peroxidase [Brassica oleracea]
  misc_feature (1)..(102): Homolog of NCBI NO: 28627542 NR Description: putative ascorbate peroxidase [Capsicum annuum]
  misc_feature (1)..(102): Homolog of NCBI NO: 24421233 NR Description: ascorbate peroxidase [Brassica juncea]
  misc_feature (1)..(102): Homolog of NCBI NO: 1420938 NR Description: ascorbate peroxidase [Vigna unguiculata]
MGLSDQDIVALSGGHTLGRCHKERSGFEGAWTTNPLVFDNSYFKELLSGDKEGLLQLPSDKALLSDPVFRPLVEKYAADEKAFFDDYKEAHLKLSELGYADA

SEQ ID NO: 15476 - DNA, 1709 bp, Zea mays subsp. mays
  misc_feature (1)..(1709): Ceres Seq. ID no. 13600415
  misc_feature: MA Experiment ID: 20000535 Result: Up-regulated in Transcription
  misc_feature: MA Experiment 20000535 PARAMETER Experiment Name: Zm_Hybrid_Seed_Dev_P Parameter: DAP Value: 30 vs. 12
  misc_feature: MA Experiment 20000535 PARAMETER Experiment Name: Zm_Hybrid_Seed_Dev_P Parameter: Organism Value: Zea mays
  misc_feature: MA Experiment 20000535 PARAMETER Experiment Name: Zm_Hybrid_Seed_Dev_P Parameter: Plant Line Value: 35A19
  misc_feature: MA Experiment 20000535 PARAMETER Experiment Name: Zm_Hybrid_Seed_Dev_P Parameter: Tissue Value: Embryo vs. Unfert Floret
gagctactactgttgaagcgattctcactaaaaccctcgaacacatcgcctttatctctttctctagatctactcgctatggctactatcaccgttgttaaggctagacagatcttcgacagtcgtggtaatcccaccgttgaggtggatatccacacgtcaaatggtgttaaggttacagcagctgttccaagtggagcttccactggtatctatgaggctcttgagctgagggatggaggatctgactaccttggaaagggtgtatctaaggctgttggcaatgtgaacaacatcatcgggccagcacttattggaaaggacccaactcagcagactgctattgacaacttcatggtccatgaacttgacggaacccaaaacgagtgggggtggtgcaagcaaaagcttggagccaatgcgattcttgctgtgtctcttgctgtctgcaaagctggggctgttgtcagcggcattcctctatacaagcacattgccaaccttgctggtaaccccaagattgtgctaccagttcctgccttcaacgtcatcaatggtggatcccatgccggaaacaagcttgctatgcaggagtttatgatcctccctgttggagctgcttctttcaaggaagccatgaagatgggtgtggaagtttaccaccacttgaagtctgtgattaagaagaagtacggccaggatgccacaaatgttggtgatgaaggtgggtttgcaccaaacattcaggagaacaaggagggtcttgaattgctcaagactgctatcgagaaggctggatacactggaaaggttgtcattggaatggatgttgccgcttcagagttctactcagaagacaagacctacgacttgaacttcaaagaagagaacaacaatggctctcagaagatttctggtgatgctctaaaggacctgtacaagtcctttgtcgctgagtacccaatcgtgtccattgaggacccatttgaccaagatgactgggagcactatgctaagatgaccactgagtgtggaaccgaggttcagattgtcggtgatgatttgttggtcactaaccccaagagagttgctaaggcaatcgccgagaagtcttgcaatgctcttcttttgaaggttaaccaaatcggatctgtaaccgagagtatcgaggcagttaagatgtcgaagaaagcaggttggggagtgatgaccagccacagaagtggtgaaaccgaggacacattcattgctgacttagccgttggcttgtctactggacaaatcaaaaccggtgctccttgcagatccgagcgtcttgccaagtacaaccagcttttgcgtattgaggaggagttgggatcagaggcaatttacgctggagtcaacttccgcaaacctgtagaaccctactaaatggagcttttagaagcaaagtggtcttctttgtgacgaggagaagatgacctgagtttgatcatttgctttaattaaataaaacgttctgtttttgtttcttctttgtttggtttcttacgtcttttgttgaaccctttttgggaaaagttactcatttttgtaagggaaacatgagaatgctctgcctttgtcgaggacggtagccccttatttcaatctaatttcggctttactcaaaaaaaaaaaaaaaaaaaactcgagggggggcccggtacccaattgttaaacacaat

SEQ ID NO: 15477 - protein, 470 aa, Zea mays subsp. mays
  peptide (1)..(470): Ceres Seq. ID no. 13600416
  misc_feature (173)..(467): Pfam Name: Enolase, C-terminal TIM barrel domain Pfam Description: Enolase, C-terminal TIM barrel domain
  misc_feature (27)..(470): Homolog of NCBI NO: 15227987 NR Description: enolase (2-phospho-D-glycerate hydroylase)
  misc_feature (27)..(470): Homolog of NCBI NO: 15809970 NR Description: At2g36530/F1O11.16 [Arabidopsis thaliana]
  misc_feature (27)..(470): Homolog of NCBI NO: 18175728 NR Description: putative enolase (2-phospho-D-glycerate
  misc_feature (27)..(470): Homolog of NCBI NO: 20260174 NR Description: enolase (2-phospho-D-glycerate hydroylase)
  misc_feature (27)..(470): Homolog of NCBI NO: 119354 NR Description: Enolase (2-phosphoglycerate dehydratase)
  misc_feature (27)..(470): Homolog of NCBI NO: 7436883 NR Description: phosphopyruvate hydratase (EC 4.2.1.11) - common
  misc_feature (29)..(470): Homolog of NCBI NO: 14423688 NR Description: Enolase 1 (2-phosphoglycerate dehydratase 1)
  misc_feature (29)..(470): Homolog of NCBI NO: 14423687 NR Description: Enolase 2 (2-phosphoglycerate dehydratase 2)
  misc_feature (27)..(470): Homolog of NCBI NO: 3023714 NR Description: Enolase (2-phosphoglycerate dehydratase)
  misc_feature (29)..(470): Homolog of NCBI NO: 1169534 NR Description: Enolase (2-phosphoglycerate dehydratase)
ELLLLKRFSLKPSNTSPLSLSLDLLAMATITVVKARQIFDSRGNPTVEVDIHTSNGVKVTAAVPSGASTGIYEALELRDGGSDYLGKGVSKAVGNVNNIIGPALIGKDPTQQTAIDNFMVHELDGTQNEWGWCKQKLGANAILAVSLAVCKAGAVVSGIPLYKHIANLAGNPKIVLPVPAFNVINGGSHAGNKLAMQEFMILPVGAASFKEAMKMGVEVYHHLKSVIKKKYGQDATNVGDEGGFAPNIQENKEGLELLKTAIEKAGYTGKVVIGMDVAASEFYSEDKTYDLNFKEENNNGSQKISGDALKDLYKSFVAEYPIVSIEDPFDQDDWEHYAKMTTECGTEVQIVGDDLLVTNPKRVAKAIAEKSCNALLLKVNQIGSVTESIEAVKMSKKAGWGVMTSHRSGETEDTFIADLAVGLSTGQIKTGAPCRSERLAKYNQLLRIEEELGSEAIYAGVNFRKPVEPY

SEQ ID NO: 15478 - protein, 444 aa, Zea mays subsp. mays
  peptide (1)..(444): Ceres Seq. ID no. 13600417
  misc_feature (147)..(441): Pfam Name: Enolase, C-terminal TIM barrel domain Pfam Description: Enolase, C-terminal TIM barrel domain
  misc_feature (1)..(444): Homolog of NCBI NO: 15227987 NR Description: enolase (2-phospho-D-glycerate hydroylase)
  misc_feature (1)..(444): Homolog of NCBI NO: 15809970 NR Description: At2g36530/F1O11.16 [Arabidopsis thaliana]
  misc_feature (1)..(444): Homolog of NCBI NO: 18175728 NR Description: putative enolase (2-phospho-D-glycerate
  misc_feature (1)..(444): Homolog of NCBI NO: 20260174 NR Description: enolase (2-phospho-D-glycerate hydroylase)
  misc_feature (1)..(444): Homolog of NCBI NO: 119354 NR Description: Enolase (2-phosphoglycerate dehydratase)
  misc_feature (1)..(444): Homolog of NCBI NO: 7436883 NR Description: phosphopyruvate hydratase (EC 4.2.1.11) - common
  misc_feature (3)..(444): Homolog of NCBI NO: 14423688 NR Description: Enolase 1 (2-phosphoglycerate dehydratase 1)
  misc_feature (3)..(444): Homolog of NCBI NO: 14423687 NR Description: Enolase 2 (2-phosphoglycerate dehydratase 2)
  misc_feature (1)..(444): Homolog of NCBI NO: 3023714 NR Description: Enolase (2-phosphoglycerate dehydratase)
  misc_feature (3)..(444): Homolog of NCBI NO: 1169534 NR Description: Enolase (2-phosphoglycerate dehydratase)
MATITVVKARQIFDSRGNPTVEVDIHTSNGVKVTAAVPSGASTGIYEALELRDGGSDYLGKGVSKAVGNVNNIIGPALIGKDPTQQTAIDNFMVHELDGTQNEWGWCKQKLGANAILAVSLAVCKAGAVVSGIPLYKHIANLAGNPKIVLPVPAFNVINGGSHAGNKLAMQEFMILPVGAASFKEAMKMGVEVYHHLKSVIKKKYGQDATNVGDEGGFAPNIQENKEGLELLKTAIEKAGYTGKVVIGMDVAASEFYSEDKTYDLNFKEENNNGSQKISGDALKDLYKSFVAEYPIVSIEDPFDQDDWEHYAKMTTECGTEVQIVGDDLLVTNPKRVAKAIAEKSCNALLLKVNQIGSVTESIEAVKMSKKAGWGVMTSHRSGETEDTFIADLAVGLSTGQIKTGAPCRSERLAKYNQLLRIEEELGSEAIYAGVNFRKPVEPY

SEQ ID NO: 15479 - protein, 352 aa, Zea mays subsp. mays
  peptide (1)..(352): Ceres Seq. ID no. 13600418
  misc_feature (55)..(349): Pfam Name: Enolase, C-terminal TIM barrel domain Pfam Description: Enolase, C-terminal TIM barrel domain
  misc_feature (1)..(352): Homolog of NCBI NO: 15227987 NR Description: enolase (2-phospho-D-glycerate hydroylase)
  misc_feature (1)..(352): Homolog of NCBI NO: 15809970 NR Description: At2g36530/F1O11.16 [Arabidopsis thaliana]
  misc_feature (1)..(352): Homolog of NCBI NO: 18175728 NR Description: putative enolase (2-phospho-D-glycerate
  misc_feature (1)..(352): Homolog of NCBI NO: 20260174 NR Description: enolase (2-phospho-D-glycerate hydroylase)
  misc_feature (1)..(352): Homolog of NCBI NO: 119354 NR Description: Enolase (2-phosphoglycerate dehydratase)
  misc_feature (1)..(352): Homolog of NCBI NO: 7436883 NR Description: phosphopyruvate hydratase (EC 4.2.1.11) - common
  misc_feature (1)..(352): Homolog of NCBI NO: 14423688 NR Description: Enolase 1 (2-phosphoglycerate dehydratase 1)
  misc_feature (1)..(352): Homolog of NCBI NO: 14423687 NR Description: Enolase 2 (2-phosphoglycerate dehydratase 2)
  misc_feature (1)..(352): Homolog of NCBI NO: 3023714 NR Description: Enolase (2-phosphoglycerate dehydratase)
  misc_feature (1)..(352): Homolog of NCBI NO: 1169534 NR Description: Enolase (2-phosphoglycerate dehydratase)
MVHELDGTQNEWGWCKQKLGANAILAVSLAVCKAGAVVSGIPLYKHIANLAGNPKIVLPVPAFNVINGGSHAGNKLAMQEFMILPVGAASFKEAMKMGVEVYHHLKSVIKKKYGQDATNVGDEGGFAPNIQENKEGLELLKTAIEKAGYTGKVVIGMDVAASEFYSEDKTYDLNFKEENNNGSQKISGDALKDLYKSFVAEYPIVSIEDPFDQDDWEHYAKMTTECGTEVQIVGDDLLVTNPKRVAKAIAEKSCNALLLKVNQIGSVTESIEAVKMSKKAGWGVMTSHRSGETEDTFIADLAVGLSTGQIKTGAPCRSERLAKYNQLLRIEEELGSEAIYAGVNFRKPVEPY

SEQ ID NO: 15480 - DNA, 470 bp, Zea mays subsp. mays
  misc_feature (1)..(470): Ceres Seq. ID no. 7118147
  misc_feature: MA Experiment ID: 108523 Result: Up-regulated in Transcription
  misc_feature: MA Experiment 108523 PARAMETER Experiment Name: Zm_42deg_Heat_P Parameter: Age (day) Value: 8
  misc_feature: MA Experiment 108523 PARAMETER Experiment Name: Zm_42deg_Heat_P Parameter: Organism Value: Zea mays
  misc_feature: MA Experiment 108523 PARAMETER Experiment Name: Zm_42deg_Heat_P Parameter: Plant Line Value: 35A19
  misc_feature: MA Experiment 108523 PARAMETER Experiment Name: Zm_42deg_Heat_P Parameter: Temperature (deg C) Value: 42 vs. 22
  misc_feature: MA Experiment 108523 PARAMETER Experiment Name: Zm_42deg_Heat_P Parameter: Timepoint (hr) Value: 6
  misc_feature: MA Experiment 108523 PARAMETER Experiment Name: Zm_42deg_Heat_P Parameter: Tissue Value: Aerial
  misc_feature: MA Experiment ID: 108530 Result: Down-regulated in Transcription
  misc_feature: MA Experiment 108530 PARAMETER Experiment Name: Zm_Imbibed_Seeds_P Parameter: Age (day) Value: 6 vs. 2
  misc_feature: MA Experiment 108530 PARAMETER Experiment Name: Zm_Imbibed_Seeds_P Parameter: Organism Value: Zea mays
  misc_feature: MA Experiment 108530 PARAMETER Experiment Name: Zm_Imbibed_Seeds_P Parameter: Plant Line Value: 35A19
  misc_feature: MA Experiment 108530 PARAMETER Experiment Name: Zm_Imbibed_Seeds_P Parameter: Tissue Value: Aerial vs. Embryo
  misc_feature: MA Experiment ID: 108559 Result: Up-regulated in Transcription
  misc_feature: MA Experiment 108559 PARAMETER Experiment Name: Zm_5mM_NO_P Parameter: Age (day) Value: 8
  misc_feature: MA Experiment 108559 PARAMETER Experiment Name: Zm_5mM_NO_P Parameter: Organism Value: Zea mays
  misc_feature: MA Experiment 108559 PARAMETER Experiment Name: Zm_5mM_NO_P Parameter: Plant Line Value: 35A19
  misc_feature: MA Experiment 108559 PARAMETER Experiment Name: Zm_5mM_NO_P Parameter: Timepoint (hr) Value: 12
  misc_feature: MA Experiment 108559 PARAMETER Experiment Name: Zm_5mM_NO_P Parameter: Tissue Value: Aerial
  misc_feature: MA Experiment 108559 PARAMETER Experiment Name: Zm_5mM_NO_P Parameter: Treatment Value: 5mM NO vs. No Treatment
  misc_feature: MA Experiment ID: 108597 Result: Up-regulated in Transcription
  misc_feature: MA Experiment 108597 PARAMETER Experiment Name: Zm_100uM_ABA_P Parameter: Age (day) Value: 9
  misc_feature: MA Experiment 108597 PARAMETER Experiment Name: Zm_100uM_ABA_P Parameter: Organism Value: Zea mays
  misc_feature: MA Experiment 108597 PARAMETER Experiment Name: Zm_100uM_ABA_P Parameter: Plant Line Value: 35A19
  misc_feature: MA Experiment 108597 PARAMETER Experiment Name: Zm_100uM_ABA_P Parameter: Timepoint (hr) Value: 24
  misc_feature: MA Experiment 108597 PARAMETER Experiment Name: Zm_100uM_ABA_P Parameter: Tissue Value: Aerial
  misc_feature: MA Experiment 108597 PARAMETER Experiment Name: Zm_100uM_ABA_P Parameter: Treatment Value: 100uM ABA vs. No Treatment
  misc_feature: MA Experiment ID: 20000535 Result: Up-regulated in Transcription
  misc_feature: MA Experiment 20000535 PARAMETER Experiment Name: Zm_Hybrid_Seed_Dev_P Parameter: DAP Value: 30 vs. 12
  misc_feature: MA Experiment 20000535 PARAMETER Experiment Name: Zm_Hybrid_Seed_Dev_P Parameter: Organism Value: Zea mays
  misc_feature: MA Experiment 20000535 PARAMETER Experiment Name: Zm_Hybrid_Seed_Dev_P Parameter: Plant Line Value: 35A19
  misc_feature: MA Experiment 20000535 PARAMETER Experiment Name: Zm_Hybrid_Seed_Dev_P Parameter: Tissue Value: Embryo vs. Unfert Floret
aactgagcctaagaaaaagaccaaaactgttattgagaagtattgggattgggagctttcaaatgagacacaacctatttggcttcggaaccccaaagaggtttcaactgaggaatacaatgattttttcaagaaaaccttcaatgagtacttgggccctttggcatcatcacacttcactacagagggtgaggtagaatttaggtcaattctttttgttcctgctacaaggaaaggaagatgtaactgctgatagtaggaagaccaagaatatcagactatatgttaagcgtgtattcatatcagatgactttgatggagaattgttcccaagatatttgagttttgtggaaggggtgttgttgactcaaatgaccttccattgaatgtttctcgtgagattccttcaagaaaagtcgaattgttcgtataaatgagaaaaaggctgggtgcggaaagcctttgatatg

SEQ ID NO: 15481 - protein, 83 aa, Zea mays subsp. mays
  peptide (1)..(83): Ceres Seq. ID no. 7118148
  misc_feature (1)..(74): Pfam Name: Hsp90 protein Pfam Description: Hsp90 protein
  misc_feature (1)..(74): Homolog of NCBI NO: 15231505 NR Description: putative heat-shock protein; protein id:
  misc_feature (2)..(74): Homolog of NCBI NO: 15228059 NR Description: putative heat shock protein; protein id: supported by cDNA: gi_15450722, supported by cDNA: gi_16930684, by cDNA: gi_20453105 [Arabidopsis thaliana]
  misc_feature (2)..(74): Homolog of NCBI NO: 20453106 NR Description: At2g04030/F3C11.14 [Arabidopsis thaliana]
  misc_feature (2)..(74): Homolog of NCBI NO: 30678090 NR Description: heat shock protein, putative [Arabidopsis
  misc_feature (2)..(74): Homolog of NCBI NO: 1076758 NR Description: heat-shock protein, 82K, precursor - rye
  misc_feature (2)..(74): Homolog of NCBI NO: 1906830 NR Description: heat shock protein [Arabidopsis thaliana]
  misc_feature (4)..(74): Homolog of NCBI NO: 23957584 NR Description: heat shock protein-90 [Capra hircus]
  misc_feature (2)..(74): Homolog of NCBI NO: 21357739 NR Description: Glycoprotein 93 CG5520-PA CG5520- PA [Drosophila melanogaster] >gi|18447291|gb|AAL68222.1|
  misc_feature (2)..(75): Homolog of NCBI NO: 27803586 NR Description: heat shock protein gp96 [Strongylocentrotus
  misc_feature (4)..(74): Homolog of NCBI NO: 31242551 NR Description: ENSANGP00000015826 [Anopheles gambiae]
TEPKKKTKTVIEKYWDWELSNETQPIWLRNPKEVSTEEYNDFFKKTFNEYLGPLASSHFTTEGEVEFRSILFVPATRKGRCNC

SEQ ID NO: 15482 - protein, 64 aa, Zea mays subsp. mays
  peptide (1)..(64): Ceres Seq. ID no. 7118149
LSLRKRPKLLLRSIGIGSFQMRHNLFGFGTPKRFQLRNTMIFSRKPSMSTWALWHHHTSLQRVR

SEQ ID NO: 15483 - protein, 44 aa, Zea mays subsp. mays
  peptide (1)..(44): Ceres Seq. ID no. 7118150
MRHNLFGFGTPKRFQLRNTMIFSRKPSMSTWALWHHHTSLQRVR

SEQ ID NO: 15484 - DNA, 2887 bp, Zea mays subsp. mays; identical to SEQ ID NO: 10739
  misc_feature (1)..(2887): Ceres Seq. ID no. 13635664
  misc_feature: MA Experiment ID: 108527 Result: Down-regulated in Transcription
  misc_feature: MA Experiment 108527 PARAMETER Experiment Name: Zm_5mM_NO_P Parameter: Age (day) Value: 8
  misc_feature: MA Experiment 108527 PARAMETER Experiment Name: Zm_5mM_NO_P Parameter: Organism Value: Zea mays
  misc_feature: MA Experiment 108527 PARAMETER Experiment Name: Zm_5mM_NO_P Parameter: Plant Line Value: 35A19
  misc_feature: MA Experiment 108527 PARAMETER Experiment Name: Zm_5mM_NO_P Parameter: Timepoint (hr) Value: 6
  misc_feature: MA Experiment 108527 PARAMETER Experiment Name: Zm_5mM_NO_P Parameter: Tissue Value: Aerial
  misc_feature: MA Experiment 108527 PARAMETER Experiment Name: Zm_5mM_NO_P Parameter: Treatment Value: 5mM NO vs. No Treatment
  misc_feature: MA Experiment ID: 108556 Result: Down-regulated in Transcription
  misc_feature: MA Experiment 108556 PARAMETER Experiment Name: Zm_Drought_P Parameter: Age (day) Value: 9
  misc_feature: MA Experiment 108556 PARAMETER Experiment Name: Zm_Drought_P Parameter: Organism Value: Zea mays
  misc_feature: MA Experiment 108556 PARAMETER Experiment Name: Zm_Drought_P Parameter: Plant Line Value: 35A19
  misc_feature: MA Experiment 108556 PARAMETER Experiment Name: Zm_Drought_P Parameter: Timepoint (hr) Value: 24
  misc_feature: MA Experiment 108556 PARAMETER Experiment Name: Zm_Drought_P Parameter: Tissue Value: Aerial
  misc_feature: MA Experiment 108556 PARAMETER Experiment Name: Zm_Drought_P Parameter: Treatment Value: Drought vs. No Drought
  misc_feature: MA Experiment ID: 108559 Result: Down-regulated in Transcription
  misc_feature: MA Experiment 108559 PARAMETER Experiment Name: Zm_5mM_NO_P Parameter: Age (day) Value: 8
  misc_feature: MA Experiment 108559 PARAMETER Experiment Name: Zm_5mM_NO_P Parameter: Organism Value: Zea mays
  misc_feature: MA Experiment 108559 PARAMETER Experiment Name: Zm_5mM_NO_P Parameter: Plant Line Value: 35A19
  misc_feature: MA Experiment 108559 PARAMETER Experiment Name: Zm_5mM_NO_P Parameter: Timepoint (hr) Value: 12
  misc_feature: MA Experiment 108559 PARAMETER Experiment Name: Zm_5mM_NO_P Parameter: Tissue Value: Aerial
  misc_feature: MA Experiment 108559 PARAMETER Experiment Name: Zm_5mM_NO_P Parameter: Treatment Value: 5mM NO vs. No Treatment
  misc_feature: MA Experiment ID: 20000477 Result: Down-regulated in Transcription
  misc_feature: MA Experiment 20000477 PARAMETER Experiment Name: Zm_5mM_SA_P Parameter: Age (day) Value: 10
  misc_feature: MA Experiment 20000477 PARAMETER Experiment Name: Zm_5mM_SA_P Parameter: Organism Value: Zea mays
  misc_feature: MA Experiment 20000477 PARAMETER Experiment Name: Zm_5mM_SA_P Parameter: Plant Line Value: 35A19
  misc_feature: MA Experiment 20000477 PARAMETER Experiment Name: Zm_5mM_SA_P Parameter: Timepoint (hr) Value: 48
  misc_feature: MA Experiment 20000477 PARAMETER Experiment Name: Zm_5mM_SA_P Parameter: Tissue Value: Aerial
  misc_feature: MA Experiment 20000477 PARAMETER Experiment Name: Zm_5mM_SA_P Parameter: Treatment Value: 5mM SA vs. No Treatment
  misc_feature: MA Experiment ID: 20000478 Result: Down-regulated in Transcription
  misc_feature: MA Experiment 20000478 PARAMETER Experiment Name: Zm_5mM_SA_P Parameter: Age (day) Value: 11
  misc_feature: MA Experiment 20000478 PARAMETER Experiment Name: Zm_5mM_SA_P Parameter: Organism Value: Zea mays
  misc_feature: MA Experiment 20000478 PARAMETER Experiment Name: Zm_5mM_SA_P Parameter: Plant Line Value: 35A19
  misc_feature: MA Experiment 20000478 PARAMETER Experiment Name: Zm_5mM_SA_P Parameter: Timepoint (hr) Value: 72
  misc_feature: MA Experiment 20000478 PARAMETER Experiment Name: Zm_5mM_SA_P Parameter: Tissue Value: Aerial
  misc_feature: MA Experiment 20000478 PARAMETER Experiment Name: Zm_5mM_SA_P Parameter: Treatment Value: 5mM SA vs. No Treatment
  misc_feature: MA Experiment ID: 20000492 Result: Down-regulated in Transcription
  misc_feature: MA Experiment 20000492 PARAMETER Experiment Name: Zm_Hybrid_Seed_Dev_P Parameter: DAP Value: 12
  misc_feature: MA Experiment 20000492 PARAMETER Experiment Name: Zm_Hybrid_Seed_Dev_P Parameter: Organism Value: Zea mays
  misc_feature: MA Experiment 20000492 PARAMETER Experiment Name: Zm_Hybrid_Seed_Dev_P Parameter: Plant Line Value: 35A19
  misc_feature: MA Experiment 20000492 PARAMETER Experiment Name: Zm_Hybrid_Seed_Dev_P Parameter: Tissue Value: Fert Kernel vs. Unfert Floret
  misc_feature: MA Experiment ID: 20000535 Result: Down-regulated in Transcription
  misc_feature: MA Experiment 20000535 PARAMETER Experiment Name: Zm_Hybrid_Seed_Dev_P Parameter: DAP Value: 30 vs. 12
  misc_feature: MA Experiment 20000535 PARAMETER Experiment Name: Zm_Hybrid_Seed_Dev_P Parameter: Organism Value: Zea mays
  misc_feature: MA Experiment 20000535 PARAMETER Experiment Name: Zm_Hybrid_Seed_Dev_P Parameter: Plant Line Value: 35A19
  misc_feature: MA Experiment 20000535 PARAMETER Experiment Name: Zm_Hybrid_Seed_Dev_P Parameter: Tissue Value: Embryo vs. Unfert Floret

SEQ ID NO: 15485 - protein, 897 aa, Zea mays subsp. mays; identical to SEQ ID NO: 10740
  peptide (1)..(897): Ceres Seq. ID no. 13635665
  misc_feature (464)..(892): Homolog of NCBI NO: 15208447 NR Description: kinesin heavy chain [Zea mays]
  misc_feature (80)..(395): Homolog of NCBI NO: 15208447 NR Description: kinesin heavy chain [Zea mays]
  misc_feature (1)..(395): Homolog of NCBI NO: 30693419 NR Description: expressed protein [Arabidopsis thaliana]
  misc_feature (676)..(896): Homolog of NCBI NO: 30693419 NR Description: expressed protein [Arabidopsis thaliana]
  misc_feature (1)..(524): Homolog of NCBI NO: 30698217 NR Description: kinesin heavy chain DNA binding protein-related
  misc_feature (694)..(896): Homolog of NCBI NO: 30698217 NR Description: kinesin heavy chain DNA binding protein-related
  misc_feature (1)..(506): Homolog of NCBI NO: 18416291 NR Description: hypothetical protein [Arabidopsis thaliana]
  misc_feature (485)..(894): Homolog of NCBI NO: 18416291 NR Description: hypothetical protein [Arabidopsis thaliana]
  misc_feature (1)..(400): Homolog of NCBI NO: 15234898 NR Description: kinesin like protein [Arabidopsis thaliana]
  misc_feature (607)..(896): Homolog of NCBI NO: 15234898 NR Description: kinesin like protein [Arabidopsis thaliana]
  misc_feature (464)..(892): Homolog of NCBI NO: 15208447 NR Description: kinesin heavy chain [Zea mays]
  misc_feature (80)..(395): Homolog of NCBI NO: 15208447 NR Description: kinesin heavy chain [Zea mays]
  misc_feature (1)..(395): Homolog of NCBI NO: 30693419 NR Description: expressed protein [Arabidopsis thaliana]
  misc_feature (676)..(896): Homolog of NCBI NO: 30693419 NR Description: expressed protein [Arabidopsis thaliana]
  misc_feature (1)..(524): Homolog of NCBI NO: 30698217 NR Description: kinesin heavy chain DNA binding protein-related
  misc_feature (694)..(896): Homolog of NCBI NO: 30698217 NR Description: kinesin heavy chain DNA binding protein-related
  misc_feature (1)..(506): Homolog of NCBI NO: 18416291 NR Description: hypothetical protein [Arabidopsis thaliana]
  misc_feature (485)..(894): Homolog of NCBI NO: 18416291 NR Description: hypothetical protein [Arabidopsis thaliana]
  misc_feature (1)..(400): Homolog of NCBI NO: 15234898 NR Description: kinesin like protein [Arabidopsis thaliana]
  misc_feature (607)..(896): Homolog of NCBI NO: 15234898 NR Description: kinesin like protein [Arabidopsis thaliana]

SEQ ID NO: 15486 - protein, 808 aa, Zea mays subsp. mays; identical to SEQ ID NO: 10741
  peptide (1)..(808): Ceres Seq. ID no. 13635666
  misc_feature (375)..(803): Homolog of NCBI NO: 15208447 NR Description: kinesin heavy chain [Zea mays]
  misc_feature (1)..(306): Homolog of NCBI NO: 15208447 NR Description: kinesin heavy chain [Zea mays]
  misc_feature (1)..(306): Homolog of NCBI NO: 30693419 NR Description: expressed protein [Arabidopsis thaliana]
  misc_feature (587)..(807): Homolog of NCBI NO: 30693419 NR Description: expressed protein [Arabidopsis thaliana]
  misc_feature (1)..(435): Homolog of NCBI NO: 30698217 NR Description: kinesin heavy chain DNA binding protein-related
  misc_feature (605)..(807): Homolog of NCBI NO: 30698217 NR Description: kinesin heavy chain DNA binding protein-related
  misc_feature (1)..(417): Homolog of NCBI NO: 18416291 NR Description: hypothetical protein [Arabidopsis thaliana]
  misc_feature (396)..(805): Homolog of NCBI NO: 18416291 NR Description: hypothetical protein [Arabidopsis thaliana]
  misc_feature (1)..(311): Homolog of NCBI NO: 15234898 NR Description: kinesin like protein [Arabidopsis thaliana]
  misc_feature (518)..(807): Homolog of NCBI NO: 15234898 NR Description: kinesin like protein [Arabidopsis thaliana]
  misc_feature (375)..(803): Homolog of NCBI NO: 15208447 NR Description: kinesin heavy chain [Zea mays]
  misc_feature (1)..(306): Homolog of NCBI NO: 15208447 NR Description: kinesin heavy chain [Zea mays]
  misc_feature (1)..(306): Homolog of NCBI NO: 30693419 NR Description: expressed protein [Arabidopsis thaliana]
  misc_feature (587)..(807): Homolog of NCBI NO: 30693419 NR Description: expressed protein [Arabidopsis thaliana]
  misc_feature (1)..(435): Homolog of NCBI NO: 30698217 NR Description: kinesin heavy chain DNA binding protein-related
  misc_feature (605)..(807): Homolog of NCBI NO: 30698217 NR Description: kinesin heavy chain DNA binding protein-related
  misc_feature (1)..(417): Homolog of NCBI NO: 18416291 NR Description: hypothetical protein [Arabidopsis thaliana]
  misc_feature (396)..(805): Homolog of NCBI NO: 18416291 NR Description: hypothetical protein [Arabidopsis thaliana]
  misc_feature (1)..(311): Homolog of NCBI NO: 15234898 NR Description: kinesin like protein [Arabidopsis thaliana]
  misc_feature (518)..(807): Homolog of NCBI NO: 15234898 NR Description: kinesin like protein [Arabidopsis thaliana]

SEQ ID NO: 15487 - protein, 573 aa, Zea mays subsp. mays; identical to SEQ ID NO: 10742
  peptide (1)..(573): Ceres Seq. ID no. 13635667
  misc_feature (283)..(572): Homolog of NCBI NO: 15234898 NR Description: kinesin like protein [Arabidopsis thaliana]
  misc_feature (140)..(568): Homolog of NCBI NO: 15208447 NR Description: kinesin heavy chain [Zea mays]
  misc_feature (1)..(71): Homolog of NCBI NO: 15208447 NR Description: kinesin heavy chain [Zea mays]
  misc_feature (1)..(71): Homolog of NCBI NO: 30693419 NR Description: expressed protein [Arabidopsis thaliana]
  misc_feature (352)..(572): Homolog of NCBI NO: 30693419 NR Description: expressed protein [Arabidopsis thaliana]
  misc_feature (1)..(200): Homolog of NCBI NO: 30698217 NR Description: kinesin heavy chain DNA binding protein-related
  misc_feature (370)..(572): Homolog of NCBI NO: 30698217 NR Description: kinesin heavy chain DNA binding protein-related
  misc_feature (1)..(182): Homolog of NCBI NO: 18416291 NR Description: hypothetical protein [Arabidopsis thaliana]
  misc_feature (161)..(570): Homolog of NCBI NO: 18416291 NR Description: hypothetical protein [Arabidopsis thaliana]
  misc_feature (1)..(76): Homolog of NCBI NO: 15234898 NR Description: kinesin like protein [Arabidopsis thaliana]
  misc_feature (140)..(568): Homolog of NCBI NO: 15208447 NR Description: kinesin heavy chain [Zea mays]
  misc_feature (1)..(71): Homolog of NCBI NO: 15208447 NR Description: kinesin heavy chain [Zea mays]
  misc_feature (1)..(71): Homolog of NCBI NO: 30693419 NR Description: expressed protein [Arabidopsis thaliana]
  misc_feature (352)..(572): Homolog of NCBI NO: 30693419 NR Description: expressed protein [Arabidopsis thaliana]
  misc_feature (1)..(200): Homolog of NCBI NO: 30698217 NR Description: kinesin heavy chain DNA binding protein-related
  misc_feature (370)..(572): Homolog of NCBI NO: 30698217 NR Description: kinesin heavy chain DNA binding protein-related
  misc_feature (1)..(182): Homolog of NCBI NO: 18416291 NR Description: hypothetical protein [Arabidopsis thaliana]
  misc_feature (161)..(570): Homolog of NCBI NO: 18416291 NR Description: hypothetical protein [Arabidopsis thaliana]
  misc_feature (1)..(76): Homolog of NCBI NO: 15234898 NR Description: kinesin like protein [Arabidopsis thaliana]
  misc_feature (283)..(572): Homolog of NCBI NO: 15234898 NR Description: kinesin like protein [Arabidopsis thaliana]

SEQ ID NO: 15488 - DNA, 2150 bp, Zea mays subsp. mays
  misc_feature (1)..(2150): Ceres Seq. ID no. 13666124
  misc_feature: MA Experiment ID: 108527 Result: Up-regulated in Transcription
  misc_feature: MA Experiment 108527 PARAMETER Experiment Name: Zm_5mM_NO_P Parameter: Age (day) Value: 8
  misc_feature: MA Experiment 108527 PARAMETER Experiment Name: Zm_5mM_NO_P Parameter: Organism Value: Zea mays
  misc_feature: MA Experiment 108527 PARAMETER Experiment Name: Zm_5mM_NO_P Parameter: Plant Line Value: 35A19
  misc_feature: MA Experiment 108527 PARAMETER Experiment Name: Zm_5mM_NO_P Parameter: Timepoint (hr) Value: 6
  misc_feature: MA Experiment 108527 PARAMETER Experiment Name: Zm_5mM_NO_P Parameter: Tissue Value: Aerial
  misc_feature: MA Experiment 108527 PARAMETER Experiment Name: Zm_5mM_NO_P Parameter: Treatment Value: 5mM NO vs. No Treatment
  misc_feature: MA Experiment ID: 108535 Result: Down-regulated in Transcription
  misc_feature: MA Experiment 108535 PARAMETER Experiment Name: Zm_Meristem_P Parameter: Age (day) Value: 8
  misc_feature: MA Experiment 108535 PARAMETER Experiment Name: Zm_Meristem_P Parameter: Organism Value: Zea mays
  misc_feature: MA Experiment 108535 PARAMETER Experiment Name: Zm_Meristem_P Parameter: Plant Line Value: 35A19
  misc_feature: MA Experiment 108535 PARAMETER Experiment Name: Zm_Meristem_P Parameter: Tissue Value: Root Meristem vs. Above Root Meristem
  misc_feature: MA Experiment ID: 20000108 Result: Down-regulated in Transcription
  misc_feature: MA Experiment 20000108 PARAMETER Experiment Name: Zm_Root-Tips_P Parameter: Age (day) Value: 12
  misc_feature: MA Experiment 20000108 PARAMETER Experiment Name: Zm_Root-Tips_P Parameter: Organism Value: Zea mays
  misc_feature: MA Experiment 20000108 PARAMETER Experiment Name: Zm_Root-Tips_P Parameter: Tissue Value: Root tips vs. Root mid region    35
  misc_feature: MA Experiment 20000108 PARAMETER Experiment Name: Zm_Root-Tips_P Parameter: Tissue Value: Root tips vs. Root mid region   Sequence Listing-Misc Features (4)
cactagtcccccccccccccccccttttcagagatggggcttaaactgcgggttgacatgcctcagcaggctatggatattgccacagtattctttcgtcagtcaaccacagcaagtgaagcaaaggagaacataaaaacacttaatgaccaaagagagagaaatgtcaaagctcttcaagaaaagatgaaattgaacaagaaggaggttcaacgctttaatcctgttgatgctttccccggggatgccataatatttatgagggtcttgaatctcctcagaggtctttcagcttcactaaatgttaggatagtttatctggacatcatgaggccatctgctgaatcaactttgttagggagtttgacacacggacaaatacctaacagtcagtggatttttgactcacctgctaactctgatgtggagtctaaactgagaaattatctgcttgagttgggaagcgacaaaattttaggaatacaagtctgcgcatataaagatggaaaggtcataatagatactgctgctggtatgctggggaagtatatccccgacctgttcaacctgattctctttttcctgttttctcagtgactaagggtatcactgctgggatggtacattggcttgtggacaaagggaagctgaagtacgaggaaacagttgccaacatatggccgaattttggaactaacggaaaggagttaataaaggtccatcatcttctaaatcacacatccggtttgcacaatgcactgggtgatgtggtaaagaatgatcctttgttggtatgtgactgggaggagacactaaaccagattacgaagagtacacctgagaccgaacctggttcagcacaaatttaccattacctctccttcggttggctgtgtgggggagtcatagagcatgcatctgggaagaagtttcaagagattctagaagaggctattgttcgtcctcttcacattgagggggagttgtatgttggcattccaccaggtgtcgagtctcggctggcagcgctgacagttgacaccgaggagctccagaagctatcaggaatcagggcaggtgcagatgtgccagcagctctgctgaacaacatcgcgcagatggcgtccggtgtgcccgctattttcaacacgctaaacgtccgtcgggccatcatccctgccgccaacggccactgctctgcccgcgcgctcgctcgatactacgcggcgctagcggccggcggttctgttcccccgccgcactcttcgggcgccatgccgcccctcggcagccacgtgcacacccccaagttcccgaccgcgccgctcaagaagaagaagaagggcgccggaaagaagaagggcgccggcggcggctccatgggagacctcaaggtccaggatataagcggcggcagcagcgacaggaacgggtactgccagctgcgcaccagcgacgccgacagcgaggcggggagcggcagcggcggaggcggcaggatgttcggcagcgacaggatcctcgacgcgttcatgggcgtcggcgagtacgagggcatggcgcaccgggacggcaagttcgggctcgggttcaggaggtacgacgacgccggcagcggcagaggcaggctgaggtgcttcgggcactccgggatgggcggctcgaccgggttctgcgacgtggagaacggcttcgccatcgcggtgacggtgaacaagctgtctctgggcagcgtcacgcgcggcgtcgtccggctcgtcctcgaggaactgggcctgcccgtgccggacgagtactcggccaccggggagaaggggcctgacatgatgctcaacctgacgacaacgacgacgactacgccgccgcaactgagatgacgacggcgaaactgagattaccaggttgggttcgtaataatctgtggaacgagatatatagcgagcagaaggaaggtggggtacagggatttggtggacagtatatatacgcgtgccattttgattttgacgtggcatgtaaaactcggcaaattctggtatattacgaagcaagctgggtgctgggaattgtggccagcagtacaagaaatggacatgctagtttgttgaccaaaaaaaaaaaaaaaaaaaactcgagggggggcccggtac

SEQ ID NO: 15489 - protein, 419 aa, Zea mays subsp. mays
  peptide (1)..(419): Ceres Seq. ID no. 13666125
  misc_feature (1)..(405): Homolog of NCBI NO: 18420844 NR Description: expressed protein [Arabidopsis thaliana]
  misc_feature (1)..(315): Homolog of NCBI NO: 15081731 NR Description: AT5g24810/F6A4_20 [Arabidopsis thaliana]
  misc_feature (1)..(211): Homolog of NCBI NO: 16124510 NR Description: esterase A [Caulobacter crescentus CB15]
  misc_feature (292)..(367): Homolog of NCBI NO: 16124510 NR Description: esterase A [Caulobacter crescentus CB15]
  misc_feature (1)..(210): Homolog of NCBI NO: 29827845 NR Description: putative esterase A [Streptomyces avermitilis
  misc_feature (297)..(368): Homolog of NCBI NO: 29827845 NR Description: putative esterase A [Streptomyces avermitilis
  misc_feature (1)..(209): Homolog of NCBI NO: 13475683 NR Description: esterase [Mesorhizobium loti]
  misc_feature (321)..(371): Homolog of NCBI NO: 13475683 NR Description: esterase [Mesorhizobium loti]
  misc_feature (1)..(206): Homolog of NCBI NO: 15609600 NR Description: lipP [Mycobacterium tuberculosis H37Rv]
  misc_feature (318)..(367): Homolog of NCBI NO: 15609600 NR Description: lipP [Mycobacterium tuberculosis H37Rv]
MVHWLVDKGKLKYEETVANIWPNFGTNGKELIKVHHLLNHTSGLHNALGDVVKNDPLLVCDWEETLNQITKSTPETEPGSAQIYHYLSFGWLCGGVIEHASGKKFQEILEEAIVRPLHIEGELYVGIPPGVESRLAALTVDTEELQKLSGIRAGADVPAALLNNIAQMASGVPAIFNTLNVRRAIIPAANGHCSARALARYYAALAAGGSVPPPHSSGAMPPLGSHVHTPKFPTAPLKKKKKGAGKKKGAGGGSMGDLKVQDISGGSSDRNGYCQLRTSDADSEAGSGSGGGGRMFGSDRILDAFMGVGEYEGMAHRDGKFGLGFRRYDDAGSGRGRLRCFGHSGMGGSTGFCDVENGFAIAVTVNKLSLGSVTRGVVRLVLEELGLPVPDEYSATGEKGPDMMLNLTTTTTTTPPQLR

SEQ ID NO: 15490 - protein, 252 aa, Zea mays subsp. mays
  peptide (1)..(252): Ceres Seq. ID no. 13666126
  misc_feature (1)..(238): Homolog of NCBI NO: 18420844 NR Description: expressed protein [Arabidopsis thaliana]
  misc_feature (1)..(148): Homolog of NCBI NO: 15081731 NR Description: AT5g24810/F6A4_20 [Arabidopsis thaliana]
  misc_feature (1)..(44): Homolog of NCBI NO: 16124510 NR Description: esterase A [Caulobacter crescentus CB15]
  misc_feature (125)..(200): Homolog of NCBI NO: 16124510 NR Description: esterase A [Caulobacter crescentus CB15]
  misc_feature (1)..(43): Homolog of NCBI NO: 29827845 NR Description: putative esterase A [Streptomyces avermitilis
  misc_feature (130)..(201): Homolog of NCBI NO: 29827845 NR Description: putative esterase A [Streptomyces avermitilis
  misc_feature (1)..(42): Homolog of NCBI NO: 13475683 NR Description: esterase [Mesorhizobium loti]
  misc_feature (154)..(204): Homolog of NCBI NO: 13475683 NR Description: esterase [Mesorhizobium loti]
  misc_feature (1)..(39): Homolog of NCBI NO: 15609600 NR Description: lipP [Mycobacterium tuberculosis H37Rv]
  misc_feature (151)..(200): Homolog of NCBI NO: 15609600 NR Description: lipP [Mycobacterium tuberculosis H37Rv]
MASGVPAIFNTLNVRRAIIPAANGHCSARALARYYAALAAGGSVPPPHSSGAMPPLGSHVHTPKFPTAPLKKKKKGAGKKKGAGGGSMGDLKVQDISGGSSDRNGYCQLRTSDADSEAGSGSGGGGRMFGSDRILDAFMGVGEYEGMAHRDGKFGLGFRRYDDAGSGRGRLRCFGHSGMGGSTGFCDVENGFAIAVTVNKLSLGSVTRGVVRLVLEELGLPVPDEYSATGEKGPDMMLNLTTTTTTTPPQLR

SEQ ID NO: 15491 - DNA, 1035 bp, Zea mays subsp. mays
  misc_feature (1)..(1035): Ceres Seq. ID no. 13579701
  misc_feature: MA Experiment ID: 20000534 Result: Down-regulated in Transcription
  misc_feature: MA Experiment 20000534 PARAMETER Experiment Name: Zm_Hybrid_Pollen_P Parameter: Age (day) Value: 8
  misc_feature: MA Experiment 20000534 PARAMETER Experiment Name: Zm_Hybrid_Pollen_P Parameter: Organism Value: Zea mays
  misc_feature: MA Experiment 20000534 PARAMETER Experiment Name: Zm_Hybrid_Pollen_P Parameter: Plant Line Value: 35A19
  misc_feature: MA Experiment 20000534 PARAMETER Experiment Name: Zm_Hybrid_Pollen_P Parameter: Tissue Value: Pollen vs. Aerial
agtcgtgtgcccgagccgaggttccccaaacacgcacagcacacgaacacacaccgcgcccagctccgaggtgatcttccggcggccggcgagatgagccgtggcacaggcgcgggctatgaccgccacatcaccatcttctccccggagggacgcctgtaccaagtcgagtacgcgttcaaggcggtgaagtcggcgggtgtcacgtcgatcggcgtccgcggcgcggactccgtctgcgttgttacgcagaagaaagtcccggataagttgctggatcagacgagcgtgacacacctgttcccgatcaccaagtacgtcggattgcttgccactggccttacagctgatggtaggtcattggtttcccaagcaaggaacgaagcagctgagtttcgtttcaaatggggctaccgagatgccagttgatgtgttagcaaaatggattgctgacaaagctcaagtttacacgcagcatgcatacatgagaccccttggagtagttgctatggtcttgggctacgatgaagagaaaaatgcccaactattcaagtgcgaccctgctggtcacttctttggacataaggcaactagtgccgggctcaaggagcaggaagcaataaattttctggagaagaaaatgaaggatgacccgaaattcacctatgacgaaactgtgcagattgcaatatctgcgttgcaatcagttctccaggaagatttcaaggccactgagatcgaagttggtgttgtgagaaaagatgaccgcgttttcagagctctcacgacagaggagatcgatcagcacctgacggcaattagtgaacgtgactgagatgtcatatgctgcacatttcagcgctgcacacactgcgccgtgccattgtgcttcggcagtcattaagtttcatagtcatcaaaggaactgagtgtaccatttcacgtttaagaccgaaaacaagccccctctcgatgtactcgtttcatatcgttctgtggttgattgaaattggcacggtttggttttgggttgct

SEQ ID NO: 15492 - protein, 161 aa, Zea mays subsp. mays
  peptide (1)..(161): Ceres Seq. ID no. 13579702
  misc_feature (23)..(135): Pfam Name: Proteasome A-type and B-type Pfam Description: Proteasome A-type and B-type
  misc_feature (23)..(161): Homolog of NCBI NO: 11967891 NR Description: maize 20S proteasome alpha subunit [Zea mays]
  misc_feature (23)..(161): Homolog of NCBI NO: 12229922 NR Description: Proteasome subunit alpha type 6 (20S proteasome
  misc_feature (23)..(161): Homolog of NCBI NO: 12229948 NR Description: Proteasome subunit alpha type 6 (20S proteasome
  misc_feature (23)..(161): Homolog of NCBI NO: 15224993 NR Description: 20S proteasome alpha subunit A2 (PAA2)
MVGHWFPKQGTKQLSFVSNGATEMPVDVLAKWIADKAQVYTQHAYMRPLGVVAMVLGYDEEKNAQLFKCDPAGHFFGHKATSAGLKEQEAINFLEKKMKDDPKFTYDETVQIAISALQSVLQEDFKATEIEVGVVRKDDRVFRALTTEEIDQHLTAISERD

SEQ ID NO: 15493 - protein, 142 aa, Zea mays subsp. mays
  peptide (1)..(142): Ceres Seq. ID no. 13579703
  misc_feature (63)..(138): Pfam Name: Proteasome A-type and B-type Pfam Description: Proteasome A-type and B-type
  misc_feature (32)..(138): Homolog of NCBI NO: 11967891 NR Description: maize 20S proteasome alpha subunit [Zea mays]
  misc_feature (32)..(138): Homolog of NCBI NO: 12229922 NR Description: Proteasome subunit alpha type 6 (20S proteasome
  misc_feature (32)..(138): Homolog of NCBI NO: 12229948 NR Description: Proteasome subunit alpha type 6 (20S proteasome
  misc_feature (32)..(138): Homolog of NCBI NO: 15224993 NR Description: 20S proteasome alpha subunit A2 (PAA2)
SRVPEPRFPKHAQHTNTHRAQLRGDLPAAGEMSRGTGAGYDRHITIFSPEGRLYQVEYAFKAVKSAGVTSIGVRGADSVCVVTQKKVPDKLLDQTSVTHLFPITKYVGLLATGLTADGRSLVSQARNEAAEFRFKWGYRDAS

SEQ ID NO: 15494 - protein, 138 aa, Zea mays subsp. mays
  peptide (1)..(138): Ceres Seq. ID no. 13579704
  misc_feature (1)..(112): Pfam Name: Proteasome A-type and B-type Pfam Description: Proteasome A-type and B-type
  misc_feature (1)..(138): Homolog of NCBI NO: 11967891 NR Description: maize 20S proteasome alpha subunit [Zea mays]
  misc_feature (1)..(138): Homolog of NCBI NO: 12229922 NR Description: Proteasome subunit alpha type 6 (20S proteasome
  misc_feature (1)..(138): Homolog of NCBI NO: 12229948 NR Description: Proteasome subunit alpha type 6 (20S proteasome
  misc_feature (1)..(138): Homolog of NCBI NO: 15224993 NR Description: 20S proteasome alpha subunit A2 (PAA2)
MPVDVLAKWIADKAQVYTQHAYMRPLGVVAMVLGYDEEKNAQLFKCDPAGHFFGHKATSAGLKEQEAINFLEKKMKDDPKFTYDETVQIAISALQSVLQEDFKATEIEVGVVRKDDRVFRALTTEEIDQHLTAISERD

SEQ ID NO: 15495 - DNA, 2134 bp, Zea mays subsp. mays
  misc_feature (1)..(2134): Ceres Seq. ID no. 13600631
  misc_feature: MA Experiment ID: 108527 Result: Up-regulated in Transcription
  misc_feature: MA Experiment 108527 PARAMETER Experiment Name: Zm_5mM_NO_P Parameter: Age (day) Value: 8
  misc_feature: MA Experiment 108527 PARAMETER Experiment Name: Zm_5mM_NO_P Parameter: Organism Value: Zea mays
  misc_feature: MA Experiment 108527 PARAMETER Experiment Name: Zm_5mM_NO_P Parameter: Plant Line Value: 35A19
  misc_feature: MA Experiment 108527 PARAMETER Experiment Name: Zm_5mM_NO_P Parameter: Timepoint (hr) Value: 6
  misc_feature: MA Experiment 108527 PARAMETER Experiment Name: Zm_5mM_NO_P Parameter: Tissue Value: Aerial
  misc_feature: MA Experiment 108527 PARAMETER Experiment Name: Zm_5mM_NO_P Parameter: Treatment Value: 5mM NO vs. No Treatment
  misc_feature: MA Experiment ID: 108528 Result: Down-regulated in Transcription
  misc_feature: MA Experiment 108528 PARAMETER Experiment Name: Zm_Imbibed_Seeds_P Parameter: Age (day) Value: 5 vs. 2
  misc_feature: MA Experiment 108528 PARAMETER Experiment Name: Zm_Imbibed_Seeds_P Parameter: Organism Value: Zea mays
  misc_feature: MA Experiment 108528 PARAMETER Experiment Name: Zm_Imbibed_Seeds_P Parameter: Plant Line Value: 35A19
  misc_feature: MA Experiment 108528 PARAMETER Experiment Name: Zm_Imbibed_Seeds_P Parameter: Tissue Value: Aerial vs. Embryo
  misc_feature: MA Experiment ID: 108530 Result: Down-regulated in Transcription
  misc_feature: MA Experiment 108530 PARAMETER Experiment Name: Zm_Imbibed_Seeds_P Parameter: Age (day) Value: 6 vs. 2
  misc_feature: MA Experiment 108530 PARAMETER Experiment Name: Zm_Imbibed_Seeds_P Parameter: Organism Value: Zea mays
  misc_feature: MA Experiment 108530 PARAMETER Experiment Name: Zm_Imbibed_Seeds_P Parameter: Plant Line Value: 35A19
  misc_feature: MA Experiment 108530 PARAMETER Experiment Name: Zm_Imbibed_Seeds_P Parameter: Tissue Value: Aerial vs. Embryo
  misc_feature: MA Experiment ID: 108534 Result: Up-regulated in Transcription
  misc_feature: MA Experiment 108534 PARAMETER Experiment Name: Zm_4deg_Cold_P Parameter: Age (hr) Value: 8
  misc_feature: MA Experiment 108534 PARAMETER Experiment Name: Zm_4deg_Cold_P Parameter: Organism Value: Zea mays
  misc_feature: MA Experiment 108534 PARAMETER Experiment Name: Zm_4deg_Cold_P Parameter: Plant Line Value: 35A19
  misc_feature: MA Experiment 108534 PARAMETER Experiment Name: Zm_4deg_Cold_P Parameter: Temperature (deg C) Value: 4 vs. 22
  misc_feature: MA Experiment 108534 PARAMETER Experiment Name: Zm_4deg_Cold_P Parameter: Timepoint (hr) Value: 6
  misc_feature: MA Experiment 108534 PARAMETER Experiment Name: Zm_4deg_Cold_P Parameter: Tissue Value: Aerial
  misc_feature: MA Experiment ID: 108544 Result: Down-regulated in Transcription
  misc_feature: MA Experiment ID: 108545 Result: Down-regulated in Transcription
  misc_feature: MA Experiment 108545 PARAMETER Experiment Name: Zm_Imbibed_Seeds_P Parameter: Age (day) Value: 3 vs. 2
  misc_feature: MA Experiment 108545 PARAMETER Experiment Name: Zm_Imbibed_Seeds_P Parameter: Organism Value: Zea mays
  misc_feature: MA Experiment 108545 PARAMETER Experiment Name: Zm_Imbibed_Seeds_P Parameter: Plant Line Value: 35A19
  misc_feature: MA Experiment 108545 PARAMETER Experiment Name: Zm_Imbibed_Seeds_P Parameter: Tissue Value: Aerial vs. Embryo
  misc_feature: MA Experiment ID: 20000488 Result: Down-regulated in Transcription
  misc_feature: MA Experiment 20000488 PARAMETER Experiment Name: Zm_50mM_NH4NO3_L_to_H_P Parameter: Organism Value: Zea mays
  misc_feature: MA Experiment 20000488 PARAMETER Experiment Name: Zm_50mM_NH4NO3_L_to_H_P Parameter: Timepoint (hr) Value: 8
  misc_feature: MA Experiment 20000488 PARAMETER Experiment Name: Zm_50mM_NH4NO3_L_to_H_P Parameter: Tissue Value: Leaves
  misc_feature: MA Experiment 20000488 PARAMETER Experiment Name: Zm_50mM_NH4NO3_L_to_H_P Parameter: Treatment Value: 50mM NH4NO3 vs. 100mM Mannitol
  misc_feature: MA Experiment ID: 20001608 Result: Down-regulated in Transcription
  misc_feature: MA Experiment 20001608 PARAMETER Experiment Name: Zm_50ppm_KNO3_L-to-H_P Parameter: Age (day) Value: 21
  misc_feature: MA Experiment 20001608 PARAMETER Experiment Name: Zm_50ppm_KNO3_L-to-H_P Parameter: Organism Value: Zea mays
  misc_feature: MA Experiment 20001608 PARAMETER Experiment Name: Zm_50ppm_KNO3_L-to-H_P Parameter: Plant Line Value: 35A19
  misc_feature: MA Experiment 20001608 PARAMETER Experiment Name: Zm_50ppm_KNO3_L-to-H_P Parameter: Timepoint (hr) Value: 48
  misc_feature: MA Experiment 20001608 PARAMETER Experiment Name: Zm_50ppm_KNO3_L-to-H_P Parameter: Tissue Value: Shoots
  misc_feature: MA Experiment 20001608 PARAMETER Experiment Name: Zm_50ppm_KNO3_L-to-H_P Parameter: Treatment Value: 50ppm KNO3 vs. 50ppm KCl
tttttctctacgaattccttcagttcagttccgttgcgttcatttcctttcctccatgaatgattcgtgattgatgcctggatcgcgatcgcttctatttttcttcttcttttggtgcctaaacaaaaatattttatattgttattgggatggacttggtttctattgctttttcgtggggaatttccaaatttgtttcttcctgcgggtttatcggttaacgcgcgatgcatctgaggaggaggatcgattcactactctttgagattccgtatccgtctctgaaatgggaatatgacaatttttttaaaatccggtaccaacaggtataaccccccagaactacgatttccttccacggaaggagaattttgtccggagctcgaatttgtgccacgtttcacttcgttttttggagttttctgctcaactgagggaaagcagagccaccagagcttggccgtttcagatctctgtctgctaggctgccctttgctcaagggcaatcctcccttttcattcaacgcaaaaaaaaagatctttttttgcgtctttctatgaaatctggtgacaaatgttcagttgaactcagattcttcagatgcaattgaagatctcaaatcatcacatcattttttctgtcgaaataatttatgtgtgtgtgtgtttttcttaaaaaaactgttttttatgcttctgaatgcttgctgcattttcccgtgcatttgaaacaggaaaaacgtactagcgaaagctatagctgtgatctgaactcaattgctccgtaccgttttactttgcttcatgatccgttaatgaaagcaaaaagtaagcgcacggtgcgcatggatctgggttagttatgtactttgcttacttctgacataaagggcgcatttcaattttcaacaacacaaaagttgacgtccaagtggcctttgccttttccgctttctaagcaacttcgcttactgttcacttcacgaaatttccttatgctttacttgttttgcaactgaatgtggagtagcaatgtaacaaagtgaaaaagggtgtctggctgattcatttagtttctgctcgttttgctttcttgagatggttcgtgttagccttaacctttgtgatagcacaagaccaatgtggttgggactctgaacatgctcggattagcaaagaggatcaacgccaggttcctcctcaccagtaccagtgaggtctatggtgatcctctccagcacccgcaggtggagacttactggggcaatgtcaatcccatcggtgtcaggagctgttacgatgagggcaagcgtacagctgaaacgttgaccatggattaccaccgtggtgccaaccttgaggttaggatcgcacgtatcttcaatacatatggccctcgcatgtgcattgacgatggccgtgttgtcagtaactttgttgctcaggcactgaggaaggagcccttgacggtttatggtgatggaaagcaaaccaggagtttccaatatgtttctgatctggttgagggtctgatgaagctgatggaaggcgagcatgtggggccattcaacctgggtaaccctggcgagttcaccatgcttgagcttgccaaggttgtccaggacaccatcgaccccaacgcacggatcgagttccgcaagaacacccaggacgacccgcacaagcgcaagcccgacatcagccgcgccaaggagttcctcgggtgggagccgaagatccccctgcgtgagggccttcccctcatggtctccgacttccgcaagcgcatcttcggcgaccaagacgctgctgccaccaccaccggaaaccagcaaggttaggatgaaggagcgcacatgacatggaaatttttggtggccctgcttctagctgcttggttgctctctccttactgacaaaagctatgggccacgtagttcgttgggaatgtgttactggaatacctcggcacggctgatgctgtaatgccattctttttttcccctgtattttttctttctcagttctctcagtccttagctatacaaaaaaagttcagttgaacagttggagatgaacccggatgatctaattctttgttgagagcatagcatcatatatatggtataaatcc

SEQ ID NO: 15496 - protein, 226 aa, Zea mays subsp. mays; identical to SEQ ID NO: 2001
  peptide (1)..(226): Ceres Seq. ID no. 13600632
  misc_feature (1)..(210): Pfam Name: NAD dependent epimerase/dehydratase family Pfam Description: NAD dependent epimerase/dehydratase family
  misc_feature (1)..(216): Homolog of NCBI NO: 18201659 NR Description: dTDP-glucose 4-6-dehydratase-like protein [Oryza
  misc_feature (1)..(221): Homolog of NCBI NO: 15229334 NR Description: NAD-dependent epimerase/dehydratase family
  misc_feature (1)..(223): Homolog of NCBI NO: 15227109 NR Description: NAD-dependent epimerase/dehydratase family
  misc_feature (1)..(221): Homolog of NCBI NO: 2129578 NR Description: dTDP-glucose 4-6-dehydratase homolog D18 -
  misc_feature (1)..(215): Homolog of NCBI NO: 30693847 NR Description: NAD-dependent epimerase/dehydratase family
  misc_feature (1)..(215): Homolog of NCBI NO: 17473549 NR Description: dTDP-glucose 4-6-dehydratase-like protein
  misc_feature (1)..(213): Homolog of NCBI NO: 25396402 NR Description: UDP-glucuronic acid decarboxylase [Oryza sativa
  misc_feature (1)..(213): Homolog of NCBI NO: 34908082 NR Description: P0506B12.30 [Oryza sativa (japonica
  misc_feature (1)..(215): Homolog of NCBI NO: 11270116 NR Description: dTDP-glucose 4-6-dehydratase-like protein -
  misc_feature (1)..(201): Homolog of NCBI NO: 32401371 NR Description: dTDP-glucose-4-6-dehydratase-like protein

SEQ ID NO: 15497 - protein, 169 aa, Zea mays subsp. mays
  peptide (1)..(169): Ceres Seq. ID no. 13600633
  misc_feature (1)..(153): Pfam Name: NAD dependent epimerase/dehydratase family Pfam Description: NAD dependent epimerase/dehydratase family
  misc_feature (1)..(159): Homolog of NCBI NO: 18201659 NR Description: dTDP-glucose 4-6-dehydratase-like protein [Oryza
  misc_feature (1)..(164): Homolog of NCBI NO: 15229334 NR Description: NAD-dependent epimerase/dehydratase family
  misc_feature (1)..(166): Homolog of NCBI NO: 15227109 NR Description: NAD-dependent epimerase/dehydratase family
  misc_feature (1)..(164): Homolog of NCBI NO: 2129578 NR Description: dTDP-glucose 4-6-dehydratase homolog D18 -
  misc_feature (1)..(158): Homolog of NCBI NO: 30693847 NR Description: NAD-dependent epimerase/dehydratase family
  misc_feature (1)..(158): Homolog of NCBI NO: 17473549 NR Description: dTDP-glucose 4-6-dehydratase-like protein
  misc_feature (1)..(156): Homolog of NCBI NO: 25396402 NR Description: UDP-glucuronic acid decarboxylase [Oryza sativa
  misc_feature (1)..(156): Homolog of NCBI NO: 34908082 NR Description: P0506B12.30 [Oryza sativa (japonica
  misc_feature (1)..(158): Homolog of NCBI NO: 11270116 NR Description: dTDP-glucose 4-6-dehydratase-like protein -
  misc_feature (1)..(144): Homolog of NCBI NO: 32401371 NR Description: dTDP-glucose-4-6-dehydratase-like protein
MDYHRGANLEVRIARIFNTYGPRMCIDDGRVVSNFVAQALRKEPLTVYGDGKQTRSFQYVSDLVEGLMKLMEGEHVGPFNLGNPGEFTMLELAKVVQDTIDPNARIEFRKNTQDDPHKRKPDISRAKEFLGWEPKIPLREGLPLMVSDFRKRIFGDQDAAATTTGNQQG

SEQ ID NO: 15498 - protein, 146 aa, Zea mays subsp. mays
  peptide (1)..(146): Ceres Seq. ID no. 13600634
  misc_feature (1)..(130): Pfam Name: NAD dependent epimerase/dehydratase family Pfam Description: NAD dependent epimerase/dehydratase family
  misc_feature (1)..(136): Homolog of NCBI NO: 18201659 NR Description: dTDP-glucose 4-6-dehydratase-like protein [Oryza
  misc_feature (1)..(141): Homolog of NCBI NO: 15229334 NR Description: NAD-dependent epimerase/dehydratase family
  misc_feature (1)..(143): Homolog of NCBI NO: 15227109 NR Description: NAD-dependent epimerase/dehydratase family
  misc_feature (1)..(141): Homolog of NCBI NO: 2129578 NR Description: dTDP-glucose 4-6-dehydratase homolog D18 -
  misc_feature (1)..(135): Homolog of NCBI NO: 30693847 NR Description: NAD-dependent epimerase/dehydratase family
  misc_feature (1)..(135): Homolog of NCBI NO: 17473549 NR Description: dTDP-glucose 4-6-dehydratase-like protein
  misc_feature (1)..(133): Homolog of NCBI NO: 25396402 NR Description: UDP-glucuronic acid decarboxylase [Oryza sativa
  misc_feature (1)..(133): Homolog of NCBI NO: 34908082 NR Description: P0506B12.30 [Oryza sativa (japonica
  misc_feature (1)..(135): Homolog of NCBI NO: 11270116 NR Description: dTDP-glucose 4-6-dehydratase-like protein -
  misc_feature (1)..(121): Homolog of NCBI NO: 32401371 NR Description: dTDP-glucose-4-6-dehydratase-like protein
MCIDDGRVVSNFVAQALRKEPLTVYGDGKQTRSFQYVSDLVEGLMKLMEGEHVGPFNLGNPGEFTMLELAKVVQDTIDPNARIEFRKNTQDDPHKRKPDISRAKEFLGWEPKIPLREGLPLMVSDFRKRIFGDQDAAATTTGNQQG

SEQ ID NO: 15499 - DNA, 828 bp, Zea mays subsp. mays; identical to SEQ ID NO: 14873
  misc_feature (1)..(828): Ceres Seq. ID no. 12595473
  misc_feature: MA Experiment ID: 108532 Result: Up-regulated in Transcription
  misc_feature: MA Experiment 108532 PARAMETER Experiment Name: Zm_20uM_KNO3_H-to-L_P Parameter: Age (day) Value: 11
  misc_feature: MA Experiment 108532 PARAMETER Experiment Name: Zm_20uM_KNO3_H-to-L_P Parameter: Organism Value: Zea mays
  misc_feature: MA Experiment 108532 PARAMETER Experiment Name: Zm_20uM_KNO3_H-to-L_P Parameter: Plant Line Value: 35A19
  misc_feature: MA Experiment 108532 PARAMETER Experiment Name: Zm_20uM_KNO3_H-to-L_P Parameter: Timepoint (hr) Value: 16
  misc_feature: MA Experiment 108532 PARAMETER Experiment Name: Zm_20uM_KNO3_H-to-L_P Parameter: Tissue Value: Roots
  misc_feature: MA Experiment 108532 PARAMETER Experiment Name: Zm_20uM_KNO3_H-to-L_P Parameter: Treatment Value: 20uM KNO3 vs. 60mM KNO3
  misc_feature: MA Experiment ID: 20000535 Result: Up-regulated in Transcription
  misc_feature: MA Experiment 20000535 PARAMETER Experiment Name: Zm_Hybrid_Seed_Dev_P Parameter: DAP Value: 30 vs. 12
  misc_feature: MA Experiment 20000535 PARAMETER Experiment Name: Zm_Hybrid_Seed_Dev_P Parameter: Organism Value: Zea mays
  misc_feature: MA Experiment 20000535 PARAMETER Experiment Name: Zm_Hybrid_Seed_Dev_P Parameter: Plant Line Value: 35A19
  misc_feature: MA Experiment 20000535 PARAMETER Experiment Name: Zm_Hybrid_Seed_Dev_P Parameter: Tissue Value: Embryo vs. Unfert Floret

SEQ ID NO: 15500 - protein, 230 aa, Zea mays subsp. mays; identical to SEQ ID NO: 14874
  peptide (1)..(230): Ceres Seq. ID no. 12595474
  misc_feature (106)..(208): Pfam Name: Protease inhibitor/seed storage/LTP family Pfam Description: Protease inhibitor/seed storage/LTP family
  misc_feature (106)..(208): Pfam Name: Protease inhibitor/seed storage/LTP family Pfam Description: Protease inhibitor/seed storage/LTP family
  misc_feature (106)..(208): Pfam Name: Protease inhibitor/seed storage/LTP family Pfam Description: Protease inhibitor/seed storage/LTP family
  misc_feature (106)..(208): Pfam Name: Protease inhibitor/seed storage/LTP family Pfam Description: Protease inhibitor/seed storage/LTP family
  misc_feature (53)..(230): Homolog of NCBI NO: 16305115 NR Description: 15kD beta zein [Zea mays]
  misc_feature (53)..(230): Homolog of NCBI NO: 419803 NR Description: zein protein - maize >gi|168705|gb|AAA33543.1|
  misc_feature (53)..(230): Homolog of NCBI NO: 16305115 NR Description: 15kD beta zein [Zea mays]
  misc_feature (53)..(230): Homolog of NCBI NO: 168664 NR Description: zein protein precursor
  misc_feature (53)..(230): Homolog of NCBI NO: 16305115 NR Description: 15kD beta zein [Zea mays]
  misc_feature (53)..(230): Homolog of NCBI NO: 168664 NR Description: zein protein precursor
  misc_feature (53)..(230): Homolog of NCBI NO: 100552 NR Description: beta-coixin, 17K, precursor - Job's tears
  misc_feature (53)..(230): Homolog of NCBI NO: 141616 NR Description: ZEIN-BETA PRECURSOR (16 KD) (ZEIN 2) (CLONE 15A3)
  misc_feature (53)..(230): Homolog of NCBI NO: 168664 NR Description: zein protein precursor
  misc_feature (53)..(230): Homolog of NCBI NO: 419803 NR Description: zein protein - maize >gi|168705|gb|AAA33543.1|
  misc_feature (53)..(230): Homolog of NCBI NO: 16305115 NR Description: 15kD beta zein [Zea mays]
  misc_feature (53)..(230): Homolog of NCBI NO: 100552 NR Description: beta-coixin, 17K, precursor - Job's tears
  misc_feature (53)..(230): Homolog of NCBI NO: 141616 NR Description: ZEIN-BETA PRECURSOR (16 KD) (ZEIN 2) (CLONE 15A3)
  misc_feature (53)..(230): Homolog of NCBI NO: 419803 NR Description: zein protein - maize >gi|168705|gb|AAA33543.1|
  misc_feature (53)..(230): Homolog of NCBI NO: 100552 NR Description: beta-coixin, 17K, precursor - Job's tears
  misc_feature (53)..(230): Homolog of NCBI NO: 141616 NR Description: ZEIN-BETA PRECURSOR (16 KD) (ZEIN 2) (CLONE 15A3)
  misc_feature (53)..(230): Homolog of NCBI NO: 419803 NR Description: zein protein - maize >gi|168705|gb|AAA33543.1|
  misc_feature (53)..(230): Homolog of NCBI NO: 168664 NR Description: zein protein precursor
  misc_feature (53)..(230): Homolog of NCBI NO: 141616 NR Description: ZEIN-BETA PRECURSOR (16 KD) (ZEIN 2) (CLONE 15A3)
  misc_feature (53)..(230): Homolog of NCBI NO: 100552 NR Description: beta-coixin, 17K, precursor - Job's tears

SEQ ID NO: 15501 - protein, 222 aa, Zea mays subsp. mays; identical to SEQ ID NO: 14875
  peptide (1)..(222): Ceres Seq. ID no. 12595475
  misc_feature (98)..(200): Pfam Name: Protease inhibitor/seed storage/LTP family Pfam Description: Protease inhibitor/seed storage/LTP family
  misc_feature (98)..(200): Pfam Name: Protease inhibitor/seed storage/LTP family Pfam Description: Protease inhibitor/seed storage/LTP family
  misc_feature (98)..(200): Pfam Name: Protease inhibitor/seed storage/LTP family Pfam Description: Protease inhibitor/seed storage/LTP family
  misc_feature (98)..(200): Pfam Name: Protease inhibitor/seed storage/LTP family Pfam Description: Protease inhibitor/seed storage/LTP family
  misc_feature (45)..(222): Homolog of NCBI NO: 419803 NR Description: zein protein - maize >gi|168705|gb|AAA33543.1|
  misc_feature (45)..(222): Homolog of NCBI NO: 168664 NR Description: zein protein precursor
  misc_feature (45)..(222): Homolog of NCBI NO: 16305115 NR Description: 15kD beta zein [Zea mays]
  misc_feature (45)..(222): Homolog of NCBI NO: 168664 NR Description: zein protein precursor
  misc_feature (45)..(222): Homolog of NCBI NO: 16305115 NR Description: 15kD beta zein [Zea mays]
  misc_feature (45)..(222): Homolog of NCBI NO: 168664 NR Description: zein protein precursor
  misc_feature (45)..(222): Homolog of NCBI NO: 100552 NR Description: beta-coixin, 17K, precursor - Job's tears
  misc_feature (45)..(222): Homolog of NCBI NO: 141616 NR Description: ZEIN-BETA PRECURSOR (16 KD) (ZEIN 2) (CLONE 15A3)
  misc_feature (45)..(222): Homolog of NCBI NO: 168664 NR Description: zein protein precursor
  misc_feature (45)..(222): Homolog of NCBI NO: 419803 NR Description: zein protein - maize >gi|168705|gb|AAA33543.1|
  misc_feature (45)..(222): Homolog of NCBI NO: 16305115 NR Description: 15kD beta zein [Zea mays]
  misc_feature (45)..(222): Homolog of NCBI NO: 100552 NR Description: beta-coixin, 17K, precursor - Job's tears
  misc_feature (45)..(222): Homolog of NCBI NO: 141616 NR Description: ZEIN-BETA PRECURSOR (16 KD) (ZEIN 2) (CLONE 15A3)
  misc_feature (45)..(222): Homolog of NCBI NO: 419803 NR Description: zein protein - maize >gi|168705|gb|AAA33543.1|
  misc_feature (45)..(222): Homolog of NCBI NO: 100552 NR Description: beta-coixin, 17K, precursor - Job's tears
  misc_feature (45)..(222): Homolog of NCBI NO: 141616 NR Description: ZEIN-BETA PRECURSOR (16 KD) (ZEIN 2) (CLONE 15A3)
  misc_feature (45)..(222): Homolog of NCBI NO: 419803 NR Description: zein protein - maize >gi|168705|gb|AAA33543.1|
  misc_feature (45)..(222): Homolog of NCBI NO: 16305115 NR Description: 15kD beta zein [Zea mays]
  misc_feature (45)..(222): Homolog of NCBI NO: 141616 NR Description: ZEIN-BETA PRECURSOR (16 KD) (ZEIN 2) (CLONE 15A3)
  misc_feature (45)..(222): Homolog of NCBI NO: 100552 NR Description: beta-coixin, 17K, precursor - Job's tears

SEQ ID NO: 15502 - protein, 178 aa, Zea mays subsp. mays; identical to SEQ ID NO: 14876
  peptide (1)..(178): Ceres Seq. ID no. 12595476
  misc_feature (54)..(156): Pfam Name: Protease inhibitor/seed storage/LTP family Pfam Description: Protease inhibitor/seed storage/LTP family
  misc_feature (54)..(156): Pfam Name: Protease inhibitor/seed storage/LTP family Pfam Description: Protease inhibitor/seed storage/LTP family
  misc_feature (54)..(156): Pfam Name: Protease inhibitor/seed storage/LTP family Pfam Description: Protease inhibitor/seed storage/LTP family
  misc_feature (54)..(156): Pfam Name: Protease inhibitor/seed storage/LTP family Pfam Description: Protease inhibitor/seed storage/LTP family
  misc_feature (1)..(178): Homolog of NCBI NO: 16305115 NR Description: 15kD beta zein [Zea mays]
  misc_feature (1)..(178): Homolog of NCBI NO: 419803 NR Description: zein protein - maize >gi|168705|gb|AAA33543.1|
  misc_feature (1)..(178): Homolog of NCBI NO: 16305115 NR Description: 15kD beta zein [Zea mays]
  misc_feature (1)..(178): Homolog of NCBI NO: 168664 NR Description: zein protein precursor
  misc_feature (1)..(178): Homolog of NCBI NO: 16305115 NR Description: 15kD beta zein [Zea mays]
  misc_feature (1)..(178): Homolog of NCBI NO: 168664 NR Description: zein protein precursor
  misc_feature (1)..(178): Homolog of NCBI NO: 100552 NR Description: beta-coixin, 17K, precursor - Job's tears
  misc_feature (1)..(178): Homolog of NCBI NO: 141616 NR Description: ZEIN-BETA PRECURSOR (16 KD) (ZEIN 2) (CLONE 15A3)
  misc_feature (1)..(178): Homolog of NCBI NO: 168664 NR Description: zein protein precursor
  misc_feature (1)..(178): Homolog of NCBI NO: 419803 NR Description: zein protein - maize >gi|168705|gb|AAA33543.1|
  misc_feature (1)..(178): Homolog of NCBI NO: 16305115 NR Description: 15kD beta zein [Zea mays]
  misc_feature (1)..(178): Homolog of NCBI NO: 100552 NR Description: beta-coixin, 17K, precursor - Job's tears
  misc_feature (1)..(178): Homolog of NCBI NO: 141616 NR Description: ZEIN-BETA PRECURSOR (16 KD) (ZEIN 2) (CLONE 15A3)
  misc_feature (1)..(178): Homolog of NCBI NO: 419803 NR Description: zein protein - maize >gi|168705|gb|AAA33543.1|
  misc_feature (1)..(178): Homolog of NCBI NO: 100552 NR Description: beta-coixin, 17K, precursor - Job's tears
  misc_feature (1)..(178): Homolog of NCBI NO: 141616 NR Description: ZEIN-BETA PRECURSOR (16 KD) (ZEIN 2) (CLONE 15A3)
  misc_feature (1)..(178): Homolog of NCBI NO: 419803 NR Description: zein protein - maize >gi|168705|gb|AAA33543.1|
  misc_feature (1)..(178): Homolog of NCBI NO: 168664 NR Description: zein protein precursor
  misc_feature (1)..(178): Homolog of NCBI NO: 141616 NR Description: ZEIN-BETA PRECURSOR (16 KD) (ZEIN 2) (CLONE 15A3)
  misc_feature (1)..(178): Homolog of NCBI NO: 100552 NR Description: beta-coixin, 17K, precursor - Job's tears

SEQ ID NO: 15503 - DNA, 608 bp, Zea mays subsp. mays
  misc_feature (1)..(608): Ceres Seq. ID no. 13600372
  misc_feature: MA Experiment ID: 108515 Result: Down-regulated in Transcription
  misc_feature: MA Experiment 108515 PARAMETER Experiment Name: Zm_2mM_SA_P Parameter: Age (day) Value: 8
  misc_feature: MA Experiment 108515 PARAMETER Experiment Name: Zm_2mM_SA_P Parameter: Organism Value: Zea mays
  misc_feature: MA Experiment 108515 PARAMETER Experiment Name: Zm_2mM_SA_P Parameter: Plant Line Value: 35A19
  misc_feature: MA Experiment 108515 PARAMETER Experiment Name: Zm_2mM_SA_P Parameter: Timepoint (hr) Value: 12
  misc_feature: MA Experiment 108515 PARAMETER Experiment Name: Zm_2mM_SA_P Parameter: Tissue Value: Aerial
  misc_feature: MA Experiment 108515 PARAMETER Experiment Name: Zm_2mM_SA_P Parameter: Treatment Value: 2mM SA vs. No Treatment
  misc_feature: MA Experiment ID: 108523 Result: Down-regulated in Transcription
  misc_feature: MA Experiment 108523 PARAMETER Experiment Name: Zm_42deg_Heat_P Parameter: Age (day) Value: 8
  misc_feature: MA Experiment 108523 PARAMETER Experiment Name: Zm_42deg_Heat_P Parameter: Organism Value: Zea mays
  misc_feature: MA Experiment 108523 PARAMETER Experiment Name: Zm_42deg_Heat_P Parameter: Plant Line Value: 35A19
  misc_feature: MA Experiment 108523 PARAMETER Experiment Name: Zm_42deg_Heat_P Parameter: Temperature (deg C) Value: 42 vs. 22
  misc_feature: MA Experiment 108523 PARAMETER Experiment Name: Zm_42deg_Heat_P Parameter: Timepoint (hr) Value: 6
  misc_feature: MA Experiment 108523 PARAMETER Experiment Name: Zm_42deg_Heat_P Parameter: Tissue Value: Aerial
  misc_feature: MA Experiment ID: 108535 Result: Up-regulated in Transcription
  misc_feature: MA Experiment 108535 PARAMETER Experiment Name: Zm_Meristem_P Parameter: Age (day) Value: 8
  misc_feature: MA Experiment 108535 PARAMETER Experiment Name: Zm_Meristem_P Parameter: Organism Value: Zea mays
  misc_feature: MA Experiment 108535 PARAMETER Experiment Name: Zm_Meristem_P Parameter: Plant Line Value: 35A19
  misc_feature: MA Experiment 108535 PARAMETER Experiment Name: Zm_Meristem_P Parameter: Tissue Value: Root Meristem vs. Above Root Meristem
  misc_feature: MA Experiment ID: 108544 Result: Down-regulated in Transcription
  misc_feature: MA Experiment ID: 108597 Result: Down-regulated in Transcription
  misc_feature: MA Experiment 108597 PARAMETER Experiment Name: Zm_100uM_ABA_P Parameter: Age (day) Value: 9
  misc_feature: MA Experiment 108597 PARAMETER Experiment Name: Zm_100uM_ABA_P Parameter: Organism Value: Zea mays
  misc_feature: MA Experiment 108597 PARAMETER Experiment Name: Zm_100uM_ABA_P Parameter: Plant Line Value: 35A19
  misc_feature: MA Experiment 108597 PARAMETER Experiment Name: Zm_100uM_ABA_P Parameter: Timepoint (hr) Value: 24
  misc_feature: MA Experiment 108597 PARAMETER Experiment Name: Zm_100uM_ABA_P Parameter: Tissue Value: Aerial
  misc_feature: MA Experiment 108597 PARAMETER Experiment Name: Zm_100uM_ABA_P Parameter: Treatment Value: 100uM ABA vs. No Treatment
  misc_feature: MA Experiment ID: 20000477 Result: Down-regulated in Transcription
  misc_feature: MA Experiment 20000477 PARAMETER Experiment Name: Zm_5mM_SA_P Parameter: Age (day) Value: 10
  misc_feature: MA Experiment 20000477 PARAMETER Experiment Name: Zm_5mM_SA_P Parameter: Organism Value: Zea mays
  misc_feature: MA Experiment 20000477 PARAMETER Experiment Name: Zm_5mM_SA_P Parameter: Plant Line Value: 35A19
  misc_feature: MA Experiment 20000477 PARAMETER Experiment Name: Zm_5mM_SA_P Parameter: Timepoint (hr) Value: 48
  misc_feature: MA Experiment 20000477 PARAMETER Experiment Name: Zm_5mM_SA_P Parameter: Tissue Value: Aerial
  misc_feature: MA Experiment 20000477 PARAMETER Experiment Name: Zm_5mM_SA_P Parameter: Treatment Value: 5mM SA vs. No Treatment
  misc_feature: MA Experiment ID: 20000478 Result: Down-regulated in Transcription
  misc_feature: MA Experiment 20000478 PARAMETER Experiment Name: Zm_5mM_SA_P Parameter: Age (day) Value: 11
  misc_feature: MA Experiment 20000478 PARAMETER Experiment Name: Zm_5mM_SA_P Parameter: Organism Value: Zea mays
  misc_feature: MA Experiment 20000478 PARAMETER Experiment Name: Zm_5mM_SA_P Parameter: Plant Line Value: 35A19
  misc_feature: MA Experiment 20000478 PARAMETER Experiment Name: Zm_5mM_SA_P Parameter: Timepoint (hr) Value: 72
  misc_feature: MA Experiment 20000478 PARAMETER Experiment Name: Zm_5mM_SA_P Parameter: Tissue Value: Aerial
  misc_feature: MA Experiment 20000478 PARAMETER Experiment Name: Zm_5mM_SA_P Parameter: Treatment Value: 5mM SA vs. No Treatment
  misc_feature: MA Experiment ID: 20000479 Result: Down-regulated in Transcription
  misc_feature: MA Experiment 20000479 PARAMETER Experiment Name: Zm_Drought_P Parameter: Age (day) Value: 10
  misc_feature: MA Experiment 20000479 PARAMETER Experiment Name: Zm_Drought_P Parameter: Organism Value: Zea mays
  misc_feature: MA Experiment 20000479 PARAMETER Experiment Name: Zm_Drought_P Parameter: Plant Line Value: 35A19
  misc_feature: MA Experiment 20000479 PARAMETER Experiment Name: Zm_Drought_P Parameter: Timepoint (hr) Value: 48
  misc_feature: MA Experiment 20000479 PARAMETER Experiment Name: Zm_Drought_P Parameter: Tissue Value: Aerial
  misc_feature: MA Experiment 20000479 PARAMETER Experiment Name: Zm_Drought_P Parameter: Treatment Value: Drought vs. No Drought
  misc_feature: MA Experiment ID: 20000632 Result: Down-regulated in Transcription
  misc_feature: MA Experiment 20000632 PARAMETER Experiment Name: Zm_Herbicide-Treatments_P Parameter: Timepoint (hr) Value: 4
  misc_feature: MA Experiment 20000632 PARAMETER Experiment Name: Zm_Herbicide-Treatments_P Parameter: Tissue Value: Aerial
  misc_feature: MA Experiment 20000632 PARAMETER Experiment Name: Zm_Herbicide-Treatments_P Parameter: Treatment Value: Glean vs. No Treatment
  misc_feature: MA Experiment ID: 20000633 Result: Down-regulated in Transcription
  misc_feature: MA Experiment 20000633 PARAMETER Experiment Name: Zm_Herbicide-Treatments_P Parameter: Timepoint (hr) Value: 4
  misc_feature: MA Experiment 20000633 PARAMETER Experiment Name: Zm_Herbicide-Treatments_P Parameter: Tissue Value: Aerial
  misc_feature: MA Experiment 20000633 PARAMETER Experiment Name: Zm_Herbicide-Treatments_P Parameter: Treatment Value: Trimec vs. No Treatment
gaccagtcctccaacctcccagcgaacccaccccacacctttccccggcgaagcagcagcagccgcagcggcatccatggcccccaaggcggagaagaagccggtggcggagaaggccgagaagaccactgcggcgaagaagaccaaggccgagaagcggccgccggcgtccaaggagggcggcgagaagaagggcaagaagaagtcgaagaagagcgtggagacgtacaagatctacatcttcaaggtgctgaagcaggtgcacccggacatcggcatctcctccaaggccatgtccatcatgaactccttcatcaacgacatcttcgagaagctcgccggcgagtccgccaagctcgcccgctacaacaagaagcccaccatcacgtcccgggagatccagacctccgtccgcctcgtcctccccggcgagctcgccaagcacgccgtctccgagggcaccaaggccgtcaccaagttcacctccgcttagatagtctgttccggtttcttggtcgatcgatggtactctgtaatagtcatgtgttcggaccatgtcgtcttgtaagtgtttcattatcttgtgaaatagtaatggcgcttctttg

SEQ ID NO: 15504 - protein, 202 aa, Zea mays subsp. mays
  peptide (1)..(202): Ceres Seq. ID no. 13600373
  misc_feature (57)..(161): Homolog of NCBI NO: 17505204 NR Description: histone 1, H2bc; H2B histone family, member S musculus] >gi|12837582|dbj|BAB23873.1| unnamed protein product
DQSSNLPANPPHTFPRRSSSSRSGIHGPQGGEEAGGGEGREDHCGEEDQGREAAAGVQGGRREEGQEEVEEERGDVQDLHLQGAEAGAPGHRHLLQGHVHHELLHQRHLREARRRVRQARPLQQEAHHHVPGDPDLRPPRPPRRARQARRLRGHQGRHQVHLRLDSLFRFLGRSMVLCNSHVFGPCRLVSVSLSCEIVMALL

SEQ ID NO: 15505 - protein, 163 aa, Zea mays subsp. mays
  peptide (1)..(163): Ceres Seq. ID no. 13600374
  misc_feature (39)..(163): Pfam Name: Core histone H2A/H2B/H3/H4 Pfam Description: Core histone H2A/H2B/H3/H4
  misc_feature (26)..(163): Homolog of NCBI NO: 1362184 NR Description: histone H2B-8 - wheat >gi|531058|dbj|BAA07157.1|
  misc_feature (26)..(163): Homolog of NCBI NO: 1362186 NR Description: histone H2B153 - wheat >gi|531054|dbj|BAA07159.1|
  misc_feature (26)..(163): Homolog of NCBI NO: 122022 NR Description: Histone H2B >gi|283025|pir||S22323 histone H2B -
  misc_feature (26)..(163): Homolog of NCBI NO: 1346251 NR Description: Histone H2B.4 >gi|7439750|pir||T02035 histone H2B
  misc_feature (26)..(163): Homolog of NCBI NO: 34908130 NR Description: putative histone H2B [Oryza sativa (japonica group)] >gi|15623830|dbj|BAB67889.1| putative histone H2B [Oryza
  misc_feature (26)..(163): Homolog of NCBI NO: 399853 NR Description: Histone H2B.1 >gi|283041|pir||S28048 histone H2B
  misc_feature (26)..(163): Homolog of NCBI NO: 3913804 NR Description: Histone H2B.3 >gi|577825|emb|CAA49584.1| H2B
  misc_feature (26)..(163): Homolog of NCBI NO: 399854 NR Description: Histone H2B.2 >gi|283042|pir||S28049 histone H2B
  misc_feature (26)..(163): Homolog of NCBI NO: 1708107 NR Description: Histone H2B >gi|7439752|pir||T02077 histone H2B -
  misc_feature (26)..(163): Homolog of NCBI NO: 1362183 NR Description: histone H2B-6 - wheat >gi|531056|dbj|BAA07156.1|
TSPPTSQRTHPTPFPGEAAAAAAASMAPKAEKKPVAEKAEKTTAAKKTKAEKRPPASKEGGEKKGKKKSKKSVETYKIYIFKVLKQVHPDIGISSKAMSIMNSFINDIFEKLAGESAKLARYNKKPTITSREIQTSVRLVLPGELAKHAVSEGTKAVTKFTSA

SEQ ID NO: 15506 - protein, 138 aa, Zea mays subsp. mays
  peptide (1)..(138): Ceres Seq. ID no. 13600375
  misc_feature (14)..(138): Pfam Name: Core histone H2A/H2B/H3/H4 Pfam Description: Core histone H2A/H2B/H3/H4
  misc_feature (1)..(138): Homolog of NCBI NO: 1362184 NR Description: histone H2B-8 - wheat >gi|531058|dbj|BAA07157.1|
  misc_feature (1)..(138): Homolog of NCBI NO: 1362186 NR Description: histone H2B153 - wheat >gi|531054|dbj|BAA07159.1|
  misc_feature (1)..(138): Homolog of NCBI NO: 122022 NR Description: Histone H2B >gi|283025|pir||S22323 histone H2B -
  misc_feature (1)..(138): Homolog of NCBI NO: 1346251 NR Description: Histone H2B.4 >gi|7439750|pir||T02035 histone H2B
  misc_feature (1)..(138): Homolog of NCBI NO: 34908130 NR Description: putative histone H2B [Oryza sativa (japonica group)] >gi|15623830|dbj|BAB67889.1| putative histone H2B [Oryza
  misc_feature (1)..(138): Homolog of NCBI NO: 399853 NR Description: Histone H2B.1 >gi|283041|pir||S28048 histone H2B
  misc_feature (1)..(138): Homolog of NCBI NO: 3913804 NR Description: Histone H2B.3 >gi|577825|emb|CAA49584.1| H2B
  misc_feature (1)..(138): Homolog of NCBI NO: 399854 NR Description: Histone H2B.2 >gi|283042|pir||S28049 histone H2B
  misc_feature (1)..(138): Homolog of NCBI NO: 1708107 NR Description: Histone H2B >gi|7439752|pir||T02077 histone H2B -
  misc_feature (1)..(138): Homolog of NCBI NO: 1362183 NR Description: histone H2B-6 - wheat >gi|531056|dbj|BAA07156.1|
MAPKAEKKPVAEKAEKTTAAKKTKAEKRPPASKEGGEKKGKKKSKKSVETYKIYIFKVLKQVHPDIGISSKAMSIMNSFINDIFEKLAGESAKLARYNKKPTITSREIQTSVRLVLPGELAKHAVSEGTKAVTKFTSA

SEQ ID NO: 15507 - DNA, 437 bp, Zea mays subsp. mays
  misc_feature (1)..(437): Ceres Seq. ID no. 7119037
  misc_feature: MA Experiment ID: 108530 Result: Down-regulated in Transcription
  misc_feature: MA Experiment 108530 PARAMETER Experiment Name: Zm_Imbibed_Seeds_P Parameter: Age (day) Value: 6 vs. 2
  misc_feature: MA Experiment 108530 PARAMETER Experiment Name: Zm_Imbibed_Seeds_P Parameter: Organism Value: Zea mays
  misc_feature: MA Experiment 108530 PARAMETER Experiment Name: Zm_Imbibed_Seeds_P Parameter: Plant Line Value: 35A19
  misc_feature: MA Experiment 108530 PARAMETER Experiment Name: Zm_Imbibed_Seeds_P Parameter: Tissue Value: Aerial vs. Embryo
  misc_feature: MA Experiment ID: 108535 Result: Up-regulated in Transcription
  misc_feature: MA Experiment 108535 PARAMETER Experiment Name: Zm_Meristem_P Parameter: Age (day) Value: 8
  misc_feature: MA Experiment 108535 PARAMETER Experiment Name: Zm_Meristem_P Parameter: Organism Value: Zea mays
  misc_feature: MA Experiment 108535 PARAMETER Experiment Name: Zm_Meristem_P Parameter: Plant Line Value: 35A19
  misc_feature: MA Experiment 108535 PARAMETER Experiment Name: Zm_Meristem_P Parameter: Tissue Value: Root Meristem vs. Above Root Meristem
  misc_feature: MA Experiment ID: 20000487 Result: Up-regulated in Transcription
  misc_feature: MA Experiment 20000487 PARAMETER Experiment Name: Zm_50mM_NH4NO3_L_to_H_P Parameter: Organism Value: Zea mays
  misc_feature: MA Experiment 20000487 PARAMETER Experiment Name: Zm_50mM_NH4NO3_L_to_H_P Parameter: Timepoint (hr) Value: 4
  misc_feature: MA Experiment 20000487 PARAMETER Experiment Name: Zm_50mM_NH4NO3_L_to_H_P Parameter: Tissue Value: Leaves
  misc_feature: MA Experiment 20000487 PARAMETER Experiment Name: Zm_50mM_NH4NO3_L_to_H_P Parameter: Treatment Value: 50mM NH4NO3 vs. 100mM Mannitol
  misc_feature: MA Experiment ID: 20000488 Result: Up-regulated in Transcription
  misc_feature: MA Experiment 20000488 PARAMETER Experiment Name: Zm_50mM_NH4NO3_L_to_H_P Parameter: Organism Value: Zea mays
  misc_feature: MA Experiment 20000488 PARAMETER Experiment Name: Zm_50mM_NH4NO3_L_to_H_P Parameter: Timepoint (hr) Value: 8
  misc_feature: MA Experiment 20000488 PARAMETER Experiment Name: Zm_50mM_NH4NO3_L_to_H_P Parameter: Tissue Value: Leaves
  misc_feature: MA Experiment 20000488 PARAMETER Experiment Name: Zm_50mM_NH4NO3_L_to_H_P Parameter: Treatment Value: 50mM NH4NO3 vs. 100mM Mannitol
  misc_feature: MA Experiment ID: 20000492 Result: Up-regulated in Transcription
  misc_feature: MA Experiment 20000492 PARAMETER Experiment Name: Zm_Hybrid_Seed_Dev_P Parameter: DAP Value: 12
  misc_feature: MA Experiment 20000492 PARAMETER Experiment Name: Zm_Hybrid_Seed_Dev_P Parameter: Organism Value: Zea mays
  misc_feature: MA Experiment 20000492 PARAMETER Experiment Name: Zm_Hybrid_Seed_Dev_P Parameter: Plant Line Value: 35A19
  misc_feature: MA Experiment 20000492 PARAMETER Experiment Name: Zm_Hybrid_Seed_Dev_P Parameter: Tissue Value: Fert Kernel vs. Unfert Floret
tccgccgccacccgaaaccccgacccgcgccgcctcgccgccgcgctaccagcagccaagcacaccgccgcgctcacagcaaccaagcacaccgccgcagccaccatggcagccgttctcacccgcccgacgccgggcaccgtccagtgcttcggccggaagaagaccgccgtcgccgtggcctactgcaagcccgggcgcggcctcatcaaggtcaacggcgcgccgatcgagctcatccgccctgagatgctccgtctgaaggccttcgagccgatcctgcttgccggcaggtcccgcttcaaggacatcgacatgcgcatccgcgttcgcggcgncggnaagacgagccagatctactccatccgccaggccatcgccaagtcgctcgtcgcctactaccagaagtacgtcgacgaggcggcccaagaaggagg

SEQ ID NO: 15508 - protein, 145 aa, Zea mays subsp. mays
  peptide (1)..(145): Ceres Seq. ID no. 7119038
  misc_feature (52)..(144): Pfam Name: Ribosomal protein S9/S16 Pfam Description: Ribosomal protein S9/S16
  misc_feature (36)..(144): Homolog of NCBI NO: 1172818 NR Description: 40S RIBOSOMAL PROTEIN S16 >gi|7440266|pir||T04083
  misc_feature (44)..(144): Homolog of NCBI NO: 3122800 NR Description: 40S RIBOSOMAL PROTEIN S16
  misc_feature (43)..(144): Homolog of NCBI NO: 6984222 NR Description: 40S ribosomal protein S16 [Euphorbia esula]
  misc_feature (47)..(144): Homolog of NCBI NO: 1173209 NR Description: 40S RIBOSOMAL PROTEIN S16 >gi|541835|pir||S41193
  misc_feature (41)..(144): Homolog of NCBI NO: 15226676 NR Description: 40S ribosomal protein S16; protein id: supported by cDNA: 29241., supported by cDNA: gi_13926207 thaliana] >gi|25294609|pir||E84489 40S ribosomal protein S16
  misc_feature (41)..(144): Homolog of NCBI NO: 15238809 NR Description: 40S RIBOSOMAL PROTEIN S16; protein id: supported by cDNA: gi_13877830, supported by cDNA: gi_16323499
  misc_feature (41)..(144): Homolog of NCBI NO: 15229252 NR Description: putative 40S ribosomal protein S16; protein id: [Arabidopsis thaliana] >gi|6721162|gb|AAF26790.1|AC016829_14
  misc_feature (47)..(144): Homolog of NCBI NO: 17369864 NR Description: 40S ribosomal protein S16
  misc_feature (44)..(143): Homolog of NCBI NO: 17563670 NR Description: Ribosomal Protein, Small subunit RPS-16 (16.3 kD) [Caenorhabditis elegans] >gi|2500429|sp|Q22054|RS16_CAEEL 40S
  misc_feature (44)..(143): Homolog of NCBI NO: 39583364 NR Description: Hypothetical protein CBG11589 [Caenorhabditis
  misc_feature (113)..(113): Xaa is any aa, unknown or other
  misc_feature (114)..(114): Xaa is any aa, unknown or other
SAATRNPDPRRLAAALPAAKHTAALTATKHTAAATMAAVLTRPTPGTVQCFGRKKTAVAVAYCKPGRGLIKVNGAPIELIRPEMLRLKAFEPILLAGRSRFKDIDMRIRVRGXXKTSQIYSIRQAIAKSLVAYYQKYVDEAAQEG

SEQ ID NO: 15509 - protein, 110 aa, Zea mays subsp. mays
  peptide (1)..(110): Ceres Seq. ID no. 7119039
  misc_feature (17)..(109): Pfam Name: Ribosomal protein S9/S16 Pfam Description: Ribosomal protein S9/S16
  misc_feature (9)..(108): Homolog of NCBI NO: 39583364 NR Description: Hypothetical protein CBG11589 [Caenorhabditis
  misc_feature (1)..(109): Homolog of NCBI NO: 1172818 NR Description: 40S RIBOSOMAL PROTEIN S16 >gi|7440266|pir||T04083
  misc_feature (9)..(109): Homolog of NCBI NO: 3122800 NR Description: 40S RIBOSOMAL PROTEIN S16
  misc_feature (8)..(109): Homolog of NCBI NO: 6984222 NR Description: 40S ribosomal protein S16 [Euphorbia esula]
  misc_feature (12)..(109): Homolog of NCBI NO: 1173209 NR Description: 40S RIBOSOMAL PROTEIN S16 >gi|541835|pir||S41193
  misc_feature (6)..(109): Homolog of NCBI NO: 15226676 NR Description: 40S ribosomal protein S16; protein id: supported by cDNA: 29241., supported by cDNA: gi_13926207 thaliana] >gi|25294609|pir||E84489 40S ribosomal protein S16
  misc_feature (6)..(109): Homolog of NCBI NO: 15238809 NR Description: 40S RIBOSOMAL PROTEIN S16; protein id: supported by cDNA: gi_13877830, supported by cDNA: gi_16323499
  misc_feature (6)..(109): Homolog of NCBI NO: 15229252 NR Description: putative 40S ribosomal protein S16; protein id: [Arabidopsis thaliana] >gi|6721162|gb|AAF26790.1|AC016829_14
  misc_feature (12)..(109): Homolog of NCBI NO: 17369864 NR Description: 40S ribosomal protein S16
  misc_feature (9)..(108): Homolog of NCBI NO: 17563670 NR Description: Ribosomal Protein, Small subunit RPS-16 (16.3 kD) [Caenorhabditis elegans] >gi|2500429|sp|Q22054|RS16_CAEEL 40S
  misc_feature (78)..(78): Xaa is any aa, unknown or other
  misc_feature (79)..(79): Xaa is any aa, unknown or other
MAAVLTRPTPGTVQCFGRKKTAVAVAYCKPGRGLIKVNGAPIELIRPEMLRLKAFEPILLAGRSRFKDIDMRIRVRGXXKTSQIYSIRQAIAKSLVAYYQKYVDEAAQEG

SEQ ID NO: 15510 - protein, 86 aa, Zea mays subsp. mays
  peptide (1)..(86): Ceres Seq. ID no. 7119040
  misc_feature (2)..(60): Pfam Name: Rieske [2Fe-2S] domain Pfam Description: Rieske [2Fe-2S] domain
  misc_feature (1)..(86): Homolog of NCBI NO: 32422095 NR Description: predicted protein [Neurospora crassa]
  misc_feature (2)..(86): Homolog of NCBI NO: 15226023 NR Description: putative extensin; protein id: At2g46630.1
  misc_feature (2)..(86): Homolog of NCBI NO: 11360318 NR Description: probable mucin DKFZp434C196.1 - human (fragment)
  misc_feature (1)..(86): Homolog of NCBI NO: 81286 NR Description: extensin - Volvox carteri (fragment)
  misc_feature (7)..(86): Homolog of NCBI NO: 15226023 NR Description: putative extensin; protein id: At2g46630.1
  misc_feature (2)..(86): Homolog of NCBI NO: 2429362 NR Description: proline rich protein [Santalum album]
  misc_feature (1)..(86): Homolog of NCBI NO: 27375632 NR Description: blr0521 [Bradyrhizobium japonicum]
  misc_feature (3)..(86): Homolog of NCBI NO: 12851999 NR Description: unnamed protein product [Mus musculus]
  misc_feature (1)..(86): Homolog of NCBI NO: 15419013 NR Description: subtilisin-like protein [Toxoplasma gondii]
  misc_feature (3)..(86): Homolog of NCBI NO: 26346793 NR Description: unnamed protein product [Mus musculus]
PPPPETPTRAASPPRYQQPSTPPRSQQPSTPPQPPWQPFSPARRRAPSSASAGRRPPSPWPTASPGAASSRSTARRSSSSALRCSV

SEQ ID NO: 15511 - DNA, 738 bp, Zea mays subsp. mays
  misc_feature (1)..(738): Ceres Seq. ID no. 12636857
  misc_feature: MA Experiment ID: 108543 Result: Down-regulated in Transcription
  misc_feature: MA Experiment ID: 20000535 Result: Up-regulated in Transcription
  misc_feature: MA Experiment 20000535 PARAMETER Experiment Name: Zm_Hybrid_Seed_Dev_P Parameter: DAP Value: 30 vs. 12
  misc_feature: MA Experiment 20000535 PARAMETER Experiment Name: Zm_Hybrid_Seed_Dev_P Parameter: Organism Value: Zea mays
  misc_feature: MA Experiment 20000535 PARAMETER Experiment Name: Zm_Hybrid_Seed_Dev_P Parameter: Plant Line Value: 35A19
  misc_feature: MA Experiment 20000535 PARAMETER Experiment Name: Zm_Hybrid_Seed_Dev_P Parameter: Tissue Value: Embryo vs. Unfert Floret
accggatcaccagcctacagctcgtcacatctctctctccgcccggccggcctctagactcactctagccatatggccacggtgcacggcagcaggctcatcttcctcttcgaggccacgctcttctcggcgctgctgctcgtcccggcacgccctgcttccgccacagacggcagcgcgtacccggccggcgactgcccctacccgtgcctgccgccgcccgccgtcaccgccaactgcccgccgcctccgccggctgcggcgtcgtactcgtacccgccaccgccgggggcttacattccctacttccagcctgcggcgggtggcggtggtggcggcggtagtggggggtacggcggctacccggcgccgccgccgcccaaccccatcctgccgtggtacccatggtactacaagacgccgccgtcgtcctcggccgccacgtcgggcagggggagtcgcgttcttcttgggtcggccgccatggtagctgctgctgccctgctgatcatggcttagccgcagcccgcagcagtcgttctttttgcatcttcgatcttgtcctctcccccaggttttctttctttttttcttttgttgatttactgctcaggatttatattcagaggtatatatataacgaggcagcattatatatattgcttgtactcctaatttatcagctacatgtctctagttccatgattaaaatgattaccactcaactttgagtagtgg

SEQ ID NO: 15512 - protein, 162 aa, Zea mays subsp. mays; identical to SEQ ID NO: 14890
  peptide (1)..(162): Ceres Seq. ID no. 12636858

SEQ ID NO: 15513 - protein, 148 aa, Zea mays subsp. mays; identical to SEQ ID NO: 14891
  peptide (1)..(148): Ceres Seq. ID no. 12636859
  misc_feature (43)..(118): Pfam Name: Extensin-like region Pfam Description: Extensin-like region
  misc_feature (17)..(146): Homolog of NCBI NO: 34894212 NR Description: P0439B06.27 [Oryza sativa (japonica
  misc_feature (1)..(123): Homolog of NCBI NO: 18423010 NR Description: expressed protein; protein id: At5g49280.1, by cDNA: 147765. [Arabidopsis thaliana] gene_id:K21P3.16~unknown protein [Arabidopsis thaliana]
  misc_feature (17)..(139): Homolog of NCBI NO: 18397707 NR Description: expressed protein; protein id: At3g06750.1, by cDNA: gi_14532647, supported by cDNA: gi_21281033 [Arabidopsis
  misc_feature (42)..(145): Homolog of NCBI NO: 18409730 NR Description: Expressed protein; protein id: At1g70985.1, by cDNA: 102374. [Arabidopsis thaliana]
  misc_feature (42)..(147): Homolog of NCBI NO: 15220010 NR Description: unknown protein; protein id: At1g23050.1
  misc_feature (1)..(131): Homolog of NCBI NO: 15234820 NR Description: extensin like protein; protein id: At4g16140.1
  misc_feature (58)..(143): Homolog of NCBI NO: 34894480 NR Description: OJ1116_C07.3 [Oryza sativa (japonica
  misc_feature (38)..(141): Homolog of NCBI NO: 18422542 NR Description: expressed protein; protein id: At5g45350.1, by cDNA: 22538., supported by cDNA: gi_15529251 [Arabidopsis
  misc_feature (29)..(137): Homolog of NCBI NO: 7510074 NR Description: hypothetical protein Y50E8A.g - Caenorhabditis
  misc_feature (29)..(137): Homolog of NCBI NO: 7510074 NR Description: hypothetical protein Y50E8A.g - Caenorhabditis

SEQ ID NO: 15514 - protein, 108 aa, Zea mays subsp. mays; identical to SEQ ID NO: 14892
  peptide (1)..(108): Ceres Seq. ID no. 12636860

SEQ ID NO: 15515 - DNA, 1192 bp, Zea mays subsp. mays
  misc_feature (1)..(1192): Ceres Seq. ID no. 15178969
  misc_feature: MA Experiment ID: 108529 Result: Down-regulated in Transcription
  misc_feature: MA Experiment 108529 PARAMETER Experiment Name: Zm_Imbibed_Seeds_P Parameter: Age (day) Value: 5 vs. 2
  misc_feature: MA Experiment 108529 PARAMETER Experiment Name: Zm_Imbibed_Seeds_P Parameter: Organism Value: Zea mays
  misc_feature: MA Experiment 108529 PARAMETER Experiment Name: Zm_Imbibed_Seeds_P Parameter: Plant Line Value: 35A19
  misc_feature: MA Experiment 108529 PARAMETER Experiment Name: Zm_Imbibed_Seeds_P Parameter: Tissue Value: Roots vs. Embryo
  misc_feature: MA Experiment ID: 108543 Result: Down-regulated in Transcription
  misc_feature: MA Experiment ID: 108688 Result: Down-regulated in Transcription
  misc_feature: MA Experiment 108688 PARAMETER Experiment Name: Zm_Embryos-Flowers__P Parameter: Tissue Value: Immature Flowers vs. Aerial+
  misc_feature: MA Experiment ID: 20000492 Result: Up-regulated in Transcription
  misc_feature: MA Experiment 20000492 PARAMETER Experiment Name: Zm_Hybrid_Seed_Dev_P Parameter: DAP Value: 12
  misc_feature: MA Experiment 20000492 PARAMETER Experiment Name: Zm_Hybrid_Seed_Dev_P Parameter: Organism Value: Zea mays
  misc_feature: MA Experiment 20000492 PARAMETER Experiment Name: Zm_Hybrid_Seed_Dev_P Parameter: Plant Line Value: 35A19
  misc_feature: MA Experiment 20000492 PARAMETER Experiment Name: Zm_Hybrid_Seed_Dev_P Parameter: Tissue Value: Fert Kernel vs. Unfert Floret
attccattccattccacacaaggctaggcacaagcgaaccaaacccatggcgtccgacggcagcggcgtggtgacggtgtacggcagcaacggcgcggagctgctggagccgtccaagcagcccaagtcggcgactttctccgtcaaggtggggctggcgcagatgctccggggcggggtcatcatggacgtggtgaccccggagcaggcgcgcctcgcggaggaggccggcgcgtgcgccgtgatggcgctggagcgggtccccgccgacatccgcgcgcagggcggcgtggcgcgcatgtcggacccgggcctcatccgcgacatcaagcgcgccgtcaccatcccggtcatggccaaggcccgcatcgggcacttcgtggaggcccagatcctggaggccgtgggcgtcgactacgtggacgagagcgaggtgctgacccccgccgacgacgcgcaccacatcaacaagcacaacttccgcgtccccttcgtctgcggctgccgcgacctcggcgaggcgctccgcagggtgcgcgagggcgccgccatgatccgcaccaagggggaggccggcacgggcaacgtcgtcgaggccgtgcgccacgtgcgctccgtcatgggcgacgtccgcgcgctccgcagcatggacgacgacgaggtcttcgcctacgccaagcgcatcgccgcgccctacgacctcgtcatgcagaccaagcagctgggccgcctccccgtcgtgcagttcgccgcggggggtgtcgccacgcccgccgacgccgcgctcatgatgcagctcggatgcgacggcgtcttcgtcggctcgggcatcttcaagagcggcgaccccgcgcgccgcgcccgcgccatcgtccaggcagtcacccactacagcgaccccaccatcctggccgacgtcagcacggggctcggggaggccatggtcggcatcaacctcaacgaccccaaggtggaacgatacgccgccagatccgagtgaaccctttctttccgtagtcatctccatccatctgccttggattgcatttccgtcgtctcatgtctctcaatcagtaataatggaatgaatgaaatggtaagaaacaaagctatggtactatgcagaacctctttcattttgtgctactgtactaagttagcctagtcccccccaccctggattatcatgttg

SEQ ID NO: 15516 - protein, 332 aa, Zea mays subsp. mays
  peptide (1)..(332): Ceres Seq. ID no. 15178970
  misc_feature (45)..(251): Pfam Name: SOR/SNZ family Pfam Description: SOR/SNZ family
  misc_feature (16)..(332): Homolog of NCBI NO: 34394152 NR Description: putative ethylene-inducible protein [Oryza sativa
  misc_feature (16)..(332): Homolog of NCBI NO: 37530308 NR Description: putative pyridoxine/pyridoxal 5-phosphate
  misc_feature (20)..(332): Homolog of NCBI NO: 2501578 NR Description: ETHYLENE-INDUCIBLE PROTEIN HEVER
  misc_feature (19)..(332): Homolog of NCBI NO: 15240972 NR Description: pyridoxine biosynthesis protein - like
  misc_feature (16)..(332): Homolog of NCBI NO: 10719739 NR Description: putative pyridoxine biosynthetic enzyme
  misc_feature (19)..(332): Homolog of NCBI NO: 21617922 NR Description: pyridoxine biosynthesis protein-like [Arabidopsis
  misc_feature (16)..(332): Homolog of NCBI NO: 13310484 NR Description: Sor-like protein [Ginkgo biloba]
  misc_feature (20)..(332): Homolog of NCBI NO: 15224470 NR Description: SOR1 from the fungus Cercospora nicotianae
  misc_feature (36)..(330): Homolog of NCBI NO: 23017679 NR Description: hypothetical protein [Thermobifida fusca]
  misc_feature (193)..(296): Homolog of NCBI NO: 37531502 NR Description: putative protein similar to ethylene-inducible
FHSIPHKARHKRTKPMASDGSGVVTVYGSNGAELLEPSKQPKSATFSVKVGLAQMLRGGVIMDVVTPEQARLAEEAGACAVMALERVPADIRAQGGVARMSDPGLIRDIKRAVTIPVMAKARIGHFVEAQILEAVGVDYVDESEVLTPADDAHHINKHNFRVPFVCGCRDLGEALRRVREGAAMIRTKGEAGTGNVVEAVRHVRSVMGDVRALRSMDDDEVFAYAKRIAAPYDLVMQTKQLGRLPVVQFAAGGVATPADAALMMQLGCDGVFVGSGIFKSGDPARRARAIVQAVTHYSDPTILADVSTGLGEAMVGINLNDPKVERYAARSE

SEQ ID NO: 15517 - protein, 317 aa, Zea mays subsp. mays
  peptide (1)..(317): Ceres Seq. ID no. 15178971
  misc_feature (30)..(236): Pfam Name: SOR/SNZ family Pfam Description: SOR/SNZ family
  misc_feature (1)..(317): Homolog of NCBI NO: 34394152 NR Description: putative ethylene-inducible protein [Oryza sativa
  misc_feature (1)..(317): Homolog of NCBI NO: 37530308 NR Description: putative pyridoxine/pyridoxal 5-phosphate
  misc_feature (5)..(317): Homolog of NCBI NO: 2501578 NR Description: ETHYLENE-INDUCIBLE PROTEIN HEVER
  misc_feature (4)..(317): Homolog of NCBI NO: 15240972 NR Description: pyridoxine biosynthesis protein - like
  misc_feature (1)..(317): Homolog of NCBI NO: 10719739 NR Description: putative pyridoxine biosynthetic enzyme
  misc_feature (4)..(317): Homolog of NCBI NO: 21617922 NR Description: pyridoxine biosynthesis protein-like [Arabidopsis
  misc_feature (1)..(317): Homolog of NCBI NO: 13310484 NR Description: Sor-like protein [Ginkgo biloba]
  misc_feature (5)..(317): Homolog of NCBI NO: 15224470 NR Description: SOR1 from the fungus Cercospora nicotianae
  misc_feature (21)..(315): Homolog of NCBI NO: 23017679 NR Description: hypothetical protein [Thermobifida fusca]
  misc_feature (178)..(281): Homolog of NCBI NO: 37531502 NR Description: putative protein similar to ethylene-inducible
MASDGSGVVTVYGSNGAELLEPSKQPKSATFSVKVGLAQMLRGGVIMDVVTPEQARLAEEAGACAVMALERVPADIRAQGGVARMSDPGLIRDIKRAVTIPVMAKARIGHFVEAQILEAVGVDYVDESEVLTPADDAHHINKHNFRVPFVCGCRDLGEALRRVREGAAMIRTKGEAGTGNVVEAVRHVRSVMGDVRALRSMDDDEVFAYAKRIAAPYDLVMQTKQLGRLPVVQFAAGGVATPADAALMMQLGCDGVFVGSGIFKSGDPARRARAIVQAVTHYSDPTILADVSTGLGEAMVGINLNDPKVERYAARSE

SEQ ID NO: 15518 - protein, 278 aa, Zea mays subsp. mays
  peptide (1)..(278): Ceres Seq. ID no. 15178972
  misc_feature (1)..(197): Pfam Name: SOR/SNZ family Pfam Description: SOR/SNZ family
  misc_feature (1)..(278): Homolog of NCBI NO: 34394152 NR Description: putative ethylene-inducible protein [Oryza sativa
  misc_feature (1)..(278): Homolog of NCBI NO: 37530308 NR Description: putative pyridoxine/pyridoxal 5-phosphate
  misc_feature (1)..(278): Homolog of NCBI NO: 2501578 NR Description: ETHYLENE-INDUCIBLE PROTEIN HEVER
  misc_feature (1)..(278): Homolog of NCBI NO: 15240972 NR Description: pyridoxine biosynthesis protein - like
  misc_feature (1)..(278): Homolog of NCBI NO: 10719739 NR Description: putative pyridoxine biosynthetic enzyme
  misc_feature (1)..(278): Homolog of NCBI NO: 21617922 NR Description: pyridoxine biosynthesis protein-like [Arabidopsis
  misc_feature (1)..(278): Homolog of NCBI NO: 13310484 NR Description: Sor-like protein [Ginkgo biloba]
  misc_feature (1)..(278): Homolog of NCBI NO: 15224470 NR Description: SOR1 from the fungus Cercospora nicotianae
  misc_feature (1)..(276): Homolog of NCBI NO: 23017679 NR Description: hypothetical protein [Thermobifida fusca]
  misc_feature (139)..(242): Homolog of NCBI NO: 37531502 NR Description: putative protein similar to ethylene-inducible
MLRGGVIMDVVTPEQARLAEEAGACAVMALERVPADIRAQGGVARMSDPGLIRDIKRAVTIPVMAKARIGHFVEAQILEAVGVDYVDESEVLTPADDAHHINKHNFRVPFVCGCRDLGEALRRVREGAAMIRTKGEAGTGNVVEAVRHVRSVMGDVRALRSMDDDEVFAYAKRIAAPYDLVMQTKQLGRLPVVQFAAGGVATPADAALMMQLGCDGVFVGSGIFKSGDPARRARAIVQAVTHYSDPTILADVSTGLGEAMVGINLNDPKVERYAARSE

SEQ ID NO: 15519 - DNA, 432 bp, Zea mays subsp. mays
  misc_feature (1)..(432): Ceres Seq. ID no. 7114355
  misc_feature: MA Experiment ID: 108689 Result: Up-regulated in Transcription
  misc_feature: MA Experiment 108689 PARAMETER Experiment Name: Zm_Drought_Roots_P Parameter: Age (day) Value: 9
  misc_feature: MA Experiment 108689 PARAMETER Experiment Name: Zm_Drought_Roots_P Parameter: Organism Value: Zea mays
  misc_feature: MA Experiment 108689 PARAMETER Experiment Name: Zm_Drought_Roots_P Parameter: Plant Line Value: 35A19
  misc_feature: MA Experiment 108689 PARAMETER Experiment Name: Zm_Drought_Roots_P Parameter: Timepoint (hr) Value: 24
  misc_feature: MA Experiment 108689 PARAMETER Experiment Name: Zm_Drought_Roots_P Parameter: Tissue Value: Roots
  misc_feature: MA Experiment 108689 PARAMETER Experiment Name: Zm_Drought_Roots_P Parameter: Treatment Value: Drought vs. No Drought
accggctctgcacccaaagtccgaacccaaatcgtgtgttcaccgttcccgacgaacctgccgcatcacctcaccgatcccccggcgcccgctggccctgtcccgactcccgagacatgcaacccgtttgccgctcgtgcttggcccccgcgcggccacagccggaggtaccccgcgcgcaaacacgccgcgcggaggcgggacgacggagcccgtcgagccgcgcaaggacgggccggcgtcggcggtcgatcaggcggaggaggccgggctggcgcccgaanagctggaggtgctggaggaggcggccatcatgggggaggacgaggggcgccggcccaccgactacgaacgccgcgcgcacatnttcgangagagctcgcgggtcttccgtgatctcaagcagcgaancgacggcgacggtggcggcgg

SEQ ID NO: 15520 - protein, 143 aa, Zea mays subsp. mays
  peptide (1)..(143): Ceres Seq. ID no. 7114356
  misc_feature (1)..(138): Homolog of NCBI NO: 10176734 NR Description: gene_id:K18I23.2~unknown protein [Arabidopsis
  misc_feature (18)..(138): Homolog of NCBI NO: 18414826 NR Description: expressed protein; protein id: At5g05220.1, by cDNA: gi_15450646, supported by cDNA: gi_17386123 [Arabidopsis >gi|15450647|gb|AAK96595.1| AT5g05220/K18I23_2 [Arabidopsis
  misc_feature (95)..(95): Xaa is any aa, unknown or other
  misc_feature (122)..(122): Xaa is any aa, unknown or other
  misc_feature (124)..(124): Xaa is any aa, unknown or other
  misc_feature (137)..(137): Xaa is any aa, unknown or other
PALHPKSEPKSCVHRSRRTCRITSPIPRRPLALSRLPRHATRLPLVLGPRAATAGGTPRANTPRGGGTTEPVEPRKDGPASAVDQAEEAGLAPEXLEVLEEAAIMGEDEGRRPTDYERRAHXFXESSRVFRDLKQRXDGDGGG

SEQ ID NO: 15521 - protein, 143 aa, Zea mays subsp. mays
  peptide (1)..(143): Ceres Seq. ID no. 7114357
  misc_feature (94)..(94): Xaa is any aa, unknown or other
  misc_feature (122)..(122): Xaa is any aa, unknown or other
  misc_feature (124)..(124): Xaa is any aa, unknown or other
  misc_feature (137)..(137): Xaa is any aa, unknown or other
RLCTQSPNPNRVFTVPDEPAASPHRSPGARWPCPDSRDMQPVCRSCLAPARPQPEVPRAQTRRAEAGRRSPSSRARTGRRRRSIRRRRPGWRPXSWRCWRRRPSWGRTRGAGPPTTNAARTXSXRARGSSVISSSEXTATVAA

SEQ ID NO: 15522 - protein, 131 aa, Zea mays subsp. mays
  peptide (1)..(131): Ceres Seq. ID no. 7114358
  misc_feature (49)..(113): Pfam Name: Bindin Pfam Description: Bindin
  misc_feature (77)..(131): Homolog of NCBI NO: 27503247 NR Description: Similar to splicing factor, arginine/serine-rich
  misc_feature (27)..(110): Homolog of NCBI NO: 2388805 NR Description: attachment region binding protein [Gallus gallus]
  misc_feature (95)..(95): Xaa is any aa, unknown or other
  misc_feature (123)..(123): Xaa is any aa, unknown or other
  misc_feature (125)..(125): Xaa is any aa, unknown or other
TGSAPKVRTQIVCSPFPTNLPHHLTDPPAPAGPVPTPETCNPFAARAWPPRGHSRRYPARKHAARRRDDGARRAAQGRAGVGGRSGGGGRAGARXAGGAGGGGHHGGGRGAPAHRLRTPRAHXRXELAGLP

SEQ ID NO: 15523 - DNA, 913 bp, Zea mays subsp. mays
  misc_feature (1)..(913): Ceres Seq. ID no. 13624158
  misc_feature: MA Experiment ID: 108535 Result: Up-regulated in Transcription
  misc_feature: MA Experiment 108535 PARAMETER Experiment Name: Zm_Meristem_P Parameter: Age (day) Value: 8
  misc_feature: MA Experiment 108535 PARAMETER Experiment Name: Zm_Meristem_P Parameter: Organism Value: Zea mays
  misc_feature: MA Experiment 108535 PARAMETER Experiment Name: Zm_Meristem_P Parameter: Plant Line Value: 35A19
  misc_feature: MA Experiment 108535 PARAMETER Experiment Name: Zm_Meristem_P Parameter: Tissue Value: Root Meristem vs. Above Root Meristem
  misc_feature: MA Experiment ID: 108544 Result: Down-regulated in Transcription
  misc_feature: MA Experiment ID: 108556 Result: Down-regulated in Transcription
  misc_feature: MA Experiment 108556 PARAMETER Experiment Name: Zm_Drought_P Parameter: Age (day) Value: 9
  misc_feature: MA Experiment 108556 PARAMETER Experiment Name: Zm_Drought_P Parameter: Organism Value: Zea mays
  misc_feature: MA Experiment 108556 PARAMETER Experiment Name: Zm_Drought_P Parameter: Plant Line Value: 35A19
  misc_feature: MA Experiment 108556 PARAMETER Experiment Name: Zm_Drought_P Parameter: Timepoint (hr) Value: 24
  misc_feature: MA Experiment 108556 PARAMETER Experiment Name: Zm_Drought_P Parameter: Tissue Value: Aerial
  misc_feature: MA Experiment 108556 PARAMETER Experiment Name: Zm_Drought_P Parameter: Treatment Value: Drought vs. No Drought
  misc_feature: MA Experiment ID: 20000479 Result: Down-regulated in Transcription
  misc_feature: MA Experiment 20000479 PARAMETER Experiment Name: Zm_Drought_P Parameter: Age (day) Value: 10
  misc_feature: MA Experiment 20000479 PARAMETER Experiment Name: Zm_Drought_P Parameter: Organism Value: Zea mays
  misc_feature: MA Experiment 20000479 PARAMETER Experiment Name: Zm_Drought_P Parameter: Plant Line Value: 35A19
  misc_feature: MA Experiment 20000479 PARAMETER Experiment Name: Zm_Drought_P Parameter: Timepoint (hr) Value: 48
  misc_feature: MA Experiment 20000479 PARAMETER Experiment Name: Zm_Drought_P Parameter: Tissue Value: Aerial
  misc_feature: MA Experiment 20000479 PARAMETER Experiment Name: Zm_Drought_P Parameter: Treatment Value: Drought vs. No Drought
  misc_feature: MA Experiment ID: 20000488 Result: Up-regulated in Transcription
  misc_feature: MA Experiment 20000488 PARAMETER Experiment Name: Zm_50mM_NH4NO3_L_to_H_P Parameter: Organism Value: Zea mays
  misc_feature: MA Experiment 20000488 PARAMETER Experiment Name: Zm_50mM_NH4NO3_L_to_H_P Parameter: Timepoint (hr) Value: 8
  misc_feature: MA Experiment 20000488 PARAMETER Experiment Name: Zm_50mM_NH4NO3_L_to_H_P Parameter: Tissue Value: Leaves
  misc_feature: MA Experiment 20000488 PARAMETER Experiment Name: Zm_50mM_NH4NO3_L_to_H_P Parameter: Treatment Value: 50mM NH4NO3 vs. 100mM Mannitol
agggtttcgtcgcttccagccgccgccgcgtccgcctcgccaagcgcagcagccgccgcagcacatctctctctcgatctcagccatggcggaggtggagcagcaacaggacacgccgaagctgttcaaccgctggaccttcgatgatgtccaggtgaacgacatctcgctgaacgactacctcgctgtgaacgcgacgaagcacgcgatgtacctgccgcacaccgcggggcgttactccaaanaagcggttccgcaaggcgcagtgcccgatcgtcgagcgcctcacaaactccctcatgatgcacgggcgcaacaacggcaagaaggtcatggctgtccgcatcatcaagcataccctggagatcattcacctgctcaccgatgccaaccccatccaggtcgtcgtcgacgcgatcatcaacagtggaccccgtgaggatgccacccgtattggttccgctggtgttgtgaggaggcaggccgtggatatctcacccctgaggagggtgaaccaggccatctacctcctcaccactggtgccagggagagtgctttccggaacatcaaaaccattgccgagtgccttgcagatgagctgatcaacgctgccaagggctcatccaacagttacgccatcaagaagaaggacgagattgagcgtgttgccaaggccaaccgttgaacggagcttgtatcctggtgcactctgcgctggaaacttttatgttactggcagtcgtatcggttcctgttttaccaatgtttagagttttttgagacctatatgcggttttggttttcagtgcacaattaaaattactgagtaatgtagttgattgggaacagaaagtgcctggtttaccgaactccatttctcttgtcatttttctttattctgtagtctgtatt

SEQ ID NO: 15524 - protein, 145 aa, Zea mays subsp. mays
  peptide (1)..(145): Ceres Seq. ID no. 13624159
  misc_feature (29)..(80): Homolog of NCBI NO: 34893994 NR Description: putative 40S ribosomal protein S5 [Oryza sativa
  misc_feature (30)..(80): Homolog of NCBI NO: 15228111 NR Description: 40S ribosomal protein S5 (RPS5A) [Arabidopsis
  misc_feature (30)..(80): Homolog of NCBI NO: 15229897 NR Description: 40S ribosomal protein S5 (RPS5B) [Arabidopsis >gi|30681968|ref|NP_850564.1| 40S ribosomal protein S5 (RPS5B)
  misc_feature (40)..(80): Homolog of NCBI NO: 6831665 NR Description: 40S RIBOSOMAL PROTEIN S5
  misc_feature (30)..(80): Homolog of NCBI NO: 21617886 NR Description: 40S ribosomal protein S5 [Arabidopsis thaliana]
  misc_feature (22)..(79): Homolog of NCBI NO: 40748265 NR Description: 40S ribosomal protein S5 [Capsicum annuum]
  misc_feature (40)..(90): Homolog of NCBI NO: 32400987 NR Description: 40S ribosome protein S5 [Griffithsia japonica]
  misc_feature (37)..(80): Homolog of NCBI NO: 3717978 NR Description: 5S ribosomal protein [Mus musculus] unnamed protein product [Mus musculus] unnamed protein product [Mus musculus]
  misc_feature (37)..(80): Homolog of NCBI NO: 13904870 NR Description: ribosomal protein S5; 40S ribosomal protein S5 sapiens] >gi|22002064|sp|P46782|RS5_HUMAN 40S ribosomal protein >gi|15929961|gb|AAH15405.1|AAH15405 ribosomal protein S5 [Homo
  misc_feature (37)..(80): Homolog of NCBI NO: 34854534 NR Description: similar to ribosomal protein S5; 40S ribosomal
  misc_feature (82)..(82): Xaa is any aa, unknown or other
GFRRFQPPPRPPRQAQQPPQHISLSISAMAEVEQQQDTPKLFNRWTFDDVQVNDISLNDYLAVNATKHAMYLPHTAGRYSKXAVPQGAVPDRRAPHKLPHDARAQQRQEGHGCPHHQAYPGDHSPAHRCQPHPGRRRRDHQQWTP

SEQ ID NO: 15525 - protein, 128 aa, Zea mays subsp. mays
  peptide (1)..(128): Ceres Seq. ID no. 13624160
  misc_feature (1)..(128): Pfam Name: Ribosomal protein S7p/S5e Pfam Description: Ribosomal protein S7p/S5e
  misc_feature (1)..(128): Homolog of NCBI NO: 34893994 NR Description: putative 40S ribosomal protein S5 [Oryza sativa
  misc_feature (1)..(128): Homolog of NCBI NO: 15228111 NR Description: 40S ribosomal protein S5 (RPS5A) [Arabidopsis
  misc_feature (1)..(128): Homolog of NCBI NO: 6831665 NR Description: 40S RIBOSOMAL PROTEIN S5
  misc_feature (1)..(128): Homolog of NCBI NO: 15229897 NR Description: 40S ribosomal protein S5 (RPS5B) [Arabidopsis >gi|30681968|ref|NP_850564.1| 40S ribosomal protein S5 (RPS5B)
  misc_feature (1)..(128): Homolog of NCBI NO: 21617886 NR Description: 40S ribosomal protein S5 [Arabidopsis thaliana]
  misc_feature (1)..(128): Homolog of NCBI NO: 40748265 NR Description: 40S ribosomal protein S5 [Capsicum annuum]
  misc_feature (1)..(128): Homolog of NCBI NO: 32400987 NR Description: 40S ribosome protein S5 [Griffithsia japonica]
  misc_feature (1)..(128): Homolog of NCBI NO: 3717978 NR Description: 5S ribosomal protein [Mus musculus] unnamed protein product [Mus musculus] unnamed protein product [Mus musculus]
  misc_feature (1)..(128): Homolog of NCBI NO: 13904870 NR Description: ribosomal protein S5; 40S ribosomal protein S5 sapiens] >gi|22002064|sp|P46782|RS5_HUMAN 40S ribosomal protein >gi|15929961|gb|AAH15405.1|AAH15405 ribosomal protein S5 [Homo
  misc_feature (1)..(128): Homolog of NCBI NO: 34854534 NR Description: similar to ribosomal protein S5; 40S ribosomal
MMHGRNNGKKVMAVRIIKHTLEIIHLLTDANPIQVVVDAIINSGPREDATRIGSAGVVRRQAVDISPLRRVNQAIYLLTTGARESAFRNIKTIAECLADELINAAKGSSNSYAIKKKDEIERVAKANR

SEQ ID NO: 15526 - protein, 127 aa, Zea mays subsp. mays
  peptide (1)..(127): Ceres Seq. ID no. 13624161
  misc_feature (1)..(127): Pfam Name: Ribosomal protein S7p/S5e Pfam Description: Ribosomal protein S7p/S5e
  misc_feature (1)..(127): Homolog of NCBI NO: 34893994 NR Description: putative 40S ribosomal protein S5 [Oryza sativa
  misc_feature (1)..(127): Homolog of NCBI NO: 15228111 NR Description: 40S ribosomal protein S5 (RPS5A) [Arabidopsis
  misc_feature (1)..(127): Homolog of NCBI NO: 6831665 NR Description: 40S RIBOSOMAL PROTEIN S5
  misc_feature (1)..(127): Homolog of NCBI NO: 15229897 NR Description: 40S ribosomal protein S5 (RPS5B) [Arabidopsis >gi|30681968|ref|NP_850564.1| 40S ribosomal protein S5 (RPS5B)
  misc_feature (1)..(127): Homolog of NCBI NO: 21617886 NR Description: 40S ribosomal protein S5 [Arabidopsis thaliana]
  misc_feature (1)..(127): Homolog of NCBI NO: 40748265 NR Description: 40S ribosomal protein S5 [Capsicum annuum]
  misc_feature (1)..(127): Homolog of NCBI NO: 32400987 NR Description: 40S ribosome protein S5 [Griffithsia japonica]
  misc_feature (1)..(127): Homolog of NCBI NO: 3717978 NR Description: 5S ribosomal protein [Mus musculus] unnamed protein product [Mus musculus] unnamed protein product [Mus musculus]
  misc_feature (1)..(127): Homolog of NCBI NO: 13904870 NR Description: ribosomal protein S5; 40S ribosomal protein S5 sapiens] >gi|22002064|sp|P46782|RS5_HUMAN 40S ribosomal protein >gi|15929961|gb|AAH15405.1|AAH15405 ribosomal protein S5 [Homo
  misc_feature (1)..(127): Homolog of NCBI NO: 34854534 NR Description: similar to ribosomal protein S5; 40S ribosomal
MHGRNNGKKVMAVRIIKHTLEIIHLLTDANPIQVVVDAIINSGPREDATRIGSAGVVRRQAVDISPLRRVNQAIYLLTTGARESAFRNIKTIAECLADELINAAKGSSNSYAIKKKDEIERVAKANR

SEQ ID NO: 15527 - protein, 117 aa, Zea mays subsp. mays
  peptide (1)..(117): Ceres Seq. ID no. 13624162
  misc_feature (1)..(52): Homolog of NCBI NO: 34893994 NR Description: putative 40S ribosomal protein S5 [Oryza sativa
  misc_feature (2)..(52): Homolog of NCBI NO: 15228111 NR Description: 40S ribosomal protein S5 (RPS5A) [Arabidopsis
  misc_feature (2)..(52): Homolog of NCBI NO: 15229897 NR Description: 40S ribosomal protein S5 (RPS5B) [Arabidopsis >gi|30681968|ref|NP_850564.1| 40S ribosomal protein S5 (RPS5B)
  misc_feature (12)..(52): Homolog of NCBI NO: 6831665 NR Description: 40S RIBOSOMAL PROTEIN S5
  misc_feature (2)..(52): Homolog of NCBI NO: 21617886 NR Description: 40S ribosomal protein S5 [Arabidopsis thaliana]
  misc_feature (1)..(51): Homolog of NCBI NO: 40748265 NR Description: 40S ribosomal protein S5 [Capsicum annuum]
  misc_feature (12)..(62): Homolog of NCBI NO: 32400987 NR Description: 40S ribosome protein S5 [Griffithsia japonica]
  misc_feature (9)..(52): Homolog of NCBI NO: 3717978 NR Description: 5S ribosomal protein [Mus musculus] unnamed protein product [Mus musculus] unnamed protein product [Mus musculus]
  misc_feature (9)..(52): Homolog of NCBI NO: 13904870 NR Description: ribosomal protein S5; 40S ribosomal protein S5 sapiens] >gi|22002064|sp|P46782|RS5_HUMAN 40S ribosomal protein >gi|15929961|gb|AAH15405.1|AAH15405 ribosomal protein S5 [Homo
  misc_feature (9)..(52): Homolog of NCBI NO: 34854534 NR Description: similar to ribosomal protein S5; 40S ribosomal
  misc_feature (54)..(54): Xaa is any aa, unknown or other
MAEVEQQQDTPKLFNRWTFDDVQVNDISLNDYLAVNATKHAMYLPHTAGRYSKXAVPQGAVPDRRAPHKLPHDARAQQRQEGHGCPHHQAYPGDHSPAHRCQPHPGRRRRDHQQWTP

SEQ ID NO: 15528 - DNA, 937 bp, Zea mays subsp. mays
  misc_feature (1)..(937): Ceres Seq. ID no. 13624118
  misc_feature: MA Experiment ID: 108528 Result: Down-regulated in Transcription
  misc_feature: MA Experiment 108528 PARAMETER Experiment Name: Zm_Imbibed_Seeds_P Parameter: Age (day) Value: 5 vs. 2
  misc_feature: MA Experiment 108528 PARAMETER Experiment Name: Zm_Imbibed_Seeds_P Parameter: Organism Value: Zea mays
  misc_feature: MA Experiment 108528 PARAMETER Experiment Name: Zm_Imbibed_Seeds_P Parameter: Plant Line Value: 35A19
  misc_feature: MA Experiment 108528 PARAMETER Experiment Name: Zm_Imbibed_Seeds_P Parameter: Tissue Value: Aerial vs. Embryo
  misc_feature: MA Experiment ID: 108543 Result: Down-regulated in Transcription
  misc_feature: MA Experiment ID: 108544 Result: Down-regulated in Transcription
  misc_feature: MA Experiment ID: 20000535 Result: Up-regulated in Transcription
  misc_feature: MA Experiment 20000535 PARAMETER Experiment Name: Zm_Hybrid_Seed_Dev_P Parameter: DAP Value: 30 vs. 12
  misc_feature: MA Experiment 20000535 PARAMETER Experiment Name: Zm_Hybrid_Seed_Dev_P Parameter: Organism Value: Zea mays
  misc_feature: MA Experiment 20000535 PARAMETER Experiment Name: Zm_Hybrid_Seed_Dev_P Parameter: Plant Line Value: 35A19
  misc_feature: MA Experiment 20000535 PARAMETER Experiment Name: Zm_Hybrid_Seed_Dev_P Parameter: Tissue Value: Embryo vs. Unfert Floret
cactactctctctctctctgcctgcaaagctgcttgatccatcatcgatcacatcactccaccagccgcagcgcacgaacgtacgactcatggcagatcgcgaccgcagcggcatctacggcggcggcgcctacgggcagcagcaggggggcggccgcccgatgggtgagcaggtgaagggcatgatccacgacaaggggccgacggcgtcccaggcgctgacggtggcgacgctgttccctctgggcgggctgctcctggtgctgtcgggcctggcgctggcggcctccacggtggggctggccctggccacgcccgtgttcctgctcttcagccccgtgctcgtccccgccgcgctgctcatcggcacggccgtcgcggggttcctcacgtcgggcgcgctggggctcggcggcctgtcctcgctcacgtgcctcgccaacacggcgcggcaggcgttccagcgcacccccggactacgtcgaggaggcgcgccgcaggatggcggaggccgcggcgcacgcgggccacaagaccgcgcaggccgggcacggcatccagagcaaggcgcaggaggccggtgctggcactggcgccggcggcggcaggacttcctcgtaaataagcaaatcatccatggatgcgtgcgtgtcaatgtcagcagggtcgtcgtggaatgctcttctctgtacgtgggtaaccgtcttttggtcgtcttccccgagtgcgtgataaatatcctggtgttcgtcgtgtgtggtgctgccctaggctggggcctggggtcggctgtgtaccggtatctgttcatcgccgctccgtcgcgttcggagatgtgaataagtgatgtgaaggttaagtttcagctttgctattgctattgtggcttgtgcatcagcggtttgctcgttgactgttatggaaataagcattggtg

SEQ ID NO: 15529 - protein, 278 aa, Zea mays subsp. mays
  peptide (1)..(278): Ceres Seq. ID no. 13624119
  misc_feature (68)..(157): Pfam Name: Oleosin Pfam Description: Oleosin
  misc_feature (68)..(157): Pfam Name: Oleosin Pfam Description: Oleosin
  misc_feature (30)..(193): Homolog of NCBI NO: 1076818 NR Description: oleosin 17 - maize >gi|687247|gb|AAA68066.1| 17
  misc_feature (30)..(192): Homolog of NCBI NO: 129081 NR Description: Oleosin Zm-II (Oleosin 18 kDa) (Lipid
  misc_feature (30)..(191): Homolog of NCBI NO: 28273373 NR Description: oleosin [Oryza sativa (japonica cultivar-group)]
  misc_feature (30)..(191): Homolog of NCBI NO: 3334279 NR Description: OLEOSIN 18 KD (OSE721) >gi|7442011|pir||T03380 >gi|4102969|gb|AAD10240.1| 18 kDa oleosin [Oryza sativa subsp.
  misc_feature (30)..(191): Homolog of NCBI NO: 1362166 NR Description: oleosin 1 - barley >gi|963062|emb|CAA57994.1|
  misc_feature (30)..(192): Homolog of NCBI NO: 129081 NR Description: Oleosin Zm-II (Oleosin 18 kDa) (Lipid
  misc_feature (30)..(191): Homolog of NCBI NO: 3334279 NR Description: OLEOSIN 18 KD (OSE721) >gi|7442011|pir||T03380 >gi|4102969|gb|AAD10240.1| 18 kDa oleosin [Oryza sativa subsp.
  misc_feature (30)..(152): Homolog of NCBI NO: 21311553 NR Description: 16.9 kDa oleosin [Theobroma cacao]
  misc_feature (20)..(157): Homolog of NCBI NO: 15242686 NR Description: oleosin [Arabidopsis thaliana] Oleosin 21.2 kDa (Oleosin type 2) >gi|725260|gb|AAA87295.1| >gi|10178154|dbj|BAB11599.1| oleosin, isoform 21K [Arabidopsis
  misc_feature (32)..(157): Homolog of NCBI NO: 10880961 NR Description: 19 kDa oleosin [Perilla frutescens]
  misc_feature (30)..(157): Homolog of NCBI NO: 9963897 NR Description: oleosin [Perilla frutescens]
  misc_feature (47)..(157): Homolog of NCBI NO: 82051 NR Description: lipid body-associated membrane protein - carrot
  misc_feature (30)..(191): Homolog of NCBI NO: 1362166 NR Description: oleosin 1 - barley >gi|963062|emb|CAA57994.1|
  misc_feature (30)..(191): Homolog of NCBI NO: 28273373 NR Description: oleosin [Oryza sativa (japonica cultivar-group)]
  misc_feature (30)..(193): Homolog of NCBI NO: 1076818 NR Description: oleosin 17 - maize >gi|687247|gb|AAA68066.1| 17
  misc_feature (47)..(157): Homolog of NCBI NO: 82051 NR Description: lipid body-associated membrane protein - carrot
  misc_feature (30)..(157): Homolog of NCBI NO: 9963897 NR Description: oleosin [Perilla frutescens]
  misc_feature (32)..(157): Homolog of NCBI NO: 10880961 NR Description: 19 kDa oleosin [Perilla frutescens]
  misc_feature (20)..(157): Homolog of NCBI NO: 15242686 NR Description: oleosin [Arabidopsis thaliana] Oleosin 21.2 kDa (Oleosin type 2) >gi|725260|gb|AAA87295.1| >gi|10178154|dbj|BAB11599.1| oleosin, isoform 21K [Arabidopsis
  misc_feature (30)..(152): Homolog of NCBI NO: 21311553 NR Description: 16.9 kDa oleosin [Theobroma cacao]
LLSLSLPAKLLDPSSITSLHQPQRTNVRLMADRDRSGIYGGGAYGQQQGGGRPMGEQVKGMIHDKGPTASQALTVATLFPLGGLLLVLSGLALAASTVGLALATPVFLLFSPVLVPAALLIGTAVAGFLTSGALGLGGLSSLTCLANTARQAFQRTPGLRRGGAPQDGGGRGARGPQDRAGRARHPEQGAGGRCWHWRRRRQDFLVNKQIIHGCVRVNVSRVVVECSSLYVGNRLLVVFPECVINILVFVVCGAALGWGLGSAVYRYLFIAAPSRSEM

SEQ ID NO: 15530 - protein, 249 aa, Zea mays subsp. mays
  peptide (1)..(249): Ceres Seq. ID no. 13624120
  misc_feature (39)..(128): Pfam Name: Oleosin Pfam Description: Oleosin
  misc_feature (39)..(128): Pfam Name: Oleosin Pfam Description: Oleosin
  misc_feature (1)..(164): Homolog of NCBI NO: 1076818 NR Description: oleosin 17 - maize >gi|687247|gb|AAA68066.1| 17
  misc_feature (1)..(163): Homolog of NCBI NO: 129081 NR Description: Oleosin Zm-II (Oleosin 18 kDa) (Lipid
  misc_feature (1)..(162): Homolog of NCBI NO: 28273373 NR Description: oleosin [Oryza sativa (japonica cultivar-group)]
  misc_feature (1)..(162): Homolog of NCBI NO: 3334279 NR Description: OLEOSIN 18 KD (OSE721) >gi|7442011|pir||T03380 >gi|4102969|gb|AAD10240.1| 18 kDa oleosin [Oryza sativa subsp.
  misc_feature (1)..(162): Homolog of NCBI NO: 1362166 NR Description: oleosin 1 - barley >gi|963062|emb|CAA57994.1|
  misc_feature (1)..(163): Homolog of NCBI NO: 129081 NR Description: Oleosin Zm-II (Oleosin 18 kDa) (Lipid
  misc_feature (1)..(162): Homolog of NCBI NO: 3334279 NR Description: OLEOSIN 18 KD (OSE721) >gi|7442011|pir||T03380 >gi|4102969|gb|AAD10240.1| 18 kDa oleosin [Oryza sativa subsp.
  misc_feature (1)..(123): Homolog of NCBI NO: 21311553 NR Description: 16.9 kDa oleosin [Theobroma cacao]
  misc_feature (1)..(128): Homolog of NCBI NO: 15242686 NR Description: oleosin [Arabidopsis thaliana] Oleosin 21.2 kDa (Oleosin type 2) >gi|725260|gb|AAA87295.1| >gi|10178154|dbj|BAB11599.1| oleosin, isoform 21K [Arabidopsis
  misc_feature (3)..(128): Homolog of NCBI NO: 10880961 NR Description: 19 kDa oleosin [Perilla frutescens]
  misc_feature (1)..(128): Homolog of NCBI NO: 9963897 NR Description: oleosin [Perilla frutescens]
  misc_feature (18)..(128): Homolog of NCBI NO: 82051 NR Description: lipid body-associated membrane protein - carrot
  misc_feature (1)..(162): Homolog of NCBI NO: 1362166 NR Description: oleosin 1 - barley >gi|963062|emb|CAA57994.1|
  misc_feature (1)..(162): Homolog of NCBI NO: 28273373 NR Description: oleosin [Oryza sativa (japonica cultivar-group)]
  misc_feature (1)..(164): Homolog of NCBI NO: 1076818 NR Description: oleosin 17 - maize >gi|687247|gb|AAA68066.1| 17
  misc_feature (18)..(128): Homolog of NCBI NO: 82051 NR Description: lipid body-associated membrane protein - carrot
  misc_feature (1)..(128): Homolog of NCBI NO: 9963897 NR Description: oleosin [Perilla frutescens]
  misc_feature (3)..(128): Homolog of NCBI NO: 10880961 NR Description: 19 kDa oleosin [Perilla frutescens]
  misc_feature (1)..(128): Homolog of NCBI NO: 15242686 NR Description: oleosin [Arabidopsis thaliana] Oleosin 21.2 kDa (Oleosin type 2) >gi|725260|gb|AAA87295.1| >gi|10178154|dbj|BAB11599.1| oleosin, isoform 21K [Arabidopsis
  misc_feature (1)..(123): Homolog of NCBI NO: 21311553 NR Description: 16.9 kDa oleosin [Theobroma cacao]
MADRDRSGIYGGGAYGQQQGGGRPMGEQVKGMIHDKGPTASQALTVATLFPLGGLLLVLSGLALAASTVGLALATPVFLLFSPVLVPAALLIGTAVAGFLTSGALGLGGLSSLTCLANTARQAFQRTPGLRRGGAPQDGGGRGARGPQDRAGRARHPEQGAGGRCWHWRRRRQDFLVNKQIIHGCVRVNVSRVVVECSSLYVGNRLLVVFPECVINILVFVVCGAALGWGLGSAVYRYLFIAAPSRSEM

SEQ ID NO: 15531 - protein, 225 aa, Zea mays subsp. mays
  peptide (1)..(225): Ceres Seq. ID no. 13624121
  misc_feature (15)..(104): Pfam Name: Oleosin Pfam Description: Oleosin
  misc_feature (15)..(104): Pfam Name: Oleosin Pfam Description: Oleosin
  misc_feature (1)..(140): Homolog of NCBI NO: 1076818 NR Description: oleosin 17 - maize >gi|687247|gb|AAA68066.1| 17
  misc_feature (1)..(139): Homolog of NCBI NO: 129081 NR Description: Oleosin Zm-II (Oleosin 18 kDa) (Lipid
  misc_feature (1)..(138): Homolog of NCBI NO: 28273373 NR Description: oleosin [Oryza sativa (japonica cultivar-group)]
  misc_feature (1)..(138): Homolog of NCBI NO: 3334279 NR Description: OLEOSIN 18 KD (OSE721) >gi|7442011|pir||T03380 >gi|4102969|gb|AAD10240.1| 18 kDa oleosin [Oryza sativa subsp.
  misc_feature (1)..(138): Homolog of NCBI NO: 1362166 NR Description: oleosin 1 - barley >gi|963062|emb|CAA57994.1|
  misc_feature (1)..(140): Homolog of NCBI NO: 1076818 NR Description: oleosin 17 - maize >gi|687247|gb|AAA68066.1| 17
  misc_feature (1)..(138): Homolog of NCBI NO: 28273373 NR Description: oleosin [Oryza sativa (japonica cultivar-group)]
  misc_feature (1)..(138): Homolog of NCBI NO: 1362166 NR Description: oleosin 1 - barley >gi|963062|emb|CAA57994.1|
  misc_feature (1)..(99): Homolog of NCBI NO: 21311553 NR Description: 16.9 kDa oleosin [Theobroma cacao]
  misc_feature (1)..(104): Homolog of NCBI NO: 15242686 NR Description: oleosin [Arabidopsis thaliana] Oleosin 21.2 kDa (Oleosin type 2) >gi|725260|gb|AAA87295.1| >gi|10178154|dbj|BAB11599.1| oleosin, isoform 21K [Arabidopsis
  misc_feature (1)..(104): Homolog of NCBI NO: 10880961 NR Description: 19 kDa oleosin [Perilla frutescens]
  misc_feature (1)..(104): Homolog of NCBI NO: 9963897 NR Description: oleosin [Perilla frutescens]
  misc_feature (1)..(104): Homolog of NCBI NO: 82051 NR Description: lipid body-associated membrane protein - carrot
  misc_feature (1)..(138): Homolog of NCBI NO: 3334279 NR Description: OLEOSIN 18 KD (OSE721) >gi|7442011|pir||T03380 >gi|4102969|gb|AAD10240.1| 18 kDa oleosin [Oryza sativa subsp.
  misc_feature (1)..(139): Homolog of NCBI NO: 129081 NR Description: Oleosin Zm-II (Oleosin 18 kDa) (Lipid
  misc_feature (1)..(104): Homolog of NCBI NO: 82051 NR Description: lipid body-associated membrane protein - carrot
  misc_feature (1)..(104): Homolog of NCBI NO: 9963897 NR Description: oleosin [Perilla frutescens]
  misc_feature (1)..(104): Homolog of NCBI NO: 10880961 NR Description: 19 kDa oleosin [Perilla frutescens]
  misc_feature (1)..(104): Homolog of NCBI NO: 15242686 NR Description: oleosin [Arabidopsis thaliana] Oleosin 21.2 kDa (Oleosin type 2) >gi|725260|gb|AAA87295.1| >gi|10178154|dbj|BAB11599.1| oleosin, isoform 21K [Arabidopsis
  misc_feature (1)..(99): Homolog of NCBI NO: 21311553 NR Description: 16.9 kDa oleosin [Theobroma cacao]
MGEQVKGMIHDKGPTASQALTVATLFPLGGLLLVLSGLALAASTVGLALATPVFLLFSPVLVPAALLIGTAVAGFLTSGALGLGGLSSLTCLANTARQAFQRTPGLRRGGAPQDGGGRGARGPQDRAGRARHPEQGAGGRCWHWRRRRQDFLVNKQIIHGCVRVNVSRVVVECSSLYVGNRLLVVFPECVINILVFVVCGAALGWGLGSAVYRYLFIAAPSRSEM

SEQ ID NO: 15532 - DNA, 609 bp, Zea mays subsp. mays
  misc_feature (1)..(609): Ceres Seq. ID no. 12594286
  misc_feature: MA Experiment ID: 108522 Result: Down-regulated in Transcription
  misc_feature: MA Experiment 108522 PARAMETER Experiment Name: Zm_42deg_Heat_P Parameter: Age (day) Value: 8
  misc_feature: MA Experiment 108522 PARAMETER Experiment Name: Zm_42deg_Heat_P Parameter: Organism Value: Zea mays
  misc_feature: MA Experiment 108522 PARAMETER Experiment Name: Zm_42deg_Heat_P Parameter: Plant Line Value: 35A19
  misc_feature: MA Experiment 108522 PARAMETER Experiment Name: Zm_42deg_Heat_P Parameter: Temperature (deg C) Value: 42 vs. 22
  misc_feature: MA Experiment 108522 PARAMETER Experiment Name: Zm_42deg_Heat_P Parameter: Timepoint (hr) Value: 1
  misc_feature: MA Experiment 108522 PARAMETER Experiment Name: Zm_42deg_Heat_P Parameter: Tissue Value: Aerial
  misc_feature: MA Experiment ID: 108545 Result: Down-regulated in Transcription
  misc_feature: MA Experiment 108545 PARAMETER Experiment Name: Zm_Imbibed_Seeds_P Parameter: Age (day) Value: 3 vs. 2
  misc_feature: MA Experiment 108545 PARAMETER Experiment Name: Zm_Imbibed_Seeds_P Parameter: Organism Value: Zea mays
  misc_feature: MA Experiment 108545 PARAMETER Experiment Name: Zm_Imbibed_Seeds_P Parameter: Plant Line Value: 35A19
  misc_feature: MA Experiment 108545 PARAMETER Experiment Name: Zm_Imbibed_Seeds_P Parameter: Tissue Value: Aerial vs. Embryo
  misc_feature: MA Experiment ID: 20000487 Result: Up-regulated in Transcription
  misc_feature: MA Experiment 20000487 PARAMETER Experiment Name: Zm_50mM_NH4NO3_L_to_H_P Parameter: Organism Value: Zea mays
  misc_feature: MA Experiment 20000487 PARAMETER Experiment Name: Zm_50mM_NH4NO3_L_to_H_P Parameter: Timepoint (hr) Value: 4
  misc_feature: MA Experiment 20000487 PARAMETER Experiment Name: Zm_50mM_NH4NO3_L_to_H_P Parameter: Tissue Value: Leaves
  misc_feature: MA Experiment 20000487 PARAMETER Experiment Name: Zm_50mM_NH4NO3_L_to_H_P Parameter: Treatment Value: 50mM NH4NO3 vs. 100mM Mannitol
  misc_feature: MA Experiment ID: 20000534 Result: Up-regulated in Transcription
  misc_feature: MA Experiment 20000534 PARAMETER Experiment Name: Zm_Hybrid_Pollen_P Parameter: Age (day) Value: 8
  misc_feature: MA Experiment 20000534 PARAMETER Experiment Name: Zm_Hybrid_Pollen_P Parameter: Organism Value: Zea mays
  misc_feature: MA Experiment 20000534 PARAMETER Experiment Name: Zm_Hybrid_Pollen_P Parameter: Plant Line Value: 35A19
  misc_feature: MA Experiment 20000534 PARAMETER Experiment Name: Zm_Hybrid_Pollen_P Parameter: Tissue Value: Pollen vs. Aerial
tgaatatcgatggcaatgtttgtactgtcatggtgactacattagttcttgagggctggcaacgtaagttggatccagattataatgttatgaagactctgcaaactttactttttaaggaagactgggcgaagtctcttcaatacactatccaagggctcatggcgccttagggtcgtccgcaatcctttctaaagttttgatctggtttgtgttcgaccggaggatcctcttctctcaccatcacgattctggcttcttttctacttaatttcacgtttcgtttctctgtacctgtcctggcgttgtgctgctaaagcagccttgatgataaagtaataactgcagtaaaaattttcagaagctaccagagtactatgctgctcagctctgggctgtcttcttatatgttcttgaagggccaaagaattaggtccttttcccccctcctaccaacacttttgacaatagctnttagatgatgtagcaaaaggcgttctgttctgatgatctttttgtaactggagaggttgtatccgtggactggagagttgcttatgtacagacagagatactgttaatctcgaaggaatccacttgtcaactgac

SEQ ID NO: 15533 - protein, 56 aa, Zea mays subsp. mays
  peptide (1)..(56): Ceres Seq. ID no. 12594287
  misc_feature (1)..(56): Homolog of NCBI NO: 19387282 NR Description: putative 62.8 kDa protein [Oryza sativa (japonica
  misc_feature (1)..(56): Homolog of NCBI NO: 32488318 NR Description: OSJNBa0015K02.12 [Oryza sativa (japonica
  misc_feature (1)..(56): Homolog of NCBI NO: 30682208 NR Description: hypethetical 62.8 KD protein in SSE1-CAR1
  misc_feature (1)..(56): Homolog of NCBI NO: 25404331 NR Description: hypothetical protein T25B24.1 [imported] - thaliana >gi|4585871|gb|AAD25544.1|AC005850_1 Unknown protein
  misc_feature (1)..(56): Homolog of NCBI NO: 30696591 NR Description: expressed protein [Arabidopsis thaliana] unknown protein [Arabidopsis thaliana]
  misc_feature (1)..(41): Homolog of NCBI NO: 34394005 NR Description: putative ubiquinone biosynthesis protein AarF
NIDGNVCTVMVTTLVLEGWQRKLDPDYNVMKTLQTLLFKEDWAKSLQYTIQGLMAP

SEQ ID NO: 15534 - protein, 47 aa, Zea mays subsp. mays
  peptide (1)..(47): Ceres Seq. ID no. 12594288
  misc_feature (1)..(47): Homolog of NCBI NO: 19387282 NR Description: putative 62.8 kDa protein [Oryza sativa (japonica
  misc_feature (1)..(47): Homolog of NCBI NO: 32488318 NR Description: OSJNBa0015K02.12 [Oryza sativa (japonica
  misc_feature (1)..(47): Homolog of NCBI NO: 30682208 NR Description: hypethetical 62.8 KD protein in SSE1-CAR1
  misc_feature (1)..(47): Homolog of NCBI NO: 25404331 NR Description: hypothetical protein T25B24.1 [imported] - thaliana >gi|4585871|gb|AAD25544.1|AC005850_1 Unknown protein
  misc_feature (1)..(47): Homolog of NCBI NO: 30696591 NR Description: expressed protein [Arabidopsis thaliana] unknown protein [Arabidopsis thaliana]
  misc_feature (1)..(32): Homolog of NCBI NO: 34394005 NR Description: putative ubiquinone biosynthesis protein AarF
MVTTLVLEGWQRKLDPDYNVMKTLQTLLFKEDWAKSLQYTIQGLMAP

SEQ ID NO: 15535 - protein, 34 aa, Zea mays subsp. mays
  peptide (1)..(34): Ceres Seq. ID no. 12594289
  misc_feature (33)..(33): Xaa is any aa, unknown or other
MLLSSGLSSYMFLKGQRIRSFSPLLPTLLTIAXR

SEQ ID NO: 15536 - DNA, 828 bp, Zea mays subsp. mays; identical to SEQ ID NO: 14873
  misc_feature (1)..(828): Ceres Seq. ID no. 12595473
  misc_feature: MA Experiment ID: 108532 Result: Up-regulated in Transcription
  misc_feature: MA Experiment 108532 PARAMETER Experiment Name: Zm_20uM_KNO3_H-to-L_P Parameter: Age (day) Value: 11
  misc_feature: MA Experiment 108532 PARAMETER Experiment Name: Zm_20uM_KNO3_H-to-L_P Parameter: Organism Value: Zea mays
  misc_feature: MA Experiment 108532 PARAMETER Experiment Name: Zm_20uM_KNO3_H-to-L_P Parameter: Plant Line Value: 35A19
  misc_feature: MA Experiment 108532 PARAMETER Experiment Name: Zm_20uM_KNO3_H-to-L_P Parameter: Timepoint (hr) Value: 16
  misc_feature: MA Experiment 108532 PARAMETER Experiment Name: Zm_20uM_KNO3_H-to-L_P Parameter: Tissue Value: Roots
  misc_feature: MA Experiment 108532 PARAMETER Experiment Name: Zm_20uM_KNO3_H-to-L_P Parameter: Treatment Value: 20uM KNO3 vs. 60mM KNO3
  misc_feature: MA Experiment ID: 20000535 Result: Up-regulated in Transcription
  misc_feature: MA Experiment 20000535 PARAMETER Experiment Name: Zm_Hybrid_Seed_Dev_P Parameter: DAP Value: 30 vs. 12
  misc_feature: MA Experiment 20000535 PARAMETER Experiment Name: Zm_Hybrid_Seed_Dev_P Parameter: Organism Value: Zea mays
  misc_feature: MA Experiment 20000535 PARAMETER Experiment Name: Zm_Hybrid_Seed_Dev_P Parameter: Plant Line Value: 35A19
  misc_feature: MA Experiment 20000535 PARAMETER Experiment Name: Zm_Hybrid_Seed_Dev_P Parameter: Tissue Value: Embryo vs. Unfert Floret

SEQ ID NO: 15537 - protein, 230 aa, Zea mays subsp. mays; identical to SEQ ID NO: 14874
  peptide (1)..(230): Ceres Seq. ID no. 12595474
  misc_feature (106)..(208): Pfam Name: Protease inhibitor/seed storage/LTP family Pfam Description: Protease inhibitor/seed storage/LTP family
  misc_feature (106)..(208): Pfam Name: Protease inhibitor/seed storage/LTP family Pfam Description: Protease inhibitor/seed storage/LTP family
  misc_feature (106)..(208): Pfam Name: Protease inhibitor/seed storage/LTP family Pfam Description: Protease inhibitor/seed storage/LTP family
  misc_feature (106)..(208): Pfam Name: Protease inhibitor/seed storage/LTP family Pfam Description: Protease inhibitor/seed storage/LTP family
  misc_feature (53)..(230): Homolog of NCBI NO: 16305115 NR Description: 15kD beta zein [Zea mays]
  misc_feature (53)..(230): Homolog of NCBI NO: 419803 NR Description: zein protein - maize >gi|168705|gb|AAA33543.1|
  misc_feature (53)..(230): Homolog of NCBI NO: 16305115 NR Description: 15kD beta zein [Zea mays]
  misc_feature (53)..(230): Homolog of NCBI NO: 168664 NR Description: zein protein precursor
  misc_feature (53)..(230): Homolog of NCBI NO: 16305115 NR Description: 15kD beta zein [Zea mays]
  misc_feature (53)..(230): Homolog of NCBI NO: 168664 NR Description: zein protein precursor
  misc_feature (53)..(230): Homolog of NCBI NO: 100552 NR Description: beta-coixin, 17K, precursor - Job's tears
  misc_feature (53)..(230): Homolog of NCBI NO: 141616 NR Description: ZEIN-BETA PRECURSOR (16 KD) (ZEIN 2) (CLONE 15A3)
  misc_feature (53)..(230): Homolog of NCBI NO: 168664 NR Description: zein protein precursor
  misc_feature (53)..(230): Homolog of NCBI NO: 419803 NR Description: zein protein - maize >gi|168705|gb|AAA33543.1|
  misc_feature (53)..(230): Homolog of NCBI NO: 16305115 NR Description: 15kD beta zein [Zea mays]
  misc_feature (53)..(230): Homolog of NCBI NO: 100552 NR Description: beta-coixin, 17K, precursor - Job's tears
  misc_feature (53)..(230): Homolog of NCBI NO: 141616 NR Description: ZEIN-BETA PRECURSOR (16 KD) (ZEIN 2) (CLONE 15A3)
  misc_feature (53)..(230): Homolog of NCBI NO: 419803 NR Description: zein protein - maize >gi|168705|gb|AAA33543.1|
  misc_feature (53)..(230): Homolog of NCBI NO: 100552 NR Description: beta-coixin, 17K, precursor - Job's tears
  misc_feature (53)..(230): Homolog of NCBI NO: 141616 NR Description: ZEIN-BETA PRECURSOR (16 KD) (ZEIN 2) (CLONE 15A3)
  misc_feature (53)..(230): Homolog of NCBI NO: 419803 NR Description: zein protein - maize >gi|168705|gb|AAA33543.1|
  misc_feature (53)..(230): Homolog of NCBI NO: 168664 NR Description: zein protein precursor
  misc_feature (53)..(230): Homolog of NCBI NO: 141616 NR Description: ZEIN-BETA PRECURSOR (16 KD) (ZEIN 2) (CLONE 15A3)
  misc_feature (53)..(230): Homolog of NCBI NO: 100552 NR Description: beta-coixin, 17K, precursor - Job's tears

SEQ ID NO: 15538 - protein, 222 aa, Zea mays subsp. mays; identical to SEQ ID NO: 14875
  peptide (1)..(222): Ceres Seq. ID no. 12595475
  misc_feature (98)..(200): Pfam Name: Protease inhibitor/seed storage/LTP family Pfam Description: Protease inhibitor/seed storage/LTP family
  misc_feature (98)..(200): Pfam Name: Protease inhibitor/seed storage/LTP family Pfam Description: Protease inhibitor/seed storage/LTP family
  misc_feature (98)..(200): Pfam Name: Protease inhibitor/seed storage/LTP family Pfam Description: Protease inhibitor/seed storage/LTP family
  misc_feature (98)..(200): Pfam Name: Protease inhibitor/seed storage/LTP family Pfam Description: Protease inhibitor/seed storage/LTP family
  misc_feature (45)..(222): Homolog of NCBI NO: 419803 NR Description: zein protein - maize >gi|168705|gb|AAA33543.1|
  misc_feature (45)..(222): Homolog of NCBI NO: 168664 NR Description: zein protein precursor
  misc_feature (45)..(222): Homolog of NCBI NO: 16305115 NR Description: 15kD beta zein [Zea mays]
  misc_feature (45)..(222): Homolog of NCBI NO: 168664 NR Description: zein protein precursor
  misc_feature (45)..(222): Homolog of NCBI NO: 16305115 NR Description: 15kD beta zein [Zea mays]
  misc_feature (45)..(222): Homolog of NCBI NO: 168664 NR Description: zein protein precursor
  misc_feature (45)..(222): Homolog of NCBI NO: 100552 NR Description: beta-coixin, 17K, precursor - Job's tears
  misc_feature (45)..(222): Homolog of NCBI NO: 141616 NR Description: ZEIN-BETA PRECURSOR (16 KD) (ZEIN 2) (CLONE 15A3)
  misc_feature (45)..(222): Homolog of NCBI NO: 168664 NR Description: zein protein precursor
  misc_feature (45)..(222): Homolog of NCBI NO: 419803 NR Description: zein protein - maize >gi|168705|gb|AAA33543.1|
  misc_feature (45)..(222): Homolog of NCBI NO: 16305115 NR Description: 15kD beta zein [Zea mays]
  misc_feature (45)..(222): Homolog of NCBI NO: 100552 NR Description: beta-coixin, 17K, precursor - Job's tears
  misc_feature (45)..(222): Homolog of NCBI NO: 141616 NR Description: ZEIN-BETA PRECURSOR (16 KD) (ZEIN 2) (CLONE 15A3)
  misc_feature (45)..(222): Homolog of NCBI NO: 419803 NR Description: zein protein - maize >gi|168705|gb|AAA33543.1|
  misc_feature (45)..(222): Homolog of NCBI NO: 100552 NR Description: beta-coixin, 17K, precursor - Job's tears
  misc_feature (45)..(222): Homolog of NCBI NO: 141616 NR Description: ZEIN-BETA PRECURSOR (16 KD) (ZEIN 2) (CLONE 15A3)
  misc_feature (45)..(222): Homolog of NCBI NO: 419803 NR Description: zein protein - maize >gi|168705|gb|AAA33543.1|
  misc_feature (45)..(222): Homolog of NCBI NO: 16305115 NR Description: 15kD beta zein [Zea mays]
  misc_feature (45)..(222): Homolog of NCBI NO: 141616 NR Description: ZEIN-BETA PRECURSOR (16 KD) (ZEIN 2) (CLONE 15A3)
  misc_feature (45)..(222): Homolog of NCBI NO: 100552 NR Description: beta-coixin, 17K, precursor - Job's tears

SEQ ID NO: 15539 - protein, 178 aa, Zea mays subsp. mays; identical to SEQ ID NO: 14876
  peptide (1)..(178): Ceres Seq. ID no. 12595476
  misc_feature (54)..(156): Pfam Name: Protease inhibitor/seed storage/LTP family Pfam Description: Protease inhibitor/seed storage/LTP family
  misc_feature (54)..(156): Pfam Name: Protease inhibitor/seed storage/LTP family Pfam Description: Protease inhibitor/seed storage/LTP family
  misc_feature (54)..(156): Pfam Name: Protease inhibitor/seed storage/LTP family Pfam Description: Protease inhibitor/seed storage/LTP family
  misc_feature (54)..(156): Pfam Name: Protease inhibitor/seed storage/LTP family Pfam Description: Protease inhibitor/seed storage/LTP family
  misc_feature (1)..(178): Homolog of NCBI NO: 16305115 NR Description: 15kD beta zein [Zea mays]
  misc_feature (1)..(178): Homolog of NCBI NO: 419803 NR Description: zein protein - maize >gi|168705|gb|AAA33543.1|
  misc_feature (1)..(178): Homolog of NCBI NO: 16305115 NR Description: 15kD beta zein [Zea mays]
  misc_feature (1)..(178): Homolog of NCBI NO: 168664 NR Description: zein protein precursor
  misc_feature (1)..(178): Homolog of NCBI NO: 16305115 NR Description: 15kD beta zein [Zea mays]
  misc_feature (1)..(178): Homolog of NCBI NO: 168664 NR Description: zein protein precursor
  misc_feature (1)..(178): Homolog of NCBI NO: 100552 NR Description: beta-coixin, 17K, precursor - Job's tears
  misc_feature (1)..(178): Homolog of NCBI NO: 141616 NR Description: ZEIN-BETA PRECURSOR (16 KD) (ZEIN 2) (CLONE 15A3)
  misc_feature (1)..(178): Homolog of NCBI NO: 168664 NR Description: zein protein precursor
  misc_feature (1)..(178): Homolog of NCBI NO: 419803 NR Description: zein protein - maize >gi|168705|gb|AAA33543.1|
  misc_feature (1)..(178): Homolog of NCBI NO: 16305115 NR Description: 15kD beta zein [Zea mays]
  misc_feature (1)..(178): Homolog of NCBI NO: 100552 NR Description: beta-coixin, 17K, precursor - Job's tears
  misc_feature (1)..(178): Homolog of NCBI NO: 141616 NR Description: ZEIN-BETA PRECURSOR (16 KD) (ZEIN 2) (CLONE 15A3)
  misc_feature (1)..(178): Homolog of NCBI NO: 419803 NR Description: zein protein - maize >gi|168705|gb|AAA33543.1|
  misc_feature (1)..(178): Homolog of NCBI NO: 100552 NR Description: beta-coixin, 17K, precursor - Job's tears
  misc_feature (1)..(178): Homolog of NCBI NO: 141616 NR Description: ZEIN-BETA PRECURSOR (16 KD) (ZEIN 2) (CLONE 15A3)
  misc_feature (1)..(178): Homolog of NCBI NO: 419803 NR Description: zein protein - maize >gi|168705|gb|AAA33543.1|
  misc_feature (1)..(178): Homolog of NCBI NO: 168664 NR Description: zein protein precursor
  misc_feature (1)..(178): Homolog of NCBI NO: 141616 NR Description: ZEIN-BETA PRECURSOR (16 KD) (ZEIN 2) (CLONE 15A3)
  misc_feature (1)..(178): Homolog of NCBI NO: 100552 NR Description: beta-coixin, 17K, precursor - Job's tears

SEQ ID NO: 15540 - DNA, 937 bp, Zea mays subsp. mays; identical to SEQ ID NO: 15528
  misc_feature (1)..(937): Ceres Seq. ID no. 13624118
  misc_feature: MA Experiment ID: 108528 Result: Down-regulated in Transcription
  misc_feature: MA Experiment 108528 PARAMETER Experiment Name: Zm_Imbibed_Seeds_P Parameter: Age (day) Value: 5 vs. 2
  misc_feature: MA Experiment 108528 PARAMETER Experiment Name: Zm_Imbibed_Seeds_P Parameter: Organism Value: Zea mays
  misc_feature: MA Experiment 108528 PARAMETER Experiment Name: Zm_Imbibed_Seeds_P Parameter: Plant Line Value: 35A19
  misc_feature: MA Experiment 108528 PARAMETER Experiment Name: Zm_Imbibed_Seeds_P Parameter: Tissue Value: Aerial vs. Embryo
  misc_feature: MA Experiment ID: 108543 Result: Down-regulated in Transcription
  misc_feature: MA Experiment ID: 108544 Result: Down-regulated in Transcription
  misc_feature: MA Experiment ID: 20000535 Result: Up-regulated in Transcription
  misc_feature: MA Experiment 20000535 PARAMETER Experiment Name: Zm_Hybrid_Seed_Dev_P Parameter: DAP Value: 30 vs. 12
  misc_feature: MA Experiment 20000535 PARAMETER Experiment Name: Zm_Hybrid_Seed_Dev_P Parameter: Organism Value: Zea mays
  misc_feature: MA Experiment 20000535 PARAMETER Experiment Name: Zm_Hybrid_Seed_Dev_P Parameter: Plant Line Value: 35A19
  misc_feature: MA Experiment 20000535 PARAMETER Experiment Name: Zm_Hybrid_Seed_Dev_P Parameter: Tissue Value: Embryo vs. Unfert Floret

SEQ ID NO: 15541 - protein, 278 aa, Zea mays subsp. mays; identical to SEQ ID NO: 15529
  peptide (1)..(278): Ceres Seq. ID no. 13624119
  misc_feature (68)..(157): Pfam Name: Oleosin Pfam Description: Oleosin
  misc_feature (68)..(157): Pfam Name: Oleosin Pfam Description: Oleosin
  misc_feature (30)..(193): Homolog of NCBI NO: 1076818 NR Description: oleosin 17 - maize >gi|687247|gb|AAA68066.1| 17
  misc_feature (30)..(192): Homolog of NCBI NO: 129081 NR Description: Oleosin Zm-II (Oleosin 18 kDa) (Lipid
  misc_feature (30)..(191): Homolog of NCBI NO: 28273373 NR Description: oleosin [Oryza sativa (japonica cultivar-group)]
  misc_feature (30)..(191): Homolog of NCBI NO: 3334279 NR Description: OLEOSIN 18 KD (OSE721) >gi|7442011|pir||T03380 >gi|4102969|gb|AAD10240.1| 18 kDa oleosin [Oryza sativa subsp.
  misc_feature (30)..(191): Homolog of NCBI NO: 1362166 NR Description: oleosin 1 - barley >gi|963062|emb|CAA57994.1|
  misc_feature (30)..(192): Homolog of NCBI NO: 129081 NR Description: Oleosin Zm-II (Oleosin 18 kDa) (Lipid
  misc_feature (30)..(191): Homolog of NCBI NO: 3334279 NR Description: OLEOSIN 18 KD (OSE721) >gi|7442011|pir||T03380 >gi|4102969|gb|AAD10240.1| 18 kDa oleosin [Oryza sativa subsp.
  misc_feature (30)..(152): Homolog of NCBI NO: 21311553 NR Description: 16.9 kDa oleosin [Theobroma cacao]
  misc_feature (20)..(157): Homolog of NCBI NO: 15242686 NR Description: oleosin [Arabidopsis thaliana] Oleosin 21.2 kDa (Oleosin type 2) >gi|725260|gb|AAA87295.1| >gi|10178154|dbj|BAB11599.1| oleosin, isoform 21K [Arabidopsis
  misc_feature (32)..(157): Homolog of NCBI NO: 10880961 NR Description: 19 kDa oleosin [Perilla frutescens]
  misc_feature (30)..(157): Homolog of NCBI NO: 9963897 NR Description: oleosin [Perilla frutescens]
  misc_feature (47)..(157): Homolog of NCBI NO: 82051 NR Description: lipid body-associated membrane protein - carrot
  misc_feature (30)..(191): Homolog of NCBI NO: 1362166 NR Description: oleosin 1 - barley >gi|963062|emb|CAA57994.1|
  misc_feature (30)..(191): Homolog of NCBI NO: 28273373 NR Description: oleosin [Oryza sativa (japonica cultivar-group)]
  misc_feature (30)..(193): Homolog of NCBI NO: 1076818 NR Description: oleosin 17 - maize >gi|687247|gb|AAA68066.1| 17
  misc_feature (47)..(157): Homolog of NCBI NO: 82051 NR Description: lipid body-associated membrane protein - carrot
  misc_feature (30)..(157): Homolog of NCBI NO: 9963897 NR Description: oleosin [Perilla frutescens]
  misc_feature (32)..(157): Homolog of NCBI NO: 10880961 NR Description: 19 kDa oleosin [Perilla frutescens]
  misc_feature (20)..(157): Homolog of NCBI NO: 15242686 NR Description: oleosin [Arabidopsis thaliana] Oleosin 21.2 kDa (Oleosin type 2) >gi|725260|gb|AAA87295.1| >gi|10178154|dbj|BAB11599.1| oleosin, isoform 21K [Arabidopsis
  misc_feature (30)..(152): Homolog of NCBI NO: 21311553 NR Description: 16.9 kDa oleosin [Theobroma cacao]

SEQ ID NO: 15542 - protein, 249 aa, Zea mays subsp. mays; identical to SEQ ID NO: 15530
  peptide (1)..(249): Ceres Seq. ID no. 13624120
  misc_feature (39)..(128): Pfam Name: Oleosin Pfam Description: Oleosin
  misc_feature (39)..(128): Pfam Name: Oleosin Pfam Description: Oleosin
  misc_feature (1)..(164): Homolog of NCBI NO: 1076818 NR Description: oleosin 17 - maize >gi|687247|gb|AAA68066.1| 17
  misc_feature (1)..(163): Homolog of NCBI NO: 129081 NR Description: Oleosin Zm-II (Oleosin 18 kDa) (Lipid
  misc_feature (1)..(162): Homolog of NCBI NO: 28273373 NR Description: oleosin [Oryza sativa (japonica cultivar-group)]
  misc_feature (1)..(162): Homolog of NCBI NO: 3334279 NR Description: OLEOSIN 18 KD (OSE721) >gi|7442011|pir||T03380 >gi|4102969|gb|AAD10240.1| 18 kDa oleosin [Oryza sativa subsp.
  misc_feature (1)..(162): Homolog of NCBI NO: 1362166 NR Description: oleosin 1 - barley >gi|963062|emb|CAA57994.1|
  misc_feature (1)..(163): Homolog of NCBI NO: 129081 NR Description: Oleosin Zm-II (Oleosin 18 kDa) (Lipid
  misc_feature (1)..(162): Homolog of NCBI NO: 3334279 NR Description: OLEOSIN 18 KD (OSE721) >gi|7442011|pir||T03380 >gi|4102969|gb|AAD10240.1| 18 kDa oleosin [Oryza sativa subsp.
  misc_feature (1)..(123): Homolog of NCBI NO: 21311553 NR Description: 16.9 kDa oleosin [Theobroma cacao]
  misc_feature (1)..(128): Homolog of NCBI NO: 15242686 NR Description: oleosin [Arabidopsis thaliana] Oleosin 21.2 kDa (Oleosin type 2) >gi|725260|gb|AAA87295.1| >gi|10178154|dbj|BAB11599.1| oleosin, isoform 21K [Arabidopsis
  misc_feature (3)..(128): Homolog of NCBI NO: 10880961 NR Description: 19 kDa oleosin [Perilla frutescens]
  misc_feature (1)..(128): Homolog of NCBI NO: 9963897 NR Description: oleosin [Perilla frutescens]
  misc_feature (18)..(128): Homolog of NCBI NO: 82051 NR Description: lipid body-associated membrane protein - carrot
  misc_feature (1)..(162): Homolog of NCBI NO: 1362166 NR Description: oleosin 1 - barley >gi|963062|emb|CAA57994.1|
  misc_feature (1)..(162): Homolog of NCBI NO: 28273373 NR Description: oleosin [Oryza sativa (japonica cultivar-group)]
  misc_feature (1)..(164): Homolog of NCBI NO: 1076818 NR Description: oleosin 17 - maize >gi|687247|gb|AAA68066.1| 17
  misc_feature (18)..(128): Homolog of NCBI NO: 82051 NR Description: lipid body-associated membrane protein - carrot
  misc_feature (1)..(128): Homolog of NCBI NO: 9963897 NR Description: oleosin [Perilla frutescens]
  misc_feature (3)..(128): Homolog of NCBI NO: 10880961 NR Description: 19 kDa oleosin [Perilla frutescens]
  misc_feature (1)..(128): Homolog of NCBI NO: 15242686 NR Description: oleosin [Arabidopsis thaliana] Oleosin 21.2 kDa (Oleosin type 2) >gi|725260|gb|AAA87295.1| >gi|10178154|dbj|BAB11599.1| oleosin, isoform 21K [Arabidopsis
  misc_feature (1)..(123): Homolog of NCBI NO: 21311553 NR Description: 16.9 kDa oleosin [Theobroma cacao]

SEQ ID NO: 15543 - protein, 225 aa, Zea mays subsp. mays; identical to SEQ ID NO: 15531
  peptide (1)..(225): Ceres Seq. ID no. 13624121
  misc_feature (15)..(104): Pfam Name: Oleosin Pfam Description: Oleosin
  misc_feature (15)..(104): Pfam Name: Oleosin Pfam Description: Oleosin
  misc_feature (1)..(140): Homolog of NCBI NO: 1076818 NR Description: oleosin 17 - maize >gi|687247|gb|AAA68066.1| 17
  misc_feature (1)..(139): Homolog of NCBI NO: 129081 NR Description: Oleosin Zm-II (Oleosin 18 kDa) (Lipid
  misc_feature (1)..(138): Homolog of NCBI NO: 28273373 NR Description: oleosin [Oryza sativa (japonica cultivar-group)]
  misc_feature (1)..(138): Homolog of NCBI NO: 3334279 NR Description: OLEOSIN 18 KD (OSE721) >gi|7442011|pir||T03380 >gi|4102969|gb|AAD10240.1| 18 kDa oleosin [Oryza sativa subsp.
  misc_feature (1)..(138): Homolog of NCBI NO: 1362166 NR Description: oleosin 1 - barley >gi|963062|emb|CAA57994.1|
  misc_feature (1)..(140): Homolog of NCBI NO: 1076818 NR Description: oleosin 17 - maize >gi|687247|gb|AAA68066.1| 17
  misc_feature (1)..(138): Homolog of NCBI NO: 28273373 NR Description: oleosin [Oryza sativa (japonica cultivar-group)]
  misc_feature (1)..(138): Homolog of NCBI NO: 1362166 NR Description: oleosin 1 - barley >gi|963062|emb|CAA57994.1|
  misc_feature (1)..(99): Homolog of NCBI NO: 21311553 NR Description: 16.9 kDa oleosin [Theobroma cacao]
  misc_feature (1)..(104): Homolog of NCBI NO: 15242686 NR Description: oleosin [Arabidopsis thaliana] Oleosin 21.2 kDa (Oleosin type 2) >gi|725260|gb|AAA87295.1| >gi|10178154|dbj|BAB11599.1| oleosin, isoform 21K [Arabidopsis
  misc_feature (1)..(104): Homolog of NCBI NO: 10880961 NR Description: 19 kDa oleosin [Perilla frutescens]
  misc_feature (1)..(104): Homolog of NCBI NO: 9963897 NR Description: oleosin [Perilla frutescens]
  misc_feature (1)..(104): Homolog of NCBI NO: 82051 NR Description: lipid body-associated membrane protein - carrot
  misc_feature (1)..(138): Homolog of NCBI NO: 3334279 NR Description: OLEOSIN 18 KD (OSE721) >gi|7442011|pir||T03380 >gi|4102969|gb|AAD10240.1| 18 kDa oleosin [Oryza sativa subsp.
  misc_feature (1)..(139): Homolog of NCBI NO: 129081 NR Description: Oleosin Zm-II (Oleosin 18 kDa) (Lipid
  misc_feature (1)..(104): Homolog of NCBI NO: 82051 NR Description: lipid body-associated membrane protein - carrot
  misc_feature (1)..(104): Homolog of NCBI NO: 9963897 NR Description: oleosin [Perilla frutescens]
  misc_feature (1)..(104): Homolog of NCBI NO: 10880961 NR Description: 19 kDa oleosin [Perilla frutescens]
  misc_feature (1)..(104): Homolog of NCBI NO: 15242686 NR Description: oleosin [Arabidopsis thaliana] Oleosin 21.2 kDa (Oleosin type 2) >gi|725260|gb|AAA87295.1| >gi|10178154|dbj|BAB11599.1| oleosin, isoform 21K [Arabidopsis
  misc_feature (1)..(99): Homolog of NCBI NO: 21311553 NR Description: 16.9 kDa oleosin [Theobroma cacao]

SEQ ID NO: 15544 - DNA, 1071 bp, Zea mays subsp. mays; identical to SEQ ID NO: 3700
  misc_feature (1)..(1071): Ceres Seq. ID no. 13624136
  misc_feature: MA Experiment ID: 108522 Result: Down-regulated in Transcription
  misc_feature: MA Experiment 108522 PARAMETER Experiment Name: Zm_42deg_Heat_P Parameter: Age (day) Value: 8
  misc_feature: MA Experiment 108522 PARAMETER Experiment Name: Zm_42deg_Heat_P Parameter: Organism Value: Zea mays
  misc_feature: MA Experiment 108522 PARAMETER Experiment Name: Zm_42deg_Heat_P Parameter: Plant Line Value: 35A19
  misc_feature: MA Experiment 108522 PARAMETER Experiment Name: Zm_42deg_Heat_P Parameter: Temperature (deg C) Value: 42 vs. 22
  misc_feature: MA Experiment 108522 PARAMETER Experiment Name: Zm_42deg_Heat_P Parameter: Timepoint (hr) Value: 1
  misc_feature: MA Experiment 108522 PARAMETER Experiment Name: Zm_42deg_Heat_P Parameter: Tissue Value: Aerial

SEQ ID NO: 15545 - protein, 227 aa, Zea mays subsp. mays; identical to SEQ ID NO: 3701
  peptide (1)..(227): Ceres Seq. ID no. 13624137
  misc_feature (130)..(220): Pfam Name: Transcriptional Coactivator p15 (PC4) Pfam Description: Transcriptional Coactivator p15 (PC4)
  misc_feature (45)..(227): Homolog of NCBI NO: 34910378 NR Description: P0684B02.23 [Oryza sativa (japonica
  misc_feature (95)..(224): Homolog of NCBI NO: 13699910 NR Description: putative transcriptional coactivator [Brassica
  misc_feature (66)..(224): Homolog of NCBI NO: 15236980 NR Description: transcriptional co-activator (KELP) -related
  misc_feature (45)..(224): Homolog of NCBI NO: 16610191 NR Description: PBF68 protein [Nicotiana tabacum]
  misc_feature (45)..(138): Homolog of NCBI NO: 13699910 NR Description: putative transcriptional coactivator [Brassica
  misc_feature (124)..(223): Homolog of NCBI NO: 15242365 NR Description: transcriptional co-activator (KIWI) -related
  misc_feature (45)..(137): Homolog of NCBI NO: 15236980 NR Description: transcriptional co-activator (KELP) -related
  misc_feature (150)..(222): Homolog of NCBI NO: 40739125 NR Description: hypothetical protein AN5806.2 [Aspergillus
  misc_feature (126)..(225): Homolog of NCBI NO: 15242363 NR Description: transcriptional co-activator-related protein
  misc_feature (100)..(217): Homolog of NCBI NO: 17542398 NR Description: Transcriptional Coactivator p15 (PC4) (14.4 kD)

SEQ ID NO: 15546 - protein, 183 aa, Zea mays subsp. mays; identical to SEQ ID NO: 3702
  peptide (1)..(183): Ceres Seq. ID no. 13624138
  misc_feature (86)..(176): Pfam Name: Transcriptional Coactivator p15 (PC4) Pfam Description: Transcriptional Coactivator p15 (PC4)
  misc_feature (1)..(183): Homolog of NCBI NO: 34910378 NR Description: P0684B02.23 [Oryza sativa (japonica
  misc_feature (51)..(180): Homolog of NCBI NO: 13699910 NR Description: putative transcriptional coactivator [Brassica
  misc_feature (22)..(180): Homolog of NCBI NO: 15236980 NR Description: transcriptional co-activator (KELP) -related
  misc_feature (1)..(180): Homolog of NCBI NO: 16610191 NR Description: PBF68 protein [Nicotiana tabacum]
  misc_feature (1)..(94): Homolog of NCBI NO: 13699910 NR Description: putative transcriptional coactivator [Brassica
  misc_feature (80)..(179): Homolog of NCBI NO: 15242365 NR Description: transcriptional co-activator (KIWI) -related
  misc_feature (1)..(93): Homolog of NCBI NO: 15236980 NR Description: transcriptional co-activator (KELP) -related
  misc_feature (106)..(178): Homolog of NCBI NO: 40739125 NR Description: hypothetical protein AN5806.2 [Aspergillus
  misc_feature (82)..(181): Homolog of NCBI NO: 15242363 NR Description: transcriptional co-activator-related protein
  misc_feature (56)..(173): Homolog of NCBI NO: 17542398 NR Description: Transcriptional Coactivator p15 (PC4) (14.4 kD)

SEQ ID NO: 15547 - protein, 162 aa, Zea mays subsp. mays; identical to SEQ ID NO: 3703
  peptide (1)..(162): Ceres Seq. ID no. 13624139
  misc_feature (65)..(155): Pfam Name: Transcriptional Coactivator p15 (PC4) Pfam Description: Transcriptional Coactivator p15 (PC4)
  misc_feature (1)..(162): Homolog of NCBI NO: 34910378 NR Description: P0684B02.23 [Oryza sativa (japonica
  misc_feature (30)..(159): Homolog of NCBI NO: 13699910 NR Description: putative transcriptional coactivator [Brassica
  misc_feature (1)..(159): Homolog of NCBI NO: 15236980 NR Description: transcriptional co-activator (KELP) -related
  misc_feature (1)..(159): Homolog of NCBI NO: 16610191 NR Description: PBF68 protein [Nicotiana tabacum]
  misc_feature (1)..(73): Homolog of NCBI NO: 13699910 NR Description: putative transcriptional coactivator [Brassica
  misc_feature (59)..(158): Homolog of NCBI NO: 15242365 NR Description: transcriptional co-activator (KIWI) -related
  misc_feature (1)..(72): Homolog of NCBI NO: 15236980 NR Description: transcriptional co-activator (KELP) -related
  misc_feature (85)..(157): Homolog of NCBI NO: 40739125 NR Description: hypothetical protein AN5806.2 [Aspergillus
  misc_feature (61)..(160): Homolog of NCBI NO: 15242363 NR Description: transcriptional co-activator-related protein
  misc_feature (35)..(152): Homolog of NCBI NO: 17542398 NR Description: Transcriptional Coactivator p15 (PC4) (14.4 kD)

SEQ ID NO: 15548 - DNA, 1263 bp, Zea mays subsp. mays
  misc_feature (1)..(1263): Ceres Seq. ID no. 14302660
  misc_feature: MA Experiment ID: 108559 Result: Up-regulated in Transcription
  misc_feature: MA Experiment 108559 PARAMETER Experiment Name: Zm_5mM_NO_P Parameter: Age (day) Value: 8
  misc_feature: MA Experiment 108559 PARAMETER Experiment Name: Zm_5mM_NO_P Parameter: Organism Value: Zea mays
  misc_feature: MA Experiment 108559 PARAMETER Experiment Name: Zm_5mM_NO_P Parameter: Plant Line Value: 35A19
  misc_feature: MA Experiment 108559 PARAMETER Experiment Name: Zm_5mM_NO_P Parameter: Timepoint (hr) Value: 12
  misc_feature: MA Experiment 108559 PARAMETER Experiment Name: Zm_5mM_NO_P Parameter: Tissue Value: Aerial
  misc_feature: MA Experiment 108559 PARAMETER Experiment Name: Zm_5mM_NO_P Parameter: Treatment Value: 5mM NO vs. No Treatment
atttgagaaggagagggaaaatgatgacctcgtggcttctgggccgccggggcccctccggcttctcctggagttccaccgccgaccaagtcacgcagggcatctccgccgccggcctcaccgccatcgtcactggggcgtccagcggcatcggcgcggagacggcgcgaacgctggcgctgcgcggggcccacgtcatcatggccgtcaggagccttcccgctgcccaggccgtcaaggacgccgtcctcgcccaggcgccgggggccaagctcgacgtcatggagctcgacctctcgtccatggcctctgtccgcgctttcgcgtcccaattcatcgacaggggtctccccctcaacatccttatcaacaatgcaggagtaatggcaataccttttgcgctttcaaaggatggaattgagatgcagtttgcaactaatcatgttgggcatttcctgctcacacaccttctattggataccatgaagaggacctctcatgaatcaaatttggaaggaagaattgtcaacgtgtcatcagaggggcacagacttgcatatcgggaaggaatccgttttgacaagatcaacgatgaatcagtgtatagtagcattggtgcatatgggcaatcaaagcttgcaaacatattgcatgctaatgaacttgccaggcgatttgaggaagataatgtcaacataactgcaaattctcttcatcctggttccattatcacgaaccttcttcgctaccacagtatcctagatgttctccatcggacgctgggtaaattggtgttgaaaaatgctgagcagggtgcggcaactacatgctatttggcactccacccgcatgtgaagggcgtgtccgggaagtacttctgcgactgtaacctgtacgagccaagcgcgaacgccaaggacatggagttggccaagaggctctgggacttcggcgtcgagctcatcacctagctcatgcttcttgttgttagcgacttgttttcagacatggatgtaatgtaaatcccttgacagatggtaaattctgtaggccctcgaggagctcctgtgtggtaaactcattcacctcaatctatctacgtgtattaaggtggattagggtgtaaattaaattaatttacactccaatcgccctcgaggagctccggtgtggataatgctttggttggatattttagtattcacctgaatttacgtgtattaagatgaattagggtgtaaattaaattaattacactccaag

SEQ ID NO: 15549 - protein, 322 aa, Zea mays subsp. mays
  peptide (1)..(322): Ceres Seq. ID no. 14302661
  misc_feature (11)..(320): Homolog of NCBI NO: 15233359 NR Description: short-chain dehydrogenase/reductase family protein
  misc_feature (11)..(320): Homolog of NCBI NO: 23297050 NR Description: unknown protein [Arabidopsis thaliana]
  misc_feature (11)..(320): Homolog of NCBI NO: 30686197 NR Description: short-chain dehydrogenase/reductase family
  misc_feature (11)..(320): Homolog of NCBI NO: 18416145 NR Description: short-chain dehydrogenase/reductase family protein
  misc_feature (10)..(321): Homolog of NCBI NO: 18413950 NR Description: short-chain dehydrogenase/reductase family
  misc_feature (10)..(321): Homolog of NCBI NO: 20260302 NR Description: putative protein [Arabidopsis thaliana]
  misc_feature (10)..(321): Homolog of NCBI NO: 21554820 NR Description: putativepod-specific dehydrogenase SAC25
  misc_feature (15)..(322): Homolog of NCBI NO: 37536622 NR Description: putative WW-domain oxidoreductase [Oryza sativa
  misc_feature (10)..(321): Homolog of NCBI NO: 34895876 NR Description: P0009G03.18 [Oryza sativa (japonica
  misc_feature (12)..(321): Homolog of NCBI NO: 15224306 NR Description: short-chain dehydrogenase/reductase family [Arabidopsis thaliana] >gi|7485438|pir||T02520 probable
LRRRGKMMTSWLLGRRGPSGFSWSSTADQVTQGISAAGLTAIVTGASSGIGAETARTLALRGAHVIMAVRSLPAAQAVKDAVLAQAPGAKLDVMELDLSSMASVRAFASQFIDRGLPLNILINNAGVMAIPFALSKDGIEMQFATNHVGHFLLTHLLLDTMKRTSHESNLEGRIVNVSSEGHRLAYREGIRFDKINDESVYSSIGAYGQSKLANILHANELARRFEEDNVNITANSLHPGSIITNLLRYHSILDVLHRTLGKLVLKNAEQGAATTCYLALHPHVKGVSGKYFCDCNLYEPSANAKDMELAKRLWDFGVELIT

SEQ ID NO: 15550 - protein, 316 aa, Zea mays subsp. mays; identical to SEQ ID NO: 4121
  peptide (1)..(316): Ceres Seq. ID no. 14302662
  misc_feature (5)..(314): Homolog of NCBI NO: 15233359 NR Description: short-chain dehydrogenase/reductase family protein
  misc_feature (5)..(314): Homolog of NCBI NO: 23297050 NR Description: unknown protein [Arabidopsis thaliana]
  misc_feature (5)..(314): Homolog of NCBI NO: 30686197 NR Description: short-chain dehydrogenase/reductase family
  misc_feature (5)..(314): Homolog of NCBI NO: 18416145 NR Description: short-chain dehydrogenase/reductase family protein
  misc_feature (4)..(315): Homolog of NCBI NO: 18413950 NR Description: short-chain dehydrogenase/reductase family
  misc_feature (4)..(315): Homolog of NCBI NO: 20260302 NR Description: putative protein [Arabidopsis thaliana]
  misc_feature (4)..(315): Homolog of NCBI NO: 21554820 NR Description: putativepod-specific dehydrogenase SAC25
  misc_feature (9)..(316): Homolog of NCBI NO: 37536622 NR Description: putative WW-domain oxidoreductase [Oryza sativa
  misc_feature (4)..(315): Homolog of NCBI NO: 34895876 NR Description: P0009G03.18 [Oryza sativa (japonica
  misc_feature (6)..(315): Homolog of NCBI NO: 15224306 NR Description: short-chain dehydrogenase/reductase family [Arabidopsis thaliana] >gi|7485438|pir||T02520 probable

SEQ ID NO: 15551 - protein, 315 aa, Zea mays subsp. mays; identical to SEQ ID NO: 4122
  peptide (1)..(315): Ceres Seq. ID no. 14302663
  misc_feature (5)..(314): Homolog of NCBI NO: 15224306 NR Description: short-chain dehydrogenase/reductase family [Arabidopsis thaliana] >gi|7485438|pir||T02520 probable
  misc_feature (4)..(313): Homolog of NCBI NO: 15233359 NR Description: short-chain dehydrogenase/reductase family protein
  misc_feature (4)..(313): Homolog of NCBI NO: 23297050 NR Description: unknown protein [Arabidopsis thaliana]
  misc_feature (4)..(313): Homolog of NCBI NO: 30686197 NR Description: short-chain dehydrogenase/reductase family
  misc_feature (4)..(313): Homolog of NCBI NO: 18416145 NR Description: short-chain dehydrogenase/reductase family protein
  misc_feature (3)..(314): Homolog of NCBI NO: 18413950 NR Description: short-chain dehydrogenase/reductase family
  misc_feature (3)..(314): Homolog of NCBI NO: 20260302 NR Description: putative protein [Arabidopsis thaliana]
  misc_feature (3)..(314): Homolog of NCBI NO: 21554820 NR Description: putativepod-specific dehydrogenase SAC25
  misc_feature (8)..(315): Homolog of NCBI NO: 37536622 NR Description: putative WW-domain oxidoreductase [Oryza sativa
  misc_feature (3)..(314): Homolog of NCBI NO: 34895876 NR Description: P0009G03.18 [Oryza sativa (japonica

SEQ ID NO: 15552 - DNA, 451 bp, Zea mays subsp. mays
  misc_feature (1)..(451): Ceres Seq. ID no. 7119950
  misc_feature: MA Experiment ID: 108523 Result: Down-regulated in Transcription
  misc_feature: MA Experiment 108523 PARAMETER Experiment Name: Zm_42deg_Heat_P Parameter: Age (day) Value: 8
  misc_feature: MA Experiment 108523 PARAMETER Experiment Name: Zm_42deg_Heat_P Parameter: Organism Value: Zea mays
  misc_feature: MA Experiment 108523 PARAMETER Experiment Name: Zm_42deg_Heat_P Parameter: Plant Line Value: 35A19
  misc_feature: MA Experiment 108523 PARAMETER Experiment Name: Zm_42deg_Heat_P Parameter: Temperature (deg C) Value: 42 vs. 22
  misc_feature: MA Experiment 108523 PARAMETER Experiment Name: Zm_42deg_Heat_P Parameter: Timepoint (hr) Value: 6
  misc_feature: MA Experiment 108523 PARAMETER Experiment Name: Zm_42deg_Heat_P Parameter: Tissue Value: Aerial
  misc_feature: MA Experiment ID: 108527 Result: Down-regulated in Transcription
  misc_feature: MA Experiment 108527 PARAMETER Experiment Name: Zm_5mM_NO_P Parameter: Age (day) Value: 8
  misc_feature: MA Experiment 108527 PARAMETER Experiment Name: Zm_5mM_NO_P Parameter: Organism Value: Zea mays
  misc_feature: MA Experiment 108527 PARAMETER Experiment Name: Zm_5mM_NO_P Parameter: Plant Line Value: 35A19
  misc_feature: MA Experiment 108527 PARAMETER Experiment Name: Zm_5mM_NO_P Parameter: Timepoint (hr) Value: 6
  misc_feature: MA Experiment 108527 PARAMETER Experiment Name: Zm_5mM_NO_P Parameter: Tissue Value: Aerial
  misc_feature: MA Experiment 108527 PARAMETER Experiment Name: Zm_5mM_NO_P Parameter: Treatment Value: 5mM NO vs. No Treatment
  misc_feature: MA Experiment ID: 108528 Result: Down-regulated in Transcription
  misc_feature: MA Experiment 108528 PARAMETER Experiment Name: Zm_Imbibed_Seeds_P Parameter: Age (day) Value: 5 vs. 2
  misc_feature: MA Experiment 108528 PARAMETER Experiment Name: Zm_Imbibed_Seeds_P Parameter: Organism Value: Zea mays
  misc_feature: MA Experiment 108528 PARAMETER Experiment Name: Zm_Imbibed_Seeds_P Parameter: Plant Line Value: 35A19
  misc_feature: MA Experiment 108528 PARAMETER Experiment Name: Zm_Imbibed_Seeds_P Parameter: Tissue Value: Aerial vs. Embryo
  misc_feature: MA Experiment ID: 108530 Result: Down-regulated in Transcription
  misc_feature: MA Experiment 108530 PARAMETER Experiment Name: Zm_Imbibed_Seeds_P Parameter: Age (day) Value: 6 vs. 2
  misc_feature: MA Experiment 108530 PARAMETER Experiment Name: Zm_Imbibed_Seeds_P Parameter: Organism Value: Zea mays
  misc_feature: MA Experiment 108530 PARAMETER Experiment Name: Zm_Imbibed_Seeds_P Parameter: Plant Line Value: 35A19
  misc_feature: MA Experiment 108530 PARAMETER Experiment Name: Zm_Imbibed_Seeds_P Parameter: Tissue Value: Aerial vs. Embryo
  misc_feature: MA Experiment ID: 108536 Result: Down-regulated in Transcription
  misc_feature: MA Experiment 108536 PARAMETER Experiment Name: Zm_Meristem_P Parameter: Age (day) Value: 8
  misc_feature: MA Experiment 108536 PARAMETER Experiment Name: Zm_Meristem_P Parameter: Organism Value: Zea mays
  misc_feature: MA Experiment 108536 PARAMETER Experiment Name: Zm_Meristem_P Parameter: Plant Line Value: 35A19
  misc_feature: MA Experiment 108536 PARAMETER Experiment Name: Zm_Meristem_P Parameter: Tissue Value: Shoot Meristem vs. Above Shoot Meristem
  misc_feature: MA Experiment ID: 108543 Result: Up-regulated in Transcription
  misc_feature: MA Experiment ID: 108556 Result: Down-regulated in Transcription
  misc_feature: MA Experiment 108556 PARAMETER Experiment Name: Zm_Drought_P Parameter: Age (day) Value: 9
  misc_feature: MA Experiment 108556 PARAMETER Experiment Name: Zm_Drought_P Parameter: Organism Value: Zea mays
  misc_feature: MA Experiment 108556 PARAMETER Experiment Name: Zm_Drought_P Parameter: Plant Line Value: 35A19
  misc_feature: MA Experiment 108556 PARAMETER Experiment Name: Zm_Drought_P Parameter: Timepoint (hr) Value: 24
  misc_feature: MA Experiment 108556 PARAMETER Experiment Name: Zm_Drought_P Parameter: Tissue Value: Aerial
  misc_feature: MA Experiment 108556 PARAMETER Experiment Name: Zm_Drought_P Parameter: Treatment Value: Drought vs. No Drought
  misc_feature: MA Experiment ID: 20000108 Result: Up-regulated in Transcription
  misc_feature: MA Experiment 20000108 PARAMETER Experiment Name: Zm_Root-Tips_P Parameter: Age (day) Value: 12
  misc_feature: MA Experiment 20000108 PARAMETER Experiment Name: Zm_Root-Tips_P Parameter: Organism Value: Zea mays
  misc_feature: MA Experiment 20000108 PARAMETER Experiment Name: Zm_Root-Tips_P Parameter: Tissue Value: Root tips vs. Root mid region    35
  misc_feature: MA Experiment 20000108 PARAMETER Experiment Name: Zm_Root-Tips_P Parameter: Tissue Value: Root tips vs. Root mid region   Sequence Listing-Misc Features (4)
  misc_feature: MA Experiment ID: 20000478 Result: Down-regulated in Transcription
  misc_feature: MA Experiment 20000478 PARAMETER Experiment Name: Zm_5mM_SA_P Parameter: Age (day) Value: 11
  misc_feature: MA Experiment 20000478 PARAMETER Experiment Name: Zm_5mM_SA_P Parameter: Organism Value: Zea mays
  misc_feature: MA Experiment 20000478 PARAMETER Experiment Name: Zm_5mM_SA_P Parameter: Plant Line Value: 35A19
  misc_feature: MA Experiment 20000478 PARAMETER Experiment Name: Zm_5mM_SA_P Parameter: Timepoint (hr) Value: 72
  misc_feature: MA Experiment 20000478 PARAMETER Experiment Name: Zm_5mM_SA_P Parameter: Tissue Value: Aerial
  misc_feature: MA Experiment 20000478 PARAMETER Experiment Name: Zm_5mM_SA_P Parameter: Treatment Value: 5mM SA vs. No Treatment
  misc_feature: MA Experiment ID: 20000479 Result: Down-regulated in Transcription
  misc_feature: MA Experiment 20000479 PARAMETER Experiment Name: Zm_Drought_P Parameter: Age (day) Value: 10
  misc_feature: MA Experiment 20000479 PARAMETER Experiment Name: Zm_Drought_P Parameter: Organism Value: Zea mays
  misc_feature: MA Experiment 20000479 PARAMETER Experiment Name: Zm_Drought_P Parameter: Plant Line Value: 35A19
  misc_feature: MA Experiment 20000479 PARAMETER Experiment Name: Zm_Drought_P Parameter: Timepoint (hr) Value: 48
  misc_feature: MA Experiment 20000479 PARAMETER Experiment Name: Zm_Drought_P Parameter: Tissue Value: Aerial
  misc_feature: MA Experiment 20000479 PARAMETER Experiment Name: Zm_Drought_P Parameter: Treatment Value: Drought vs. No Drought
  misc_feature: MA Experiment ID: 20000480 Result: Down-regulated in Transcription
  misc_feature: MA Experiment 20000480 PARAMETER Experiment Name: Zm_Drought_P Parameter: Age (day) Value: 11
  misc_feature: MA Experiment 20000480 PARAMETER Experiment Name: Zm_Drought_P Parameter: Organism Value: Zea mays
  misc_feature: MA Experiment 20000480 PARAMETER Experiment Name: Zm_Drought_P Parameter: Plant Line Value: 35A19
  misc_feature: MA Experiment 20000480 PARAMETER Experiment Name: Zm_Drought_P Parameter: Timepoint (hr) Value: 72
  misc_feature: MA Experiment 20000480 PARAMETER Experiment Name: Zm_Drought_P Parameter: Tissue Value: Aerial
  misc_feature: MA Experiment 20000480 PARAMETER Experiment Name: Zm_Drought_P Parameter: Treatment Value: Drought vs. No Drought
  misc_feature: MA Experiment ID: 20000488 Result: Down-regulated in Transcription
  misc_feature: MA Experiment 20000488 PARAMETER Experiment Name: Zm_50mM_NH4NO3_L_to_H_P Parameter: Organism Value: Zea mays
  misc_feature: MA Experiment 20000488 PARAMETER Experiment Name: Zm_50mM_NH4NO3_L_to_H_P Parameter: Timepoint (hr) Value: 8
  misc_feature: MA Experiment 20000488 PARAMETER Experiment Name: Zm_50mM_NH4NO3_L_to_H_P Parameter: Tissue Value: Leaves
  misc_feature: MA Experiment 20000488 PARAMETER Experiment Name: Zm_50mM_NH4NO3_L_to_H_P Parameter: Treatment Value: 50mM NH4NO3 vs. 100mM Mannitol
  misc_feature: MA Experiment ID: 20000492 Result: Down-regulated in Transcription
  misc_feature: MA Experiment 20000492 PARAMETER Experiment Name: Zm_Hybrid_Seed_Dev_P Parameter: DAP Value: 12
  misc_feature: MA Experiment 20000492 PARAMETER Experiment Name: Zm_Hybrid_Seed_Dev_P Parameter: Organism Value: Zea mays
  misc_feature: MA Experiment 20000492 PARAMETER Experiment Name: Zm_Hybrid_Seed_Dev_P Parameter: Plant Line Value: 35A19
  misc_feature: MA Experiment 20000492 PARAMETER Experiment Name: Zm_Hybrid_Seed_Dev_P Parameter: Tissue Value: Fert Kernel vs. Unfert Floret
  misc_feature: MA Experiment ID: 20000535 Result: Down-regulated in Transcription
  misc_feature: MA Experiment 20000535 PARAMETER Experiment Name: Zm_Hybrid_Seed_Dev_P Parameter: DAP Value: 30 vs. 12
  misc_feature: MA Experiment 20000535 PARAMETER Experiment Name: Zm_Hybrid_Seed_Dev_P Parameter: Organism Value: Zea mays
  misc_feature: MA Experiment 20000535 PARAMETER Experiment Name: Zm_Hybrid_Seed_Dev_P Parameter: Plant Line Value: 35A19
  misc_feature: MA Experiment 20000535 PARAMETER Experiment Name: Zm_Hybrid_Seed_Dev_P Parameter: Tissue Value: Embryo vs. Unfert Floret
gtctgatttctctgacgggtgggtttggtttggatctgggcggaccaggcgctccacgcgatggcgcagaaggagaccaatggcagcaacggcgagcacatctccacccgcccgccgccgaccccgtcgcccctccgcttctccaagttcttccagnttaacctgcggatcctgggtcattgggtgggggcgggcttcatcggctcgcaccttcgtggacaggctcatggagaacagaaagcacgaggtcattgttgctgataactttttcaccggttcaaaagaaacctgaagaaagtggatcggacacccaagatttgagctcatcccgccatgatgtcactgagccactttntttgggggaggttgaccagatctatcaccttgcttgccctgcttcaccaatcttctacaagcacaatcctgttaagaccatcaagacaaatgttat

SEQ ID NO: 15553 - protein, 96 aa, Zea mays subsp. mays
  peptide (1)..(96): Ceres Seq. ID no. 7119951
  misc_feature (31)..(96): Homolog of NCBI NO: 18447934 NR Description: UDP-glucuronic acid decarboxylase [Oryza sativa
  misc_feature (39)..(96): Homolog of NCBI NO: 11121508 NR Description: d-TDP-glucose dehydratase [Phragmites australis]
  misc_feature (31)..(96): Homolog of NCBI NO: 15231432 NR Description: dTDP-glucose 4-6-dehydratases-like protein; id: At3g46440.1, supported by cDNA: 31901., supported by cDNA:
  misc_feature (27)..(96): Homolog of NCBI NO: 15237853 NR Description: dTDP-glucose 4-6-dehydratase - like protein; id: At5g59290.1, supported by cDNA: 6701., supported by cDNA: supported by cDNA: gi_14595665, supported by cDNA: gi_20334715
  misc_feature (27)..(96): Homolog of NCBI NO: 15226950 NR Description: putative nucleotide-sugar dehydratase; protein At2g28760.1, supported by cDNA: gi_20466473 [Arabidopsis
  misc_feature (27)..(96): Homolog of NCBI NO: 11270075 NR Description: dTDPglucose 4,6-dehydratase (EC 4.2.1.46)
  misc_feature (27)..(96): Homolog of NCBI NO: 13591616 NR Description: UDP-D-glucuronate carboxy-lyase [Pisum sativum]
  misc_feature (27)..(96): Homolog of NCBI NO: 14030703 NR Description: AT5g59290/mnc17_180 [Arabidopsis thaliana]
  misc_feature (72)..(96): Homolog of NCBI NO: 22298207 NR Description: dTDP-glucose 4,6-dehydratase [Thermosynechococcus
  misc_feature (72)..(96): Homolog of NCBI NO: 23123874 NR Description: hypothetical protein [Nostoc punctiforme]
  misc_feature (52)..(52): Xaa is any aa, unknown or other
SDFSDGWVWFGSGRTRRSTRWRRRRPMAATASTSPPARRRPRRPSASPSSSXLTCGSWVIGWGRASSARTFVDRLMENRKHEVIVADNFFTGSKET

SEQ ID NO: 15554 - protein, 70 aa, Zea mays subsp. mays
  peptide (1)..(70): Ceres Seq. ID no. 7119952
  misc_feature (5)..(70): Homolog of NCBI NO: 18447934 NR Description: UDP-glucuronic acid decarboxylase [Oryza sativa
  misc_feature (13)..(70): Homolog of NCBI NO: 11121508 NR Description: d-TDP-glucose dehydratase [Phragmites australis]
  misc_feature (5)..(70): Homolog of NCBI NO: 15231432 NR Description: dTDP-glucose 4-6-dehydratases-like protein; id: At3g46440.1, supported by cDNA: 31901., supported by cDNA:
  misc_feature (1)..(70): Homolog of NCBI NO: 15237853 NR Description: dTDP-glucose 4-6-dehydratase - like protein; id: At5g59290.1, supported by cDNA: 6701., supported by cDNA: supported by cDNA: gi_14595665, supported by cDNA: gi_20334715
  misc_feature (1)..(70): Homolog of NCBI NO: 15226950 NR Description: putative nucleotide-sugar dehydratase; protein At2g28760.1, supported by cDNA: gi_20466473 [Arabidopsis
  misc_feature (1)..(70): Homolog of NCBI NO: 11270075 NR Description: dTDPglucose 4,6-dehydratase (EC 4.2.1.46)
  misc_feature (1)..(70): Homolog of NCBI NO: 13591616 NR Description: UDP-D-glucuronate carboxy-lyase [Pisum sativum]
  misc_feature (1)..(70): Homolog of NCBI NO: 14030703 NR Description: AT5g59290/mnc17_180 [Arabidopsis thaliana]
  misc_feature (46)..(70): Homolog of NCBI NO: 22298207 NR Description: dTDP-glucose 4,6-dehydratase [Thermosynechococcus
  misc_feature (46)..(70): Homolog of NCBI NO: 23123874 NR Description: hypothetical protein [Nostoc punctiforme]
  misc_feature (26)..(26): Xaa is any aa, unknown or other
MAATASTSPPARRRPRRPSASPSSSXLTCGSWVIGWGRASSARTFVDRLMENRKHEVIVADNFFTGSKET

SEQ ID NO: 15555 - protein, 66 aa, Zea mays subsp. mays
  peptide (1)..(66): Ceres Seq. ID no. 7119953
  misc_feature (1)..(66): Homolog of NCBI NO: 11121508 NR Description: d-TDP-glucose dehydratase [Phragmites australis]
  misc_feature (1)..(66): Homolog of NCBI NO: 18447934 NR Description: UDP-glucuronic acid decarboxylase [Oryza sativa
  misc_feature (7)..(66): Homolog of NCBI NO: 11270075 NR Description: dTDPglucose 4,6-dehydratase (EC 4.2.1.46)
  misc_feature (7)..(66): Homolog of NCBI NO: 13591616 NR Description: UDP-D-glucuronate carboxy-lyase [Pisum sativum]
  misc_feature (6)..(66): Homolog of NCBI NO: 15226950 NR Description: putative nucleotide-sugar dehydratase; protein At2g28760.1, supported by cDNA: gi_20466473 [Arabidopsis
  misc_feature (9)..(66): Homolog of NCBI NO: 15231432 NR Description: dTDP-glucose 4-6-dehydratases-like protein; id: At3g46440.1, supported by cDNA: 31901., supported by cDNA:
  misc_feature (33)..(33): Xaa is any aa, unknown or other
MAQKETNGSNGEHISTRPPPTPSPLRFSKFFQXNLRILGHWVGAGFIGSHLRGQAHGEQKARGHCC

SEQ ID NO: 15556 - DNA, 456 bp, Zea mays subsp. mays
  misc_feature (1)..(456): Ceres Seq. ID no. 12595566
  misc_feature: MA Experiment ID: 108535 Result: Up-regulated in Transcription
  misc_feature: MA Experiment 108535 PARAMETER Experiment Name: Zm_Meristem_P Parameter: Age (day) Value: 8
  misc_feature: MA Experiment 108535 PARAMETER Experiment Name: Zm_Meristem_P Parameter: Organism Value: Zea mays
  misc_feature: MA Experiment 108535 PARAMETER Experiment Name: Zm_Meristem_P Parameter: Plant Line Value: 35A19
  misc_feature: MA Experiment 108535 PARAMETER Experiment Name: Zm_Meristem_P Parameter: Tissue Value: Root Meristem vs. Above Root Meristem
  misc_feature: MA Experiment ID: 108556 Result: Down-regulated in Transcription
  misc_feature: MA Experiment 108556 PARAMETER Experiment Name: Zm_Drought_P Parameter: Age (day) Value: 9
  misc_feature: MA Experiment 108556 PARAMETER Experiment Name: Zm_Drought_P Parameter: Organism Value: Zea mays
  misc_feature: MA Experiment 108556 PARAMETER Experiment Name: Zm_Drought_P Parameter: Plant Line Value: 35A19
  misc_feature: MA Experiment 108556 PARAMETER Experiment Name: Zm_Drought_P Parameter: Timepoint (hr) Value: 24
  misc_feature: MA Experiment 108556 PARAMETER Experiment Name: Zm_Drought_P Parameter: Tissue Value: Aerial
  misc_feature: MA Experiment 108556 PARAMETER Experiment Name: Zm_Drought_P Parameter: Treatment Value: Drought vs. No Drought
  misc_feature: MA Experiment ID: 20000108 Result: Up-regulated in Transcription
  misc_feature: MA Experiment 20000108 PARAMETER Experiment Name: Zm_Root-Tips_P Parameter: Age (day) Value: 12
  misc_feature: MA Experiment 20000108 PARAMETER Experiment Name: Zm_Root-Tips_P Parameter: Organism Value: Zea mays
  misc_feature: MA Experiment 20000108 PARAMETER Experiment Name: Zm_Root-Tips_P Parameter: Tissue Value: Root tips vs. Root mid region    35
  misc_feature: MA Experiment 20000108 PARAMETER Experiment Name: Zm_Root-Tips_P Parameter: Tissue Value: Root tips vs. Root mid region   Sequence Listing-Misc Features (4)
  misc_feature: MA Experiment ID: 20000478 Result: Down-regulated in Transcription
  misc_feature: MA Experiment 20000478 PARAMETER Experiment Name: Zm_5mM_SA_P Parameter: Age (day) Value: 11
  misc_feature: MA Experiment 20000478 PARAMETER Experiment Name: Zm_5mM_SA_P Parameter: Organism Value: Zea mays
  misc_feature: MA Experiment 20000478 PARAMETER Experiment Name: Zm_5mM_SA_P Parameter: Plant Line Value: 35A19
  misc_feature: MA Experiment 20000478 PARAMETER Experiment Name: Zm_5mM_SA_P Parameter: Timepoint (hr) Value: 72
  misc_feature: MA Experiment 20000478 PARAMETER Experiment Name: Zm_5mM_SA_P Parameter: Tissue Value: Aerial
  misc_feature: MA Experiment 20000478 PARAMETER Experiment Name: Zm_5mM_SA_P Parameter: Treatment Value: 5mM SA vs. No Treatment
  misc_feature: MA Experiment ID: 20000479 Result: Down-regulated in Transcription
  misc_feature: MA Experiment 20000479 PARAMETER Experiment Name: Zm_Drought_P Parameter: Age (day) Value: 10
  misc_feature: MA Experiment 20000479 PARAMETER Experiment Name: Zm_Drought_P Parameter: Organism Value: Zea mays
  misc_feature: MA Experiment 20000479 PARAMETER Experiment Name: Zm_Drought_P Parameter: Plant Line Value: 35A19
  misc_feature: MA Experiment 20000479 PARAMETER Experiment Name: Zm_Drought_P Parameter: Timepoint (hr) Value: 48
  misc_feature: MA Experiment 20000479 PARAMETER Experiment Name: Zm_Drought_P Parameter: Tissue Value: Aerial
  misc_feature: MA Experiment 20000479 PARAMETER Experiment Name: Zm_Drought_P Parameter: Treatment Value: Drought vs. No Drought
  misc_feature: MA Experiment ID: 20000487 Result: Up-regulated in Transcription
  misc_feature: MA Experiment 20000487 PARAMETER Experiment Name: Zm_50mM_NH4NO3_L_to_H_P Parameter: Organism Value: Zea mays
  misc_feature: MA Experiment 20000487 PARAMETER Experiment Name: Zm_50mM_NH4NO3_L_to_H_P Parameter: Timepoint (hr) Value: 4
  misc_feature: MA Experiment 20000487 PARAMETER Experiment Name: Zm_50mM_NH4NO3_L_to_H_P Parameter: Tissue Value: Leaves
  misc_feature: MA Experiment 20000487 PARAMETER Experiment Name: Zm_50mM_NH4NO3_L_to_H_P Parameter: Treatment Value: 50mM NH4NO3 vs. 100mM Mannitol
  misc_feature: MA Experiment ID: 20000488 Result: Up-regulated in Transcription
  misc_feature: MA Experiment 20000488 PARAMETER Experiment Name: Zm_50mM_NH4NO3_L_to_H_P Parameter: Organism Value: Zea mays
  misc_feature: MA Experiment 20000488 PARAMETER Experiment Name: Zm_50mM_NH4NO3_L_to_H_P Parameter: Timepoint (hr) Value: 8
  misc_feature: MA Experiment 20000488 PARAMETER Experiment Name: Zm_50mM_NH4NO3_L_to_H_P Parameter: Tissue Value: Leaves
  misc_feature: MA Experiment 20000488 PARAMETER Experiment Name: Zm_50mM_NH4NO3_L_to_H_P Parameter: Treatment Value: 50mM NH4NO3 vs. 100mM Mannitol
  misc_feature: MA Experiment ID: 20000492 Result: Up-regulated in Transcription
  misc_feature: MA Experiment 20000492 PARAMETER Experiment Name: Zm_Hybrid_Seed_Dev_P Parameter: DAP Value: 12
  misc_feature: MA Experiment 20000492 PARAMETER Experiment Name: Zm_Hybrid_Seed_Dev_P Parameter: Organism Value: Zea mays
  misc_feature: MA Experiment 20000492 PARAMETER Experiment Name: Zm_Hybrid_Seed_Dev_P Parameter: Plant Line Value: 35A19
  misc_feature: MA Experiment 20000492 PARAMETER Experiment Name: Zm_Hybrid_Seed_Dev_P Parameter: Tissue Value: Fert Kernel vs. Unfert Floret
aaaaaaactccactcgccctcccacacagaaaaccctagccgccgccaccgaagcggcctcccaggtaagcaggatcgtccagcccgccgccgccatgaagcgcaatccccgcgtcacgagctcccgccggaagtgccgcaaggcgcactttacggccccgtcctccgtccgccgcgttctcatgtccgcggggctgtcgacggagctccgccacaagtacaacgtgcgctccatcccgatccgcaaggacgacgaggtgcaggtcgtgcgcggcacctacaagggccgtgaggggaaggtggtgcaggtgtaccgccgccgctgggtcatccacgtcgagcggatcacccgcgagaaggtgaacggctccaccgtgaacgtgggcatccacccctccaaggtgatcgtcaccaagctgaagctcgacaaggaccgtaaggcgctcctcgacccgc

SEQ ID NO: 15557 - protein, 151 aa, Zea mays subsp. mays
  peptide (1)..(151): Ceres Seq. ID no. 12595567
  misc_feature (80)..(113): Pfam Name: KOW motif Pfam Description: KOW motif
  misc_feature (32)..(150): Homolog of NCBI NO: 3747050 NR Description: ribosomal protein L26 [Zea mays]
  misc_feature (32)..(150): Homolog of NCBI NO: 34895672 NR Description: putative ribosomal protein L26 [Oryza sativa
  misc_feature (32)..(150): Homolog of NCBI NO: 15229631 NR Description: 60S RIBOSOMAL PROTEIN - like; protein id: supported by cDNA: gi_16323425 [Arabidopsis thaliana]
  misc_feature (32)..(150): Homolog of NCBI NO: 15240766 NR Description: 60S ribosomal protein L26; protein id: supported by cDNA: 2561., supported by cDNA: gi_17473655, by cDNA: gi_20148598 [Arabidopsis thaliana]
  misc_feature (32)..(150): Homolog of NCBI NO: 3914740 NR Description: 60S ribosomal protein L26
  misc_feature (32)..(150): Homolog of NCBI NO: 33585605 NR Description: Unknown (protein for MGC:66190) [Danio rerio]
  misc_feature (32)..(150): Homolog of NCBI NO: 7705813 NR Description: ribosomal protein L26-like 1; ribosomal protein
  misc_feature (32)..(150): Homolog of NCBI NO: 15293919 NR Description: ribosomal protein L26 [Ictalurus punctatus]
  misc_feature (32)..(150): Homolog of NCBI NO: 292435 NR Description: ribosomal protein L26
  misc_feature (32)..(150): Homolog of NCBI NO: 28189641 NR Description: similar to ribosomal protein L26 [Bos taurus]
KNSTRPPTQKTLAAATEAASQVSRIVQPAAAMKRNPRVTSSRRKCRKAHFTAPSSVRRVLMSAGLSTELRHKYNVRSIPIRKDDEVQVVRGTYKGREGKVVQVYRRRWVIHVERITREKVNGSTVNVGIHPSKVIVTKLKLDKDRKALLDP

SEQ ID NO: 15558 - protein, 120 aa, Zea mays subsp. mays
  peptide (1)..(120): Ceres Seq. ID no. 12595568
  misc_feature (49)..(82): Pfam Name: KOW motif Pfam Description: KOW motif
  misc_feature (1)..(119): Homolog of NCBI NO: 3747050 NR Description: ribosomal protein L26 [Zea mays]
  misc_feature (1)..(119): Homolog of NCBI NO: 34895672 NR Description: putative ribosomal protein L26 [Oryza sativa
  misc_feature (1)..(119): Homolog of NCBI NO: 15229631 NR Description: 60S RIBOSOMAL PROTEIN - like; protein id: supported by cDNA: gi_16323425 [Arabidopsis thaliana]
  misc_feature (1)..(119): Homolog of NCBI NO: 15240766 NR Description: 60S ribosomal protein L26; protein id: supported by cDNA: 2561., supported by cDNA: gi_17473655, by cDNA: gi_20148598 [Arabidopsis thaliana]
  misc_feature (1)..(119): Homolog of NCBI NO: 3914740 NR Description: 60S ribosomal protein L26
  misc_feature (1)..(119): Homolog of NCBI NO: 33585605 NR Description: Unknown (protein for MGC:66190) [Danio rerio]
  misc_feature (1)..(119): Homolog of NCBI NO: 7705813 NR Description: ribosomal protein L26-like 1; ribosomal protein
  misc_feature (1)..(119): Homolog of NCBI NO: 15293919 NR Description: ribosomal protein L26 [Ictalurus punctatus]
  misc_feature (1)..(119): Homolog of NCBI NO: 292435 NR Description: ribosomal protein L26
  misc_feature (1)..(119): Homolog of NCBI NO: 28189641 NR Description: similar to ribosomal protein L26 [Bos taurus]
MKRNPRVTSSRRKCRKAHFTAPSSVRRVLMSAGLSTELRHKYNVRSIPIRKDDEVQVVRGTYKGREGKVVQVYRRRWVIHVERITREKVNGSTVNVGIHPSKVIVTKLKLDKDRKALLDP

SEQ ID NO: 15559 - protein, 96 aa, Zea mays subsp. mays
  peptide (1)..(96): Ceres Seq. ID no. 12595569
KKLHSPSHTENPSRRHRSGLPGKQDRPARRRHEAQSPRHELPPEVPQGALYGPVLRPPRSHVRGAVDGAPPQVQRALHPDPQGRRGAGRARHLQGP

SEQ ID NO: 15560 - DNA, 1015 bp, Zea mays subsp. mays; identical to SEQ ID NO: 3770
  misc_feature (1)..(1015): Ceres Seq. ID no. 12595679
  misc_feature: MA Experiment ID: 108559 Result: Up-regulated in Transcription
  misc_feature: MA Experiment 108559 PARAMETER Experiment Name: Zm_5mM_NO_P Parameter: Age (day) Value: 8
  misc_feature: MA Experiment 108559 PARAMETER Experiment Name: Zm_5mM_NO_P Parameter: Organism Value: Zea mays
  misc_feature: MA Experiment 108559 PARAMETER Experiment Name: Zm_5mM_NO_P Parameter: Plant Line Value: 35A19
  misc_feature: MA Experiment 108559 PARAMETER Experiment Name: Zm_5mM_NO_P Parameter: Timepoint (hr) Value: 12
  misc_feature: MA Experiment 108559 PARAMETER Experiment Name: Zm_5mM_NO_P Parameter: Tissue Value: Aerial
  misc_feature: MA Experiment 108559 PARAMETER Experiment Name: Zm_5mM_NO_P Parameter: Treatment Value: 5mM NO vs. No Treatment
  misc_feature: MA Experiment ID: 20000477 Result: Up-regulated in Transcription
  misc_feature: MA Experiment 20000477 PARAMETER Experiment Name: Zm_5mM_SA_P Parameter: Age (day) Value: 10
  misc_feature: MA Experiment 20000477 PARAMETER Experiment Name: Zm_5mM_SA_P Parameter: Organism Value: Zea mays
  misc_feature: MA Experiment 20000477 PARAMETER Experiment Name: Zm_5mM_SA_P Parameter: Plant Line Value: 35A19
  misc_feature: MA Experiment 20000477 PARAMETER Experiment Name: Zm_5mM_SA_P Parameter: Timepoint (hr) Value: 48
  misc_feature: MA Experiment 20000477 PARAMETER Experiment Name: Zm_5mM_SA_P Parameter: Tissue Value: Aerial
  misc_feature: MA Experiment 20000477 PARAMETER Experiment Name: Zm_5mM_SA_P Parameter: Treatment Value: 5mM SA vs. No Treatment
  misc_feature: MA Experiment ID: 20000480 Result: Up-regulated in Transcription
  misc_feature: MA Experiment 20000480 PARAMETER Experiment Name: Zm_Drought_P Parameter: Age (day) Value: 11
  misc_feature: MA Experiment 20000480 PARAMETER Experiment Name: Zm_Drought_P Parameter: Organism Value: Zea mays
  misc_feature: MA Experiment 20000480 PARAMETER Experiment Name: Zm_Drought_P Parameter: Plant Line Value: 35A19
  misc_feature: MA Experiment 20000480 PARAMETER Experiment Name: Zm_Drought_P Parameter: Timepoint (hr) Value: 72
  misc_feature: MA Experiment 20000480 PARAMETER Experiment Name: Zm_Drought_P Parameter: Tissue Value: Aerial
  misc_feature: MA Experiment 20000480 PARAMETER Experiment Name: Zm_Drought_P Parameter: Treatment Value: Drought vs. No Drought
  misc_feature: MA Experiment ID: 20000535 Result: Up-regulated in Transcription
  misc_feature: MA Experiment 20000535 PARAMETER Experiment Name: Zm_Hybrid_Seed_Dev_P Parameter: DAP Value: 30 vs. 12
  misc_feature: MA Experiment 20000535 PARAMETER Experiment Name: Zm_Hybrid_Seed_Dev_P Parameter: Organism Value: Zea mays
  misc_feature: MA Experiment 20000535 PARAMETER Experiment Name: Zm_Hybrid_Seed_Dev_P Parameter: Plant Line Value: 35A19
  misc_feature: MA Experiment 20000535 PARAMETER Experiment Name: Zm_Hybrid_Seed_Dev_P Parameter: Tissue Value: Embryo vs. Unfert Floret

SEQ ID NO: 15561 - protein, 143 aa, Zea mays subsp. mays; identical to SEQ ID NO: 3771
  peptide (1)..(143): Ceres Seq. ID no. 12595680
  misc_feature (76)..(100): Pfam Name: A20-like zinc finger Pfam Description: A20-like zinc finger
  misc_feature (76)..(100): Pfam Name: A20-like zinc finger Pfam Description: A20-like zinc finger
  misc_feature (76)..(100): Pfam Name: A20-like zinc finger Pfam Description: A20-like zinc finger
  misc_feature (63)..(143): Homolog of NCBI NO: 35187687 NR Description: zinc-finger protein [Oryza sativa (indica
  misc_feature (63)..(143): Homolog of NCBI NO: 11361253 NR Description: hypothetical protein p85RF [imported] - Prunus
  misc_feature (63)..(143): Homolog of NCBI NO: 18403408 NR Description: expressed protein; protein id: At1g51200.1, by cDNA: gi_15912334 [Arabidopsis thaliana]
  misc_feature (63)..(143): Homolog of NCBI NO: 25082726 NR Description: expressed protein [Arabidopsis thaliana]
  misc_feature (62)..(143): Homolog of NCBI NO: 15231686 NR Description: zinc finger - like protein; protein id: supported by cDNA: gi_14596166 [Arabidopsis thaliana]
  misc_feature (63)..(143): Homolog of NCBI NO: 11361253 NR Description: hypothetical protein p85RF [imported] - Prunus
  misc_feature (63)..(143): Homolog of NCBI NO: 25082726 NR Description: expressed protein [Arabidopsis thaliana]
  misc_feature (63)..(143): Homolog of NCBI NO: 18403408 NR Description: expressed protein; protein id: At1g51200.1, by cDNA: gi_15912334 [Arabidopsis thaliana]
  misc_feature (63)..(143): Homolog of NCBI NO: 11361253 NR Description: hypothetical protein p85RF [imported] - Prunus
  misc_feature (63)..(143): Homolog of NCBI NO: 35187687 NR Description: zinc-finger protein [Oryza sativa (indica
  misc_feature (71)..(143): Homolog of NCBI NO: 29791559 NR Description: Unknown (protein for MGC:56057) [Danio rerio]
  misc_feature (62)..(143): Homolog of NCBI NO: 18404102 NR Description: expressed protein; protein id: At2g36320.1, by cDNA: 24255. [Arabidopsis thaliana] >gi|25408460|pir||C84779
  misc_feature (67)..(103): Homolog of NCBI NO: 30908921 NR Description: putative zinc finger transcription factor ZFP33
  misc_feature (64)..(136): Homolog of NCBI NO: 28269431 NR Description: putative zinc finger protein [Oryza sativa
  misc_feature (62)..(143): Homolog of NCBI NO: 14596167 NR Description: zinc finger-like protein [Arabidopsis thaliana]
  misc_feature (62)..(143): Homolog of NCBI NO: 15231686 NR Description: zinc finger - like protein; protein id: supported by cDNA: gi_14596166 [Arabidopsis thaliana]
  misc_feature (71)..(143): Homolog of NCBI NO: 29791559 NR Description: Unknown (protein for MGC:56057) [Danio rerio]
  misc_feature (62)..(143): Homolog of NCBI NO: 18404102 NR Description: expressed protein; protein id: At2g36320.1, by cDNA: 24255. [Arabidopsis thaliana] >gi|25408460|pir||C84779
  misc_feature (67)..(103): Homolog of NCBI NO: 30908921 NR Description: putative zinc finger transcription factor ZFP33
  misc_feature (64)..(136): Homolog of NCBI NO: 28269431 NR Description: putative zinc finger protein [Oryza sativa
  misc_feature (62)..(143): Homolog of NCBI NO: 14596167 NR Description: zinc finger-like protein [Arabidopsis thaliana]
  misc_feature (62)..(143): Homolog of NCBI NO: 15231686 NR Description: zinc finger - like protein; protein id: supported by cDNA: gi_14596166 [Arabidopsis thaliana]
  misc_feature (63)..(143): Homolog of NCBI NO: 25082726 NR Description: expressed protein [Arabidopsis thaliana]
  misc_feature (63)..(143): Homolog of NCBI NO: 18403408 NR Description: expressed protein; protein id: At1g51200.1, by cDNA: gi_15912334 [Arabidopsis thaliana]
  misc_feature (63)..(143): Homolog of NCBI NO: 35187687 NR Description: zinc-finger protein [Oryza sativa (indica
  misc_feature (62)..(143): Homolog of NCBI NO: 14596167 NR Description: zinc finger-like protein [Arabidopsis thaliana]
  misc_feature (64)..(136): Homolog of NCBI NO: 28269431 NR Description: putative zinc finger protein [Oryza sativa
  misc_feature (67)..(103): Homolog of NCBI NO: 30908921 NR Description: putative zinc finger transcription factor ZFP33
  misc_feature (62)..(143): Homolog of NCBI NO: 18404102 NR Description: expressed protein; protein id: At2g36320.1, by cDNA: 24255. [Arabidopsis thaliana] >gi|25408460|pir||C84779
  misc_feature (71)..(143): Homolog of NCBI NO: 29791559 NR Description: Unknown (protein for MGC:56057) [Danio rerio]

SEQ ID NO: 15562 - protein, 91 aa, Zea mays subsp. mays; identical to SEQ ID NO: 3772
  peptide (1)..(91): Ceres Seq. ID no. 12595681

SEQ ID NO: 15563 - protein, 82 aa, Zea mays subsp. mays; identical to SEQ ID NO: 3773
  peptide (1)..(82): Ceres Seq. ID no. 12595682
  misc_feature (23)..(63): Pfam Name: AN1-like Zinc finger Pfam Description: AN1-like Zinc finger
  misc_feature (23)..(63): Pfam Name: AN1-like Zinc finger Pfam Description: AN1-like Zinc finger
  misc_feature (23)..(63): Pfam Name: AN1-like Zinc finger Pfam Description: AN1-like Zinc finger
  misc_feature (1)..(82): Homolog of NCBI NO: 35187687 NR Description: zinc-finger protein [Oryza sativa (indica
  misc_feature (1)..(82): Homolog of NCBI NO: 11361253 NR Description: hypothetical protein p85RF [imported] - Prunus
  misc_feature (1)..(82): Homolog of NCBI NO: 18403408 NR Description: expressed protein; protein id: At1g51200.1, by cDNA: gi_15912334 [Arabidopsis thaliana]
  misc_feature (1)..(82): Homolog of NCBI NO: 25082726 NR Description: expressed protein [Arabidopsis thaliana]
  misc_feature (1)..(82): Homolog of NCBI NO: 15231686 NR Description: zinc finger - like protein; protein id: supported by cDNA: gi_14596166 [Arabidopsis thaliana]
  misc_feature (1)..(82): Homolog of NCBI NO: 11361253 NR Description: hypothetical protein p85RF [imported] - Prunus
  misc_feature (1)..(82): Homolog of NCBI NO: 25082726 NR Description: expressed protein [Arabidopsis thaliana]
  misc_feature (1)..(82): Homolog of NCBI NO: 18403408 NR Description: expressed protein; protein id: At1g51200.1, by cDNA: gi_15912334 [Arabidopsis thaliana]
  misc_feature (1)..(82): Homolog of NCBI NO: 11361253 NR Description: hypothetical protein p85RF [imported] - Prunus
  misc_feature (1)..(82): Homolog of NCBI NO: 35187687 NR Description: zinc-finger protein [Oryza sativa (indica
  misc_feature (3)..(82): Homolog of NCBI NO: 29791559 NR Description: Unknown (protein for MGC:56057) [Danio rerio]
  misc_feature (1)..(82): Homolog of NCBI NO: 18404102 NR Description: expressed protein; protein id: At2g36320.1, by cDNA: 24255. [Arabidopsis thaliana] >gi|25408460|pir||C84779
  misc_feature (3)..(82): Homolog of NCBI NO: 30908921 NR Description: putative zinc finger transcription factor ZFP33
  misc_feature (6)..(82): Homolog of NCBI NO: 28269431 NR Description: putative zinc finger protein [Oryza sativa
  misc_feature (1)..(82): Homolog of NCBI NO: 14596167 NR Description: zinc finger-like protein [Arabidopsis thaliana]
  misc_feature (1)..(82): Homolog of NCBI NO: 15231686 NR Description: zinc finger - like protein; protein id: supported by cDNA: gi_14596166 [Arabidopsis thaliana]
  misc_feature (3)..(82): Homolog of NCBI NO: 29791559 NR Description: Unknown (protein for MGC:56057) [Danio rerio]
  misc_feature (1)..(82): Homolog of NCBI NO: 18404102 NR Description: expressed protein; protein id: At2g36320.1, by cDNA: 24255. [Arabidopsis thaliana] >gi|25408460|pir||C84779
  misc_feature (3)..(82): Homolog of NCBI NO: 30908921 NR Description: putative zinc finger transcription factor ZFP33
  misc_feature (6)..(82): Homolog of NCBI NO: 28269431 NR Description: putative zinc finger protein [Oryza sativa
  misc_feature (1)..(82): Homolog of NCBI NO: 14596167 NR Description: zinc finger-like protein [Arabidopsis thaliana]
  misc_feature (1)..(82): Homolog of NCBI NO: 15231686 NR Description: zinc finger - like protein; protein id: supported by cDNA: gi_14596166 [Arabidopsis thaliana]
  misc_feature (1)..(82): Homolog of NCBI NO: 25082726 NR Description: expressed protein [Arabidopsis thaliana]
  misc_feature (1)..(82): Homolog of NCBI NO: 18403408 NR Description: expressed protein; protein id: At1g51200.1, by cDNA: gi_15912334 [Arabidopsis thaliana]
  misc_feature (1)..(82): Homolog of NCBI NO: 35187687 NR Description: zinc-finger protein [Oryza sativa (indica
  misc_feature (1)..(82): Homolog of NCBI NO: 14596167 NR Description: zinc finger-like protein [Arabidopsis thaliana]
  misc_feature (6)..(82): Homolog of NCBI NO: 28269431 NR Description: putative zinc finger protein [Oryza sativa
  misc_feature (3)..(82): Homolog of NCBI NO: 30908921 NR Description: putative zinc finger transcription factor ZFP33
  misc_feature (1)..(82): Homolog of NCBI NO: 18404102 NR Description: expressed protein; protein id: At2g36320.1, by cDNA: 24255. [Arabidopsis thaliana] >gi|25408460|pir||C84779
  misc_feature (3)..(82): Homolog of NCBI NO: 29791559 NR Description: Unknown (protein for MGC:56057) [Danio rerio]

SEQ ID NO: 15564 - protein, 81 aa, Zea mays subsp. mays; identical to SEQ ID NO: 3774
  peptide (1)..(81): Ceres Seq. ID no. 12595683
  misc_feature (14)..(38): Pfam Name: A20-like zinc finger Pfam Description: A20-like zinc finger
  misc_feature (14)..(38): Pfam Name: A20-like zinc finger Pfam Description: A20-like zinc finger
  misc_feature (14)..(38): Pfam Name: A20-like zinc finger Pfam Description: A20-like zinc finger
  misc_feature (1)..(81): Homolog of NCBI NO: 35187687 NR Description: zinc-finger protein [Oryza sativa (indica
  misc_feature (1)..(81): Homolog of NCBI NO: 11361253 NR Description: hypothetical protein p85RF [imported] - Prunus
  misc_feature (1)..(81): Homolog of NCBI NO: 18403408 NR Description: expressed protein; protein id: At1g51200.1, by cDNA: gi_15912334 [Arabidopsis thaliana]
  misc_feature (1)..(81): Homolog of NCBI NO: 25082726 NR Description: expressed protein [Arabidopsis thaliana]
  misc_feature (1)..(81): Homolog of NCBI NO: 15231686 NR Description: zinc finger - like protein; protein id: supported by cDNA: gi_14596166 [Arabidopsis thaliana]
  misc_feature (1)..(81): Homolog of NCBI NO: 11361253 NR Description: hypothetical protein p85RF [imported] - Prunus
  misc_feature (1)..(81): Homolog of NCBI NO: 25082726 NR Description: expressed protein [Arabidopsis thaliana]
  misc_feature (1)..(81): Homolog of NCBI NO: 18403408 NR Description: expressed protein; protein id: At1g51200.1, by cDNA: gi_15912334 [Arabidopsis thaliana]
  misc_feature (1)..(81): Homolog of NCBI NO: 11361253 NR Description: hypothetical protein p85RF [imported] - Prunus
  misc_feature (1)..(81): Homolog of NCBI NO: 35187687 NR Description: zinc-finger protein [Oryza sativa (indica
  misc_feature (9)..(81): Homolog of NCBI NO: 29791559 NR Description: Unknown (protein for MGC:56057) [Danio rerio]
  misc_feature (1)..(81): Homolog of NCBI NO: 18404102 NR Description: expressed protein; protein id: At2g36320.1, by cDNA: 24255. [Arabidopsis thaliana] >gi|25408460|pir||C84779
  misc_feature (5)..(41): Homolog of NCBI NO: 30908921 NR Description: putative zinc finger transcription factor ZFP33
  misc_feature (2)..(74): Homolog of NCBI NO: 28269431 NR Description: putative zinc finger protein [Oryza sativa
  misc_feature (1)..(81): Homolog of NCBI NO: 14596167 NR Description: zinc finger-like protein [Arabidopsis thaliana]
  misc_feature (1)..(81): Homolog of NCBI NO: 15231686 NR Description: zinc finger - like protein; protein id: supported by cDNA: gi_14596166 [Arabidopsis thaliana]
  misc_feature (9)..(81): Homolog of NCBI NO: 29791559 NR Description: Unknown (protein for MGC:56057) [Danio rerio]
  misc_feature (1)..(81): Homolog of NCBI NO: 18404102 NR Description: expressed protein; protein id: At2g36320.1, by cDNA: 24255. [Arabidopsis thaliana] >gi|25408460|pir||C84779
  misc_feature (5)..(41): Homolog of NCBI NO: 30908921 NR Description: putative zinc finger transcription factor ZFP33
  misc_feature (2)..(74): Homolog of NCBI NO: 28269431 NR Description: putative zinc finger protein [Oryza sativa
  misc_feature (1)..(81): Homolog of NCBI NO: 14596167 NR Description: zinc finger-like protein [Arabidopsis thaliana]
  misc_feature (1)..(81): Homolog of NCBI NO: 15231686 NR Description: zinc finger - like protein; protein id: supported by cDNA: gi_14596166 [Arabidopsis thaliana]
  misc_feature (1)..(81): Homolog of NCBI NO: 25082726 NR Description: expressed protein [Arabidopsis thaliana]
  misc_feature (1)..(81): Homolog of NCBI NO: 18403408 NR Description: expressed protein; protein id: At1g51200.1, by cDNA: gi_15912334 [Arabidopsis thaliana]
  misc_feature (1)..(81): Homolog of NCBI NO: 35187687 NR Description: zinc-finger protein [Oryza sativa (indica
  misc_feature (1)..(81): Homolog of NCBI NO: 14596167 NR Description: zinc finger-like protein [Arabidopsis thaliana]
  misc_feature (2)..(74): Homolog of NCBI NO: 28269431 NR Description: putative zinc finger protein [Oryza sativa
  misc_feature (5)..(41): Homolog of NCBI NO: 30908921 NR Description: putative zinc finger transcription factor ZFP33
  misc_feature (1)..(81): Homolog of NCBI NO: 18404102 NR Description: expressed protein; protein id: At2g36320.1, by cDNA: 24255. [Arabidopsis thaliana] >gi|25408460|pir||C84779
  misc_feature (9)..(81): Homolog of NCBI NO: 29791559 NR Description: Unknown (protein for MGC:56057) [Danio rerio]

SEQ ID NO: 15565 - DNA, 461 bp, Zea mays subsp. mays
  misc_feature (1)..(461): Ceres Seq. ID no. 11029785
  misc_feature: MA Experiment ID: 20000534 Result: Down-regulated in Transcription
  misc_feature: MA Experiment 20000534 PARAMETER Experiment Name: Zm_Hybrid_Pollen_P Parameter: Age (day) Value: 8
  misc_feature: MA Experiment 20000534 PARAMETER Experiment Name: Zm_Hybrid_Pollen_P Parameter: Organism Value: Zea mays
  misc_feature: MA Experiment 20000534 PARAMETER Experiment Name: Zm_Hybrid_Pollen_P Parameter: Plant Line Value: 35A19
  misc_feature: MA Experiment 20000534 PARAMETER Experiment Name: Zm_Hybrid_Pollen_P Parameter: Tissue Value: Pollen vs. Aerial
ccaaaggaaggtgacagtattgttcaggatgctcctgcagatattccttcccttctagaattgaagcgcgtctactacgaactgatgattcgttattactctcacaacaatgattacttggaaatctgccgttgttacaaggctatttatgatattccagcaataaaagaggatccaacaaagtggataccgattcttaggaagatctgttggtacttggtgctagcacctcatgatcctatgcaatcaagccttctcaatgctacactagaggataaaaacctttcagaaatcccaaatttcaggttattactggaagcagctggccacccatggaggtgatacagtgggacaagtcctgtgggaattcttcaaggaggaatatgagaaaggagaaggatcttcttggggggagcttttgggtgncaaagcttcagaagatttgaggctgaggattatcc

SEQ ID NO: 15566 - protein, 113 aa, Zea mays subsp. mays
  peptide (1)..(113): Ceres Seq. ID no. 11029786
  misc_feature (1)..(106): Homolog of NCBI NO: 17298157 NR Description: 26S proteasome regulatory particle non-ATPase
  misc_feature (1)..(106): Homolog of NCBI NO: 27573351 NR Description: putative proteasome regulatory non-ATPase subunit
  misc_feature (1)..(106): Homolog of NCBI NO: 15242545 NR Description: 26S proteasome regulatory subunit (RPN5), protein id: At5g09900.1, supported by cDNA: gi_14334433
  misc_feature (1)..(106): Homolog of NCBI NO: 10177207 NR Description: proteasome regulatory subunit-like [Arabidopsis
  misc_feature (1)..(106): Homolog of NCBI NO: 30698065 NR Description: 26S proteasome regulatory subunit (RPN5), [Arabidopsis thaliana] >gi|17063181|gb|AAL32985.1| [Arabidopsis thaliana] >gi|17063193|gb|AAL32972.1|
  misc_feature (20)..(106): Homolog of NCBI NO: 27503944 NR Description: Similar to proteasome (prosome, macropain) 26S
  misc_feature (20)..(106): Homolog of NCBI NO: 34874104 NR Description: similar to proteasome 26S non-ATPase subunit 12
  misc_feature (21)..(106): Homolog of NCBI NO: 12857304 NR Description: unnamed protein product [Mus musculus]
  misc_feature (21)..(106): Homolog of NCBI NO: 13385384 NR Description: proteasome 26S non-ATPase subunit 12 [Mus >gi|12841378|dbj|BAB25184.1| unnamed protein product [Mus >gi|12845096|dbj|BAB26619.1| unnamed protein product [Mus
  misc_feature (20)..(106): Homolog of NCBI NO: 28872765 NR Description: proteasome 26S non-ATPase subunit 12 isoform 2;
PKEGDSIVQDAPADIPSLLELKRVYYELMIRYYSHNNDYLEICRCYKAIYDIPAIKEDPTKWIPILRKICWYLVLAPHDPMQSSLLNATLEDKNLSEIPNFRLLLEAAGHPWR

SEQ ID NO: 15567 - protein, 85 aa, Zea mays subsp. mays
  peptide (1)..(85): Ceres Seq. ID no. 11029787
  misc_feature (1)..(78): Homolog of NCBI NO: 17298157 NR Description: 26S proteasome regulatory particle non-ATPase
  misc_feature (1)..(78): Homolog of NCBI NO: 27573351 NR Description: putative proteasome regulatory non-ATPase subunit
  misc_feature (1)..(78): Homolog of NCBI NO: 15242545 NR Description: 26S proteasome regulatory subunit (RPN5), protein id: At5g09900.1, supported by cDNA: gi_14334433
  misc_feature (1)..(78): Homolog of NCBI NO: 10177207 NR Description: proteasome regulatory subunit-like [Arabidopsis
  misc_feature (1)..(78): Homolog of NCBI NO: 30698065 NR Description: 26S proteasome regulatory subunit (RPN5), [Arabidopsis thaliana] >gi|17063181|gb|AAL32985.1| [Arabidopsis thaliana] >gi|17063193|gb|AAL32972.1|
  misc_feature (1)..(78): Homolog of NCBI NO: 27503944 NR Description: Similar to proteasome (prosome, macropain) 26S
  misc_feature (1)..(78): Homolog of NCBI NO: 34874104 NR Description: similar to proteasome 26S non-ATPase subunit 12
  misc_feature (1)..(78): Homolog of NCBI NO: 12857304 NR Description: unnamed protein product [Mus musculus]
  misc_feature (1)..(78): Homolog of NCBI NO: 13385384 NR Description: proteasome 26S non-ATPase subunit 12 [Mus >gi|12841378|dbj|BAB25184.1| unnamed protein product [Mus >gi|12845096|dbj|BAB26619.1| unnamed protein product [Mus
  misc_feature (1)..(78): Homolog of NCBI NO: 28872765 NR Description: proteasome 26S non-ATPase subunit 12 isoform 2;
MIRYYSHNNDYLEICRCYKAIYDIPAIKEDPTKWIPILRKICWYLVLAPHDPMQSSLLNATLEDKNLSEIPNFRLLLEAAGHPWR

SEQ ID NO: 15568 - DNA, 934 bp, Zea mays subsp. mays
  misc_feature (1)..(934): Ceres Seq. ID no. 13589261
  misc_feature: MA Experiment ID: 108528 Result: Down-regulated in Transcription
  misc_feature: MA Experiment 108528 PARAMETER Experiment Name: Zm_Imbibed_Seeds_P Parameter: Age (day) Value: 5 vs. 2
  misc_feature: MA Experiment 108528 PARAMETER Experiment Name: Zm_Imbibed_Seeds_P Parameter: Organism Value: Zea mays
  misc_feature: MA Experiment 108528 PARAMETER Experiment Name: Zm_Imbibed_Seeds_P Parameter: Plant Line Value: 35A19
  misc_feature: MA Experiment 108528 PARAMETER Experiment Name: Zm_Imbibed_Seeds_P Parameter: Tissue Value: Aerial vs. Embryo
  misc_feature: MA Experiment ID: 108543 Result: Down-regulated in Transcription
  misc_feature: MA Experiment ID: 108544 Result: Down-regulated in Transcription
  misc_feature: MA Experiment ID: 20000535 Result: Up-regulated in Transcription
  misc_feature: MA Experiment 20000535 PARAMETER Experiment Name: Zm_Hybrid_Seed_Dev_P Parameter: DAP Value: 30 vs. 12
  misc_feature: MA Experiment 20000535 PARAMETER Experiment Name: Zm_Hybrid_Seed_Dev_P Parameter: Organism Value: Zea mays
  misc_feature: MA Experiment 20000535 PARAMETER Experiment Name: Zm_Hybrid_Seed_Dev_P Parameter: Plant Line Value: 35A19
  misc_feature: MA Experiment 20000535 PARAMETER Experiment Name: Zm_Hybrid_Seed_Dev_P Parameter: Tissue Value: Embryo vs. Unfert Floret
ctactctctctctctctgcctgcaaagctgcttgatccatcatcgatcacatcactccaccagccgcagcgcacgaacgtacgactcatggcagatcgcgaccgcagcggcatctacggcggcggcgcctacgggcagcagcaggggggcggccgcccgatgggtgagcaggtgaagggcatgatccacgacaaggggccgacggcgtcccaggcgctgacggtggcgacgctgttccctctgggcgggctgctcctggtgctgtcaggcctggcgctggcggcctccacggtggggctggccctggccacgcccgtgttcctgctcttcagccccgtgctcgtccccgccgcgctgctcatcggcacggccgtcgcggggttcctcacgtcgggcgcgctggggctcggcggcctgtcctcgctcacgtgcctcgccaacacggcgcggcaggcgttccagcgcaccccggactacgtcgaggaggcgcgccgcaggatggcggaggccgcggcgcacgcgggccacaagaccgcgcaggccgggcacggcatccagagcaaggcgcaggaggccggtgctggcactggcgccggcggcggcaggacttcctcgtaaataagcaaatcatccatggatgcgtgcgtgtcaatgtcagcagggtcgtcgtggaatgctcttctctgtacgtgggtaaccgtcttttggtcgtcttccccgagtgcgtgataaatatcctggtgttcgtcgtgtgtggtgctgccctaggctggggcctggggtcggctgtgtaccggtatctgttcatcgccgctccgtcgcgttcggagatgtgaataagtgatgtgaaggttaagtttcagctttgctattgctattgtggcttgtgcatcagcggtttgctcgttgactgttatggaaataagcattggtg

SEQ ID NO: 15569 - protein, 205 aa, Zea mays subsp. mays
  peptide (1)..(205): Ceres Seq. ID no. 13589262
  misc_feature (68)..(185): Pfam Name: Oleosin Pfam Description: Oleosin
  misc_feature (30)..(205): Homolog of NCBI NO: 1076818 NR Description: oleosin 17 - maize >gi|687247|gb|AAA68066.1| 17
  misc_feature (30)..(205): Homolog of NCBI NO: 129081 NR Description: Oleosin Zm-II (Oleosin 18 kDa) (Lipid
  misc_feature (30)..(205): Homolog of NCBI NO: 28273373 NR Description: oleosin [Oryza sativa (japonica cultivar-group)]
  misc_feature (30)..(205): Homolog of NCBI NO: 3334279 NR Description: OLEOSIN 18 KD (OSE721) >gi|7442011|pir||T03380 >gi|4102969|gb|AAD10240.1| 18 kDa oleosin [Oryza sativa subsp.
  misc_feature (30)..(205): Homolog of NCBI NO: 1362166 NR Description: oleosin 1 - barley >gi|963062|emb|CAA57994.1|
  misc_feature (47)..(205): Homolog of NCBI NO: 82051 NR Description: lipid body-associated membrane protein - carrot
  misc_feature (30)..(203): Homolog of NCBI NO: 9963897 NR Description: oleosin [Perilla frutescens]
  misc_feature (32)..(203): Homolog of NCBI NO: 10880961 NR Description: 19 kDa oleosin [Perilla frutescens]
  misc_feature (30)..(203): Homolog of NCBI NO: 22651523 NR Description: oleosin [Olea europaea subsp. europaea]
  misc_feature (30)..(196): Homolog of NCBI NO: 10834827 NR Description: oleosin [Sesamum indicum]
LLSLSLPAKLLDPSSITSLHQPQRTNVRLMADRDRSGIYGGGAYGQQQGGGRPMGEQVKGMIHDKGPTASQALTVATLFPLGGLLLVLSGLALAASTVGLALATPVFLLFSPVLVPAALLIGTAVAGFLTSGALGLGGLSSLTCLANTARQAFQRTPDYVEEARRRMAEAAAHAGHKTAQAGHGIQSKAQEAGAGTGAGGGRTSS

SEQ ID NO: 15570 - protein, 176 aa, Zea mays subsp. mays
  peptide (1)..(176): Ceres Seq. ID no. 13589263
  misc_feature (39)..(156): Pfam Name: Oleosin Pfam Description: Oleosin
  misc_feature (1)..(167): Homolog of NCBI NO: 10834827 NR Description: oleosin [Sesamum indicum]
  misc_feature (1)..(176): Homolog of NCBI NO: 1076818 NR Description: oleosin 17 - maize >gi|687247|gb|AAA68066.1| 17
  misc_feature (1)..(176): Homolog of NCBI NO: 129081 NR Description: Oleosin Zm-II (Oleosin 18 kDa) (Lipid
  misc_feature (1)..(176): Homolog of NCBI NO: 28273373 NR Description: oleosin [Oryza sativa (japonica cultivar-group)]
  misc_feature (1)..(176): Homolog of NCBI NO: 3334279 NR Description: OLEOSIN 18 KD (OSE721) >gi|7442011|pir||T03380 >gi|4102969|gb|AAD10240.1| 18 kDa oleosin [Oryza sativa subsp.
  misc_feature (1)..(176): Homolog of NCBI NO: 1362166 NR Description: oleosin 1 - barley >gi|963062|emb|CAA57994.1|
  misc_feature (18)..(176): Homolog of NCBI NO: 82051 NR Description: lipid body-associated membrane protein - carrot
  misc_feature (1)..(174): Homolog of NCBI NO: 9963897 NR Description: oleosin [Perilla frutescens]
  misc_feature (3)..(174): Homolog of NCBI NO: 10880961 NR Description: 19 kDa oleosin [Perilla frutescens]
  misc_feature (1)..(174): Homolog of NCBI NO: 22651523 NR Description: oleosin [Olea europaea subsp. europaea]
MADRDRSGIYGGGAYGQQQGGGRPMGEQVKGMIHDKGPTASQALTVATLFPLGGLLLVLSGLALAASTVGLALATPVFLLFSPVLVPAALLIGTAVAGFLTSGALGLGGLSSLTCLANTARQAFQRTPDYVEEARRRMAEAAAHAGHKTAQAGHGIQSKAQEAGAGTGAGGGRTSS

SEQ ID NO: 15571 - protein, 152 aa, Zea mays subsp. mays; identical to SEQ ID NO: 6432
  peptide (1)..(152): Ceres Seq. ID no. 13589264
  misc_feature (15)..(132): Pfam Name: Oleosin Pfam Description: Oleosin
  misc_feature (1)..(152): Homolog of NCBI NO: 1076818 NR Description: oleosin 17 - maize >gi|687247|gb|AAA68066.1| 17
  misc_feature (1)..(152): Homolog of NCBI NO: 129081 NR Description: Oleosin Zm-II (Oleosin 18 kDa) (Lipid
  misc_feature (1)..(152): Homolog of NCBI NO: 28273373 NR Description: oleosin [Oryza sativa (japonica cultivar-group)]
  misc_feature (1)..(152): Homolog of NCBI NO: 3334279 NR Description: OLEOSIN 18 KD (OSE721) >gi|7442011|pir||T03380 >gi|4102969|gb|AAD10240.1| 18 kDa oleosin [Oryza sativa subsp.
  misc_feature (1)..(152): Homolog of NCBI NO: 1362166 NR Description: oleosin 1 - barley >gi|963062|emb|CAA57994.1|
  misc_feature (1)..(152): Homolog of NCBI NO: 82051 NR Description: lipid body-associated membrane protein - carrot
  misc_feature (1)..(150): Homolog of NCBI NO: 9963897 NR Description: oleosin [Perilla frutescens]
  misc_feature (1)..(150): Homolog of NCBI NO: 10880961 NR Description: 19 kDa oleosin [Perilla frutescens]
  misc_feature (1)..(150): Homolog of NCBI NO: 22651523 NR Description: oleosin [Olea europaea subsp. europaea]
  misc_feature (1)..(143): Homolog of NCBI NO: 10834827 NR Description: oleosin [Sesamum indicum]

SEQ ID NO: 15572 - DNA, 1007 bp, Zea mays subsp. mays
  misc_feature (1)..(1007): Ceres Seq. ID no. 14302668
  misc_feature: MA Experiment ID: 108544 Result: Up-regulated in Transcription
  misc_feature: MA Experiment ID: 20000535 Result: Up-regulated in Transcription
  misc_feature: MA Experiment 20000535 PARAMETER Experiment Name: Zm_Hybrid_Seed_Dev_P Parameter: DAP Value: 30 vs. 12
  misc_feature: MA Experiment 20000535 PARAMETER Experiment Name: Zm_Hybrid_Seed_Dev_P Parameter: Organism Value: Zea mays
  misc_feature: MA Experiment 20000535 PARAMETER Experiment Name: Zm_Hybrid_Seed_Dev_P Parameter: Plant Line Value: 35A19
  misc_feature: MA Experiment 20000535 PARAMETER Experiment Name: Zm_Hybrid_Seed_Dev_P Parameter: Tissue Value: Embryo vs. Unfert Floret
tctagtctagtacacgaatcacgaacgcgtccacctgcgcgcatcgccacgcaggttctctccaccaaaccttaacctccccttccagaaaccctccaagaggcagctcaaaggaatagtgagccgccccgccgctcctcagccatcctctccatctcggtgtcacacactccgcatacgcacctacgagagtcgagtgacagcgagcgagcgagcgagcgaagccatggctctccgcaccctggcatcgaagaacgccctatccttcgcgctcggcggcgcggcccggccgtcggcggcgtccgcgaggggggtgacgacggtcgcgctccccgacctctcctacgacttcggcgcgctggagccggccatctcgggggagatcatgcgcctgcaccaccagaagcaccacgccacctacgtcgccaactacaacaaggcgctggagcagctcgacgctgccgtcgccaagggcgacgcctccgctgtcgtccagctccagggcgccatcaagttcaacggcggcggtcatgtgaaccattcaatcttttggaagaacctcaagcctattagcgaaggtggtggggagccgccacatgggaaacttggctgggccatcgatgaggattttggttcatttgaggcacttgtaaagaggatgaatgcagaaggcgctgctttacaaggatctggatgggtgtggttagctttggataaagaggcaaaaaagctttcagttgaaactacagctaatcaggatcctctggtgactaaaggtgcaagcttggttccgctgttggggattgatgtctgggagcatgcgtactacctgcagtacaagaatgttaggccggattacctgaacaacatctggaaggtgatgaactggaaatatgctggagaggtgtacgaaaatgttcttgcttgaattgtcttaatggacaatactcatctgcgcgggtttgttttcggctgtttgaccatgtgaaataaagatggacttgtgt

SEQ ID NO: 15573 - protein, 233 aa, Zea mays subsp. mays
  peptide (1)..(233): Ceres Seq. ID no. 14302669
  misc_feature (1)..(233): Homolog of NCBI NO: 1174391 NR Description: Superoxide dismutase [Mn] 3.4, mitochondrial
  misc_feature (1)..(233): Homolog of NCBI NO: 1174389 NR Description: Superoxide dismutase [Mn] 3.2, mitochondrial
  misc_feature (1)..(233): Homolog of NCBI NO: 1174390 NR Description: Superoxide dismutase [Mn] 3.3, mitochondrial
  misc_feature (1)..(233): Homolog of NCBI NO: 134668 NR Description: Superoxide dismutase [Mn] 3.1, mitochondrial
  misc_feature (1)..(233): Homolog of NCBI NO: 82728 NR Description: superoxide dismutase (EC 1.15.1.1) (Mn) sod3
  misc_feature (1)..(233): Homolog of NCBI NO: 7433345 NR Description: probable superoxide dismutase (EC 1.15.1.1) (Mn) - wheat >gi|1654387|gb|AAB68036.1| manganese superoxide dismutase
  misc_feature (1)..(233): Homolog of NCBI NO: 7433348 NR Description: probable superoxide dismutase (EC 1.15.1.1) (Mn)
  misc_feature (1)..(233): Homolog of NCBI NO: 7433347 NR Description: probable superoxide dismutase (EC 1.15.1.1) (Mn)
  misc_feature (1)..(233): Homolog of NCBI NO: 17433511 NR Description: Superoxide dismutase [Mn], mitochondrial >gi|7433346|pir||T04072 probable superoxide dismutase (EC
  misc_feature (1)..(233): Homolog of NCBI NO: 7433342 NR Description: superoxide dismutase (EC 1.15.1.1) (Mn) precursor wheat >gi|1621627|gb|AAB68035.1| manganese superoxide dismutase
MALRTLASKNALSFALGGAARPSAASARGVTTVALPDLSYDFGALEPAISGEIMRLHHQKHHATYVANYNKALEQLDAAVAKGDASAVVQLQGAIKFNGGGHVNHSIFWKNLKPISEGGGEPPHGKLGWAIDEDFGSFEALVKRMNAEGAALQGSGWVWLALDKEAKKLSVETTANQDPLVTKGASLVPLLGIDVWEHAYYLQYKNVRPDYLNNIWKVMNWKYAGEVYENVLA

SEQ ID NO: 15574 - protein, 180 aa, Zea mays subsp. mays
  peptide (1)..(180): Ceres Seq. ID no. 14302670
  misc_feature (1)..(180): Homolog of NCBI NO: 1174391 NR Description: Superoxide dismutase [Mn] 3.4, mitochondrial
  misc_feature (1)..(180): Homolog of NCBI NO: 1174389 NR Description: Superoxide dismutase [Mn] 3.2, mitochondrial
  misc_feature (1)..(180): Homolog of NCBI NO: 1174390 NR Description: Superoxide dismutase [Mn] 3.3, mitochondrial
  misc_feature (1)..(180): Homolog of NCBI NO: 134668 NR Description: Superoxide dismutase [Mn] 3.1, mitochondrial
  misc_feature (1)..(180): Homolog of NCBI NO: 82728 NR Description: superoxide dismutase (EC 1.15.1.1) (Mn) sod3
  misc_feature (1)..(180): Homolog of NCBI NO: 7433345 NR Description: probable superoxide dismutase (EC 1.15.1.1) (Mn) - wheat >gi|1654387|gb|AAB68036.1| manganese superoxide dismutase
  misc_feature (1)..(180): Homolog of NCBI NO: 7433348 NR Description: probable superoxide dismutase (EC 1.15.1.1) (Mn)
  misc_feature (1)..(180): Homolog of NCBI NO: 7433347 NR Description: probable superoxide dismutase (EC 1.15.1.1) (Mn)
  misc_feature (1)..(180): Homolog of NCBI NO: 17433511 NR Description: Superoxide dismutase [Mn], mitochondrial >gi|7433346|pir||T04072 probable superoxide dismutase (EC
  misc_feature (1)..(180): Homolog of NCBI NO: 7433342 NR Description: superoxide dismutase (EC 1.15.1.1) (Mn) precursor wheat >gi|1621627|gb|AAB68035.1| manganese superoxide dismutase
MRLHHQKHHATYVANYNKALEQLDAAVAKGDASAVVQLQGAIKFNGGGHVNHSIFWKNLKPISEGGGEPPHGKLGWAIDEDFGSFEALVKRMNAEGAALQGSGWVWLALDKEAKKLSVETTANQDPLVTKGASLVPLLGIDVWEHAYYLQYKNVRPDYLNNIWKVMNWKYAGEVYENVLA

SEQ ID NO: 15575 - DNA, 1015 bp, Zea mays subsp. mays; identical to SEQ ID NO: 3770
  misc_feature (1)..(1015): Ceres Seq. ID no. 12595679
  misc_feature: MA Experiment ID: 108559 Result: Up-regulated in Transcription
  misc_feature: MA Experiment 108559 PARAMETER Experiment Name: Zm_5mM_NO_P Parameter: Age (day) Value: 8
  misc_feature: MA Experiment 108559 PARAMETER Experiment Name: Zm_5mM_NO_P Parameter: Organism Value: Zea mays
  misc_feature: MA Experiment 108559 PARAMETER Experiment Name: Zm_5mM_NO_P Parameter: Plant Line Value: 35A19
  misc_feature: MA Experiment 108559 PARAMETER Experiment Name: Zm_5mM_NO_P Parameter: Timepoint (hr) Value: 12
  misc_feature: MA Experiment 108559 PARAMETER Experiment Name: Zm_5mM_NO_P Parameter: Tissue Value: Aerial
  misc_feature: MA Experiment 108559 PARAMETER Experiment Name: Zm_5mM_NO_P Parameter: Treatment Value: 5mM NO vs. No Treatment
  misc_feature: MA Experiment ID: 20000477 Result: Up-regulated in Transcription
  misc_feature: MA Experiment 20000477 PARAMETER Experiment Name: Zm_5mM_SA_P Parameter: Age (day) Value: 10
  misc_feature: MA Experiment 20000477 PARAMETER Experiment Name: Zm_5mM_SA_P Parameter: Organism Value: Zea mays
  misc_feature: MA Experiment 20000477 PARAMETER Experiment Name: Zm_5mM_SA_P Parameter: Plant Line Value: 35A19
  misc_feature: MA Experiment 20000477 PARAMETER Experiment Name: Zm_5mM_SA_P Parameter: Timepoint (hr) Value: 48
  misc_feature: MA Experiment 20000477 PARAMETER Experiment Name: Zm_5mM_SA_P Parameter: Tissue Value: Aerial
  misc_feature: MA Experiment 20000477 PARAMETER Experiment Name: Zm_5mM_SA_P Parameter: Treatment Value: 5mM SA vs. No Treatment
  misc_feature: MA Experiment ID: 20000480 Result: Up-regulated in Transcription
  misc_feature: MA Experiment 20000480 PARAMETER Experiment Name: Zm_Drought_P Parameter: Age (day) Value: 11
  misc_feature: MA Experiment 20000480 PARAMETER Experiment Name: Zm_Drought_P Parameter: Organism Value: Zea mays
  misc_feature: MA Experiment 20000480 PARAMETER Experiment Name: Zm_Drought_P Parameter: Plant Line Value: 35A19
  misc_feature: MA Experiment 20000480 PARAMETER Experiment Name: Zm_Drought_P Parameter: Timepoint (hr) Value: 72
  misc_feature: MA Experiment 20000480 PARAMETER Experiment Name: Zm_Drought_P Parameter: Tissue Value: Aerial
  misc_feature: MA Experiment 20000480 PARAMETER Experiment Name: Zm_Drought_P Parameter: Treatment Value: Drought vs. No Drought
  misc_feature: MA Experiment ID: 20000535 Result: Up-regulated in Transcription
  misc_feature: MA Experiment 20000535 PARAMETER Experiment Name: Zm_Hybrid_Seed_Dev_P Parameter: DAP Value: 30 vs. 12
  misc_feature: MA Experiment 20000535 PARAMETER Experiment Name: Zm_Hybrid_Seed_Dev_P Parameter: Organism Value: Zea mays
  misc_feature: MA Experiment 20000535 PARAMETER Experiment Name: Zm_Hybrid_Seed_Dev_P Parameter: Plant Line Value: 35A19
  misc_feature: MA Experiment 20000535 PARAMETER Experiment Name: Zm_Hybrid_Seed_Dev_P Parameter: Tissue Value: Embryo vs. Unfert Floret

SEQ ID NO: 15576 - protein, 143 aa, Zea mays subsp. mays; identical to SEQ ID NO: 3771
  peptide (1)..(143): Ceres Seq. ID no. 12595680
  misc_feature (76)..(100): Pfam Name: A20-like zinc finger Pfam Description: A20-like zinc finger
  misc_feature (76)..(100): Pfam Name: A20-like zinc finger Pfam Description: A20-like zinc finger
  misc_feature (76)..(100): Pfam Name: A20-like zinc finger Pfam Description: A20-like zinc finger
  misc_feature (63)..(143): Homolog of NCBI NO: 35187687 NR Description: zinc-finger protein [Oryza sativa (indica
  misc_feature (63)..(143): Homolog of NCBI NO: 11361253 NR Description: hypothetical protein p85RF [imported] - Prunus
  misc_feature (63)..(143): Homolog of NCBI NO: 18403408 NR Description: expressed protein; protein id: At1g51200.1, by cDNA: gi_15912334 [Arabidopsis thaliana]
  misc_feature (63)..(143): Homolog of NCBI NO: 25082726 NR Description: expressed protein [Arabidopsis thaliana]
  misc_feature (62)..(143): Homolog of NCBI NO: 15231686 NR Description: zinc finger - like protein; protein id: supported by cDNA: gi_14596166 [Arabidopsis thaliana]
  misc_feature (63)..(143): Homolog of NCBI NO: 11361253 NR Description: hypothetical protein p85RF [imported] - Prunus
  misc_feature (63)..(143): Homolog of NCBI NO: 25082726 NR Description: expressed protein [Arabidopsis thaliana]
  misc_feature (63)..(143): Homolog of NCBI NO: 18403408 NR Description: expressed protein; protein id: At1g51200.1, by cDNA: gi_15912334 [Arabidopsis thaliana]
  misc_feature (63)..(143): Homolog of NCBI NO: 11361253 NR Description: hypothetical protein p85RF [imported] - Prunus
  misc_feature (63)..(143): Homolog of NCBI NO: 35187687 NR Description: zinc-finger protein [Oryza sativa (indica
  misc_feature (71)..(143): Homolog of NCBI NO: 29791559 NR Description: Unknown (protein for MGC:56057) [Danio rerio]
  misc_feature (62)..(143): Homolog of NCBI NO: 18404102 NR Description: expressed protein; protein id: At2g36320.1, by cDNA: 24255. [Arabidopsis thaliana] >gi|25408460|pir||C84779
  misc_feature (67)..(103): Homolog of NCBI NO: 30908921 NR Description: putative zinc finger transcription factor ZFP33
  misc_feature (64)..(136): Homolog of NCBI NO: 28269431 NR Description: putative zinc finger protein [Oryza sativa
  misc_feature (62)..(143): Homolog of NCBI NO: 14596167 NR Description: zinc finger-like protein [Arabidopsis thaliana]
  misc_feature (62)..(143): Homolog of NCBI NO: 15231686 NR Description: zinc finger - like protein; protein id: supported by cDNA: gi_14596166 [Arabidopsis thaliana]
  misc_feature (71)..(143): Homolog of NCBI NO: 29791559 NR Description: Unknown (protein for MGC:56057) [Danio rerio]
  misc_feature (62)..(143): Homolog of NCBI NO: 18404102 NR Description: expressed protein; protein id: At2g36320.1, by cDNA: 24255. [Arabidopsis thaliana] >gi|25408460|pir||C84779
  misc_feature (67)..(103): Homolog of NCBI NO: 30908921 NR Description: putative zinc finger transcription factor ZFP33
  misc_feature (64)..(136): Homolog of NCBI NO: 28269431 NR Description: putative zinc finger protein [Oryza sativa
  misc_feature (62)..(143): Homolog of NCBI NO: 14596167 NR Description: zinc finger-like protein [Arabidopsis thaliana]
  misc_feature (62)..(143): Homolog of NCBI NO: 15231686 NR Description: zinc finger - like protein; protein id: supported by cDNA: gi_14596166 [Arabidopsis thaliana]
  misc_feature (63)..(143): Homolog of NCBI NO: 25082726 NR Description: expressed protein [Arabidopsis thaliana]
  misc_feature (63)..(143): Homolog of NCBI NO: 18403408 NR Description: expressed protein; protein id: At1g51200.1, by cDNA: gi_15912334 [Arabidopsis thaliana]
  misc_feature (63)..(143): Homolog of NCBI NO: 35187687 NR Description: zinc-finger protein [Oryza sativa (indica
  misc_feature (62)..(143): Homolog of NCBI NO: 14596167 NR Description: zinc finger-like protein [Arabidopsis thaliana]
  misc_feature (64)..(136): Homolog of NCBI NO: 28269431 NR Description: putative zinc finger protein [Oryza sativa
  misc_feature (67)..(103): Homolog of NCBI NO: 30908921 NR Description: putative zinc finger transcription factor ZFP33
  misc_feature (62)..(143): Homolog of NCBI NO: 18404102 NR Description: expressed protein; protein id: At2g36320.1, by cDNA: 24255. [Arabidopsis thaliana] >gi|25408460|pir||C84779
  misc_feature (71)..(143): Homolog of NCBI NO: 29791559 NR Description: Unknown (protein for MGC:56057) [Danio rerio]

SEQ ID NO: 15577 - protein, 91 aa, Zea mays subsp. mays; identical to SEQ ID NO: 3772
  peptide (1)..(91): Ceres Seq. ID no. 12595681

SEQ ID NO: 15578 - protein, 82 aa, Zea mays subsp. mays; identical to SEQ ID NO: 3773
  peptide (1)..(82): Ceres Seq. ID no. 12595682
  misc_feature (23)..(63): Pfam Name: AN1-like Zinc finger Pfam Description: AN1-like Zinc finger
  misc_feature (23)..(63): Pfam Name: AN1-like Zinc finger Pfam Description: AN1-like Zinc finger
  misc_feature (23)..(63): Pfam Name: AN1-like Zinc finger Pfam Description: AN1-like Zinc finger
  misc_feature (1)..(82): Homolog of NCBI NO: 35187687 NR Description: zinc-finger protein [Oryza sativa (indica
  misc_feature (1)..(82): Homolog of NCBI NO: 11361253 NR Description: hypothetical protein p85RF [imported] - Prunus
  misc_feature (1)..(82): Homolog of NCBI NO: 18403408 NR Description: expressed protein; protein id: At1g51200.1, by cDNA: gi_15912334 [Arabidopsis thaliana]
  misc_feature (1)..(82): Homolog of NCBI NO: 25082726 NR Description: expressed protein [Arabidopsis thaliana]
  misc_feature (1)..(82): Homolog of NCBI NO: 15231686 NR Description: zinc finger - like protein; protein id: supported by cDNA: gi_14596166 [Arabidopsis thaliana]
  misc_feature (1)..(82): Homolog of NCBI NO: 11361253 NR Description: hypothetical protein p85RF [imported] - Prunus
  misc_feature (1)..(82): Homolog of NCBI NO: 25082726 NR Description: expressed protein [Arabidopsis thaliana]
  misc_feature (1)..(82): Homolog of NCBI NO: 18403408 NR Description: expressed protein; protein id: At1g51200.1, by cDNA: gi_15912334 [Arabidopsis thaliana]
  misc_feature (1)..(82): Homolog of NCBI NO: 11361253 NR Description: hypothetical protein p85RF [imported] - Prunus
  misc_feature (1)..(82): Homolog of NCBI NO: 35187687 NR Description: zinc-finger protein [Oryza sativa (indica
  misc_feature (3)..(82): Homolog of NCBI NO: 29791559 NR Description: Unknown (protein for MGC:56057) [Danio rerio]
  misc_feature (1)..(82): Homolog of NCBI NO: 18404102 NR Description: expressed protein; protein id: At2g36320.1, by cDNA: 24255. [Arabidopsis thaliana] >gi|25408460|pir||C84779
  misc_feature (3)..(82): Homolog of NCBI NO: 30908921 NR Description: putative zinc finger transcription factor ZFP33
  misc_feature (6)..(82): Homolog of NCBI NO: 28269431 NR Description: putative zinc finger protein [Oryza sativa
  misc_feature (1)..(82): Homolog of NCBI NO: 14596167 NR Description: zinc finger-like protein [Arabidopsis thaliana]
  misc_feature (1)..(82): Homolog of NCBI NO: 15231686 NR Description: zinc finger - like protein; protein id: supported by cDNA: gi_14596166 [Arabidopsis thaliana]
  misc_feature (3)..(82): Homolog of NCBI NO: 29791559 NR Description: Unknown (protein for MGC:56057) [Danio rerio]
  misc_feature (1)..(82): Homolog of NCBI NO: 18404102 NR Description: expressed protein; protein id: At2g36320.1, by cDNA: 24255. [Arabidopsis thaliana] >gi|25408460|pir||C84779
  misc_feature (3)..(82): Homolog of NCBI NO: 30908921 NR Description: putative zinc finger transcription factor ZFP33
  misc_feature (6)..(82): Homolog of NCBI NO: 28269431 NR Description: putative zinc finger protein [Oryza sativa
  misc_feature (1)..(82): Homolog of NCBI NO: 14596167 NR Description: zinc finger-like protein [Arabidopsis thaliana]
  misc_feature (1)..(82): Homolog of NCBI NO: 15231686 NR Description: zinc finger - like protein; protein id: supported by cDNA: gi_14596166 [Arabidopsis thaliana]
  misc_feature (1)..(82): Homolog of NCBI NO: 25082726 NR Description: expressed protein [Arabidopsis thaliana]
  misc_feature (1)..(82): Homolog of NCBI NO: 18403408 NR Description: expressed protein; protein id: At1g51200.1, by cDNA: gi_15912334 [Arabidopsis thaliana]
  misc_feature (1)..(82): Homolog of NCBI NO: 35187687 NR Description: zinc-finger protein [Oryza sativa (indica
  misc_feature (1)..(82): Homolog of NCBI NO: 14596167 NR Description: zinc finger-like protein [Arabidopsis thaliana]
  misc_feature (6)..(82): Homolog of NCBI NO: 28269431 NR Description: putative zinc finger protein [Oryza sativa
  misc_feature (3)..(82): Homolog of NCBI NO: 30908921 NR Description: putative zinc finger transcription factor ZFP33
  misc_feature (1)..(82): Homolog of NCBI NO: 18404102 NR Description: expressed protein; protein id: At2g36320.1, by cDNA: 24255. [Arabidopsis thaliana] >gi|25408460|pir||C84779
  misc_feature (3)..(82): Homolog of NCBI NO: 29791559 NR Description: Unknown (protein for MGC:56057) [Danio rerio]

SEQ ID NO: 15579 - protein, 81 aa, Zea mays subsp. mays; identical to SEQ ID NO: 3774
  peptide (1)..(81): Ceres Seq. ID no. 12595683
  misc_feature (14)..(38): Pfam Name: A20-like zinc finger Pfam Description: A20-like zinc finger
  misc_feature (14)..(38): Pfam Name: A20-like zinc finger Pfam Description: A20-like zinc finger
  misc_feature (14)..(38): Pfam Name: A20-like zinc finger Pfam Description: A20-like zinc finger
  misc_feature (1)..(81): Homolog of NCBI NO: 35187687 NR Description: zinc-finger protein [Oryza sativa (indica
  misc_feature (1)..(81): Homolog of NCBI NO: 11361253 NR Description: hypothetical protein p85RF [imported] - Prunus
  misc_feature (1)..(81): Homolog of NCBI NO: 18403408 NR Description: expressed protein; protein id: At1g51200.1, by cDNA: gi_15912334 [Arabidopsis thaliana]
  misc_feature (1)..(81): Homolog of NCBI NO: 25082726 NR Description: expressed protein [Arabidopsis thaliana]
  misc_feature (1)..(81): Homolog of NCBI NO: 15231686 NR Description: zinc finger - like protein; protein id: supported by cDNA: gi_14596166 [Arabidopsis thaliana]
  misc_feature (1)..(81): Homolog of NCBI NO: 11361253 NR Description: hypothetical protein p85RF [imported] - Prunus
  misc_feature (1)..(81): Homolog of NCBI NO: 25082726 NR Description: expressed protein [Arabidopsis thaliana]
  misc_feature (1)..(81): Homolog of NCBI NO: 18403408 NR Description: expressed protein; protein id: At1g51200.1, by cDNA: gi_15912334 [Arabidopsis thaliana]
  misc_feature (1)..(81): Homolog of NCBI NO: 11361253 NR Description: hypothetical protein p85RF [imported] - Prunus
  misc_feature (1)..(81): Homolog of NCBI NO: 35187687 NR Description: zinc-finger protein [Oryza sativa (indica
  misc_feature (9)..(81): Homolog of NCBI NO: 29791559 NR Description: Unknown (protein for MGC:56057) [Danio rerio]
  misc_feature (1)..(81): Homolog of NCBI NO: 18404102 NR Description: expressed protein; protein id: At2g36320.1, by cDNA: 24255. [Arabidopsis thaliana] >gi|25408460|pir||C84779
  misc_feature (5)..(41): Homolog of NCBI NO: 30908921 NR Description: putative zinc finger transcription factor ZFP33
  misc_feature (2)..(74): Homolog of NCBI NO: 28269431 NR Description: putative zinc finger protein [Oryza sativa
  misc_feature (1)..(81): Homolog of NCBI NO: 14596167 NR Description: zinc finger-like protein [Arabidopsis thaliana]
  misc_feature (1)..(81): Homolog of NCBI NO: 15231686 NR Description: zinc finger - like protein; protein id: supported by cDNA: gi_14596166 [Arabidopsis thaliana]
  misc_feature (9)..(81): Homolog of NCBI NO: 29791559 NR Description: Unknown (protein for MGC:56057) [Danio rerio]
  misc_feature (1)..(81): Homolog of NCBI NO: 18404102 NR Description: expressed protein; protein id: At2g36320.1, by cDNA: 24255. [Arabidopsis thaliana] >gi|25408460|pir||C84779
  misc_feature (5)..(41): Homolog of NCBI NO: 30908921 NR Description: putative zinc finger transcription factor ZFP33
  misc_feature (2)..(74): Homolog of NCBI NO: 28269431 NR Description: putative zinc finger protein [Oryza sativa
  misc_feature (1)..(81): Homolog of NCBI NO: 14596167 NR Description: zinc finger-like protein [Arabidopsis thaliana]
  misc_feature (1)..(81): Homolog of NCBI NO: 15231686 NR Description: zinc finger - like protein; protein id: supported by cDNA: gi_14596166 [Arabidopsis thaliana]
  misc_feature (1)..(81): Homolog of NCBI NO: 25082726 NR Description: expressed protein [Arabidopsis thaliana]
  misc_feature (1)..(81): Homolog of NCBI NO: 18403408 NR Description: expressed protein; protein id: At1g51200.1, by cDNA: gi_15912334 [Arabidopsis thaliana]
  misc_feature (1)..(81): Homolog of NCBI NO: 35187687 NR Description: zinc-finger protein [Oryza sativa (indica
  misc_feature (1)..(81): Homolog of NCBI NO: 14596167 NR Description: zinc finger-like protein [Arabidopsis thaliana]
  misc_feature (2)..(74): Homolog of NCBI NO: 28269431 NR Description: putative zinc finger protein [Oryza sativa
  misc_feature (5)..(41): Homolog of NCBI NO: 30908921 NR Description: putative zinc finger transcription factor ZFP33
  misc_feature (1)..(81): Homolog of NCBI NO: 18404102 NR Description: expressed protein; protein id: At2g36320.1, by cDNA: 24255. [Arabidopsis thaliana] >gi|25408460|pir||C84779
  misc_feature (9)..(81): Homolog of NCBI NO: 29791559 NR Description: Unknown (protein for MGC:56057) [Danio rerio]

SEQ ID NO: 15580 - DNA, 453 bp, Zea mays subsp. mays
  misc_feature (1)..(453): Ceres Seq. ID no. 7115007
  misc_feature: MA Experiment ID: 108504 Result: Up-regulated in Transcription
  misc_feature: MA Experiment 108504 PARAMETER Experiment Name: Zm_Drought_P Parameter: Age (day) Value: 8
  misc_feature: MA Experiment 108504 PARAMETER Experiment Name: Zm_Drought_P Parameter: Organism Value: Zea mays
  misc_feature: MA Experiment 108504 PARAMETER Experiment Name: Zm_Drought_P Parameter: Plant Line Value: 35A19
  misc_feature: MA Experiment 108504 PARAMETER Experiment Name: Zm_Drought_P Parameter: Timepoint (hr) Value: 12
  misc_feature: MA Experiment 108504 PARAMETER Experiment Name: Zm_Drought_P Parameter: Tissue Value: Aerial
  misc_feature: MA Experiment 108504 PARAMETER Experiment Name: Zm_Drought_P Parameter: Treatment Value: Drought vs. No Drought
  misc_feature: MA Experiment ID: 108687 Result: Up-regulated in Transcription
  misc_feature: MA Experiment 108687 PARAMETER Experiment Name: Zm_Embryos-Flowers__P Parameter: Tissue Value: Embryo vs. Aerial+
  misc_feature: MA Experiment ID: 108689 Result: Up-regulated in Transcription
  misc_feature: MA Experiment 108689 PARAMETER Experiment Name: Zm_Drought_Roots_P Parameter: Age (day) Value: 9
  misc_feature: MA Experiment 108689 PARAMETER Experiment Name: Zm_Drought_Roots_P Parameter: Organism Value: Zea mays
  misc_feature: MA Experiment 108689 PARAMETER Experiment Name: Zm_Drought_Roots_P Parameter: Plant Line Value: 35A19
  misc_feature: MA Experiment 108689 PARAMETER Experiment Name: Zm_Drought_Roots_P Parameter: Timepoint (hr) Value: 24
  misc_feature: MA Experiment 108689 PARAMETER Experiment Name: Zm_Drought_Roots_P Parameter: Tissue Value: Roots
  misc_feature: MA Experiment 108689 PARAMETER Experiment Name: Zm_Drought_Roots_P Parameter: Treatment Value: Drought vs. No Drought
  misc_feature: MA Experiment ID: 20000535 Result: Up-regulated in Transcription
  misc_feature: MA Experiment 20000535 PARAMETER Experiment Name: Zm_Hybrid_Seed_Dev_P Parameter: DAP Value: 30 vs. 12
  misc_feature: MA Experiment 20000535 PARAMETER Experiment Name: Zm_Hybrid_Seed_Dev_P Parameter: Organism Value: Zea mays
  misc_feature: MA Experiment 20000535 PARAMETER Experiment Name: Zm_Hybrid_Seed_Dev_P Parameter: Plant Line Value: 35A19
  misc_feature: MA Experiment 20000535 PARAMETER Experiment Name: Zm_Hybrid_Seed_Dev_P Parameter: Tissue Value: Embryo vs. Unfert Floret
aacaacgagttaacgaaagccttttatccaagctcaggaaagctcacagtttcgttggatccaatcttagttttatccaagctcagcaatggcttctcgtcagcagcatcctactagctaccacgccggcgagacaaaggcccgtgccgaggagaagacgggtcaagtgatgggggcggcgcaggagaaagggagggaggccaagcacaaggcgtccgacgccgccgaccgcgccatggggatgggccacgacgccagggaggcgaccagggagaaggcgcgcgccgccgcggaccgaaccatggggatgggccacgacgccggggagacggccaaggacagggcgtaccgcgcccacgacggcgcgcagcagaccgggagctacgtcgcgcagacggccgaggccgccaggcagaangcggccggcgccgcgctgtacgccaaggacacccg

SEQ ID NO: 15581 - protein, 121 aa, Zea mays subsp. mays
  peptide (1)..(121): Ceres Seq. ID no. 7115008
  misc_feature (29)..(98): Pfam Name: Late embryogenesis abundant protein Pfam Description: Late embryogenesis abundant protein
  misc_feature (1)..(120): Homolog of NCBI NO: 1076757 NR Description: WSI18 protein - rice >gi|537402|dbj|BAA05537.1|
  misc_feature (1)..(120): Homolog of NCBI NO: 34910364 NR Description: WSI18 protein [Oryza sativa (japonica
  misc_feature (1)..(119): Homolog of NCBI NO: 4105441 NR Description: group 3 LEA protein [Oryza sativa]
  misc_feature (1)..(119): Homolog of NCBI NO: 7489493 NR Description: LEA protein - rice >gi|1486503|gb|AAC03364.1|
  misc_feature (1)..(119): Homolog of NCBI NO: 7489569 NR Description: protein LEA type 1 - rice
  misc_feature (17)..(120): Homolog of NCBI NO: 34910364 NR Description: WSI18 protein [Oryza sativa (japonica
  misc_feature (17)..(120): Homolog of NCBI NO: 1076757 NR Description: WSI18 protein - rice >gi|537402|dbj|BAA05537.1|
  misc_feature (1)..(111): Homolog of NCBI NO: 7387829 NR Description: Late embryogenesis abundant protein, group 3 (LEA)
  misc_feature (1)..(119): Homolog of NCBI NO: 126081 NR Description: ABA-inducible protein PHV A1
  misc_feature (1)..(120): Homolog of NCBI NO: 20126724 NR Description: late embryogenesis-abundant protein [Brassica
  misc_feature (110)..(110): Xaa is any aa, unknown or other
MASRQQHPTSYHAGETKARAEEKTGQVMGAAQEKGREAKHKASDAADRAMGMGHDAREATREKARAAADRTMGMGHDAGETAKDRAYRAHDGAQQTGSYVAQTAEAARQXAAGAALYAKDT

SEQ ID NO: 15582 - protein, 94 aa, Zea mays subsp. mays
  peptide (1)..(94): Ceres Seq. ID no. 7115009
  misc_feature (2)..(71): Pfam Name: Late embryogenesis abundant protein Pfam Description: Late embryogenesis abundant protein
  misc_feature (1)..(93): Homolog of NCBI NO: 1076757 NR Description: WSI18 protein - rice >gi|537402|dbj|BAA05537.1|
  misc_feature (1)..(93): Homolog of NCBI NO: 34910364 NR Description: WSI18 protein [Oryza sativa (japonica
  misc_feature (1)..(92): Homolog of NCBI NO: 4105441 NR Description: group 3 LEA protein [Oryza sativa]
  misc_feature (1)..(92): Homolog of NCBI NO: 7489493 NR Description: LEA protein - rice >gi|1486503|gb|AAC03364.1|
  misc_feature (1)..(92): Homolog of NCBI NO: 7489569 NR Description: protein LEA type 1 - rice
  misc_feature (1)..(93): Homolog of NCBI NO: 34910364 NR Description: WSI18 protein [Oryza sativa (japonica
  misc_feature (1)..(93): Homolog of NCBI NO: 1076757 NR Description: WSI18 protein - rice >gi|537402|dbj|BAA05537.1|
  misc_feature (1)..(84): Homolog of NCBI NO: 7387829 NR Description: Late embryogenesis abundant protein, group 3 (LEA)
  misc_feature (1)..(92): Homolog of NCBI NO: 126081 NR Description: ABA-inducible protein PHV A1
  misc_feature (1)..(93): Homolog of NCBI NO: 20126724 NR Description: late embryogenesis-abundant protein [Brassica
  misc_feature (83)..(83): Xaa is any aa, unknown or other
MGAAQEKGREAKHKASDAADRAMGMGHDAREATREKARAAADRTMGMGHDAGETAKDRAYRAHDGAQQTGSYVAQTAEAARQXAAGAALYAKDT

SEQ ID NO: 15583 - protein, 72 aa, Zea mays subsp. mays
  peptide (1)..(72): Ceres Seq. ID no. 7115010
  misc_feature (1)..(71): Homolog of NCBI NO: 1076757 NR Description: WSI18 protein - rice >gi|537402|dbj|BAA05537.1|
  misc_feature (1)..(71): Homolog of NCBI NO: 34910364 NR Description: WSI18 protein [Oryza sativa (japonica
  misc_feature (1)..(70): Homolog of NCBI NO: 4105441 NR Description: group 3 LEA protein [Oryza sativa]
  misc_feature (1)..(70): Homolog of NCBI NO: 7489493 NR Description: LEA protein - rice >gi|1486503|gb|AAC03364.1|
  misc_feature (1)..(70): Homolog of NCBI NO: 7489569 NR Description: protein LEA type 1 - rice
  misc_feature (1)..(71): Homolog of NCBI NO: 34910364 NR Description: WSI18 protein [Oryza sativa (japonica
  misc_feature (1)..(71): Homolog of NCBI NO: 1076757 NR Description: WSI18 protein - rice >gi|537402|dbj|BAA05537.1|
  misc_feature (1)..(62): Homolog of NCBI NO: 7387829 NR Description: Late embryogenesis abundant protein, group 3 (LEA)
  misc_feature (1)..(70): Homolog of NCBI NO: 126081 NR Description: ABA-inducible protein PHV A1
  misc_feature (1)..(71): Homolog of NCBI NO: 20126724 NR Description: late embryogenesis-abundant protein [Brassica
  misc_feature (61)..(61): Xaa is any aa, unknown or other
MGMGHDAREATREKARAAADRTMGMGHDAGETAKDRAYRAHDGAQQTGSYVAQTAEAARQXAAGAALYAKDT

SEQ ID NO: 15584 - DNA, 1834 bp, Zea mays subsp. mays
  misc_feature (1)..(1834): Ceres Seq. ID no. 13580193
  misc_feature: MA Experiment ID: 108527 Result: Down-regulated in Transcription
  misc_feature: MA Experiment 108527 PARAMETER Experiment Name: Zm_5mM_NO_P Parameter: Age (day) Value: 8
  misc_feature: MA Experiment 108527 PARAMETER Experiment Name: Zm_5mM_NO_P Parameter: Organism Value: Zea mays
  misc_feature: MA Experiment 108527 PARAMETER Experiment Name: Zm_5mM_NO_P Parameter: Plant Line Value: 35A19
  misc_feature: MA Experiment 108527 PARAMETER Experiment Name: Zm_5mM_NO_P Parameter: Timepoint (hr) Value: 6
  misc_feature: MA Experiment 108527 PARAMETER Experiment Name: Zm_5mM_NO_P Parameter: Tissue Value: Aerial
  misc_feature: MA Experiment 108527 PARAMETER Experiment Name: Zm_5mM_NO_P Parameter: Treatment Value: 5mM NO vs. No Treatment
  misc_feature: MA Experiment ID: 108544 Result: Up-regulated in Transcription
  misc_feature: MA Experiment ID: 108689 Result: Up-regulated in Transcription
  misc_feature: MA Experiment 108689 PARAMETER Experiment Name: Zm_Drought_Roots_P Parameter: Age (day) Value: 9
  misc_feature: MA Experiment 108689 PARAMETER Experiment Name: Zm_Drought_Roots_P Parameter: Organism Value: Zea mays
  misc_feature: MA Experiment 108689 PARAMETER Experiment Name: Zm_Drought_Roots_P Parameter: Plant Line Value: 35A19
  misc_feature: MA Experiment 108689 PARAMETER Experiment Name: Zm_Drought_Roots_P Parameter: Timepoint (hr) Value: 24
  misc_feature: MA Experiment 108689 PARAMETER Experiment Name: Zm_Drought_Roots_P Parameter: Tissue Value: Roots
  misc_feature: MA Experiment 108689 PARAMETER Experiment Name: Zm_Drought_Roots_P Parameter: Treatment Value: Drought vs. No Drought
gcgcctcccaaagctctcttgttcgttgctcatccccccccccccccccccgtgctggttaatcatccgttcgatttcgatcacatacatataatctccctcagctatcgcggccgcgcgcctgatcgacgtacgaccggtctggtacgtacgtgtgctcgcccgccatggctcgcggcgacggcgagctggagctgtccgtgggggtccgcggcaccggcggcgcggcggcggcggcggcggcggaccacgtggcgccgatcagcctcggcaggctcatcctcgccggcatggtcgccggcggcgtgcagtacggctgggcgctgcagctctccctcctcacgccctacgtgcagactctggggctctcacatgccctcacttcattcatgtggctatgcggtcctattgctggcttagtggtccaaccgctggttggcttgtacagtgataggtgcacagcaagatggggaagacgcaggccatttatcctgataggatgcatgctcatctgccttgccgtcattgttgttggcttctcgtccgacatcggagctgctctaggggacacgaaggaacactgcagcctctaccacggccctcgttggcatgctgcgatcgtctacgttctggggttttggctccttgacttctccaacaatactgtgcaaggtccagcgcgtgctatgatggctgatctgtgcggtcatcatgggcctagtgcagccaactcaatcttctgttcttggatggcgctgggaaacatcctaggctattcctctggttccacaaacaactggcacaagtggtttccgttccttttaacaaacgcgtgctgtgaagcctgcgcaaacctgaaaggcgcgtttctggtggctgtggtgttcctagtcatgtgcttgactgtaaccctgttcttcgccaacgaagtgccctacagaggaaaccagaacctccccacaaaggcaaacggcgaggtcgagactgaaccttccggcccactcgctgtgctcaagggcttcaagaacttgcccacggggatgccgtccgtgctcctcgtaactggactcacctggctctcttggttcccgttcatcctctacgacaccgactggatgggccgtgagatctaccacggcgaccccaagggtagcaacgctcagatctcggcgttcgacgaaggcgtcagagttggctcgttcgggctgctgctcaactcgatcgttctaggattcagctcgttcctgatcgagcccatgtgccggaaggtcgggccgagggtggtgtgggtgacgagcaacttcatggtctgcgtcgccatggcggccaccgcgctgatcagcttctggtcgctcaaggactaccacggatacgtgcaggacgccatcaccgccagcacgagcatcaaggccgtctgcctcgtcctcttcgcgttcctgggtgtccctctcgccatcctgtacagcgtcccgttcgcggtgacggcgcagctggcggccacgaaaggcggcgggcaggggctgtgcaccggcgtgctcaacatctccatcgtcatccctcaggtgatcatcgcgctgggcgcgggcccgtgggacgcgctgttcggcaagggcaacatcccggcgttcggcgtggcgtcggggttcgccctcatcggcggcgtcgtgggcgtgttcctgctgcccaagatctccaagcgccagttccgcgccgtcagcgcgggcggccactgatcgcggccgccgcgccggagcacggcacggcggcacagcccagccgtgctagagctgtatgttttgaaagttgaaacagaataagaagcgggcgaaacgag

SEQ ID NO: 15585 - protein, 521 aa, Zea mays subsp. mays
  peptide (1)..(521): Ceres Seq. ID no. 13580194
  misc_feature (37)..(520): Pfam Name: Sugar (and other) transporter Pfam Description: Sugar (and other) transporter
  misc_feature (1)..(521): Homolog of NCBI NO: 5771354 NR Description: Sucrose Transporter [Zea mays]
  misc_feature (4)..(520): Homolog of NCBI NO: 9624451 NR Description: sucrose transporter [Oryza sativa (indica
  misc_feature (4)..(520): Homolog of NCBI NO: 7489560 NR Description: probable sucrose transport protein - rice
  misc_feature (1)..(521): Homolog of NCBI NO: 7024415 NR Description: sucrose transporter 1 [Hordeum vulgare subsp.
  misc_feature (1)..(521): Homolog of NCBI NO: 19548165 NR Description: sucrose transporter SUT1D [Triticum aestivum]
  misc_feature (1)..(521): Homolog of NCBI NO: 20152871 NR Description: sucrose transporter SUT1A [Triticum aestivum]
  misc_feature (1)..(521): Homolog of NCBI NO: 20152873 NR Description: sucrose transporter SUT1B [Triticum aestivum]
  misc_feature (32)..(521): Homolog of NCBI NO: 15718401 NR Description: sucrose transporter [Oryza sativa (japonica
  misc_feature (32)..(521): Homolog of NCBI NO: 16152148 NR Description: sucrose transporter [Oryza sativa (indica
  misc_feature (253)..(521): Homolog of NCBI NO: 29467454 NR Description: sucrose transporter [Oryza sativa (japonica
MARGDGELELSVGVRGTGGAAAAAAADHVAPISLGRLILAGMVAGGVQYGWALQLSLLTPYVQTLGLSHALTSFMWLCGPIAGLVVQPLVGLYSDRCTARWGRRRPFILIGCMLICLAVIVVGFSSDIGAALGDTKEHCSLYHGPRWHAAIVYVLGFWLLDFSNNTVQGPARAMMADLCGHHGPSAANSIFCSWMALGNILGYSSGSTNNWHKWFPFLLTNACCEACANLKGAFLVAVVFLVMCLTVTLFFANEVPYRGNQNLPTKANGEVETEPSGPLAVLKGFKNLPTGMPSVLLVTGLTWLSWFPFILYDTDWMGREIYHGDPKGSNAQISAFDEGVRVGSFGLLLNSIVLGFSSFLIEPMCRKVGPRVVWVTSNFMVCVAMAATALISFWSLKDYHGYVQDAITASTSIKAVCLVLFAFLGVPLAILYSVPFAVTAQLAATKGGGQGLCTGVLNISIVIPQVIIALGAGPWDALFGKGNIPAFGVASGFALIGGVVGVFLLPKISKRQFRAVSAGGH

SEQ ID NO: 15586 - protein, 480 aa, Zea mays subsp. mays
  peptide (1)..(480): Ceres Seq. ID no. 13580195
  misc_feature (1)..(479): Pfam Name: Sugar (and other) transporter Pfam Description: Sugar (and other) transporter
  misc_feature (1)..(480): Homolog of NCBI NO: 5771354 NR Description: Sucrose Transporter [Zea mays]
  misc_feature (1)..(479): Homolog of NCBI NO: 9624451 NR Description: sucrose transporter [Oryza sativa (indica
  misc_feature (1)..(479): Homolog of NCBI NO: 7489560 NR Description: probable sucrose transport protein - rice
  misc_feature (1)..(480): Homolog of NCBI NO: 7024415 NR Description: sucrose transporter 1 [Hordeum vulgare subsp.
  misc_feature (1)..(480): Homolog of NCBI NO: 19548165 NR Description: sucrose transporter SUT1D [Triticum aestivum]
  misc_feature (1)..(480): Homolog of NCBI NO: 20152871 NR Description: sucrose transporter SUT1A [Triticum aestivum]
  misc_feature (1)..(480): Homolog of NCBI NO: 20152873 NR Description: sucrose transporter SUT1B [Triticum aestivum]
  misc_feature (1)..(480): Homolog of NCBI NO: 15718401 NR Description: sucrose transporter [Oryza sativa (japonica
  misc_feature (1)..(480): Homolog of NCBI NO: 16152148 NR Description: sucrose transporter [Oryza sativa (indica
  misc_feature (212)..(480): Homolog of NCBI NO: 29467454 NR Description: sucrose transporter [Oryza sativa (japonica
MVAGGVQYGWALQLSLLTPYVQTLGLSHALTSFMWLCGPIAGLVVQPLVGLYSDRCTARWGRRRPFILIGCMLICLAVIVVGFSSDIGAALGDTKEHCSLYHGPRWHAAIVYVLGFWLLDFSNNTVQGPARAMMADLCGHHGPSAANSIFCSWMALGNILGYSSGSTNNWHKWFPFLLTNACCEACANLKGAFLVAVVFLVMCLTVTLFFANEVPYRGNQNLPTKANGEVETEPSGPLAVLKGFKNLPTGMPSVLLVTGLTWLSWFPFILYDTDWMGREIYHGDPKGSNAQISAFDEGVRVGSFGLLLNSIVLGFSSFLIEPMCRKVGPRVVWVTSNFMVCVAMAATALISFWSLKDYHGYVQDAITASTSIKAVCLVLFAFLGVPLAILYSVPFAVTAQLAATKGGGQGLCTGVLNISIVIPQVIIALGAGPWDALFGKGNIPAFGVASGFALIGGVVGVFLLPKISKRQFRAVSAGGH

SEQ ID NO: 15587 - protein, 447 aa, Zea mays subsp. mays
  peptide (1)..(447): Ceres Seq. ID no. 13580196
  misc_feature (1)..(446): Pfam Name: Sugar (and other) transporter Pfam Description: Sugar (and other) transporter
  misc_feature (1)..(447): Homolog of NCBI NO: 5771354 NR Description: Sucrose Transporter [Zea mays]
  misc_feature (1)..(446): Homolog of NCBI NO: 9624451 NR Description: sucrose transporter [Oryza sativa (indica
  misc_feature (1)..(446): Homolog of NCBI NO: 7489560 NR Description: probable sucrose transport protein - rice
  misc_feature (1)..(447): Homolog of NCBI NO: 7024415 NR Description: sucrose transporter 1 [Hordeum vulgare subsp.
  misc_feature (1)..(447): Homolog of NCBI NO: 19548165 NR Description: sucrose transporter SUT1D [Triticum aestivum]
  misc_feature (1)..(447): Homolog of NCBI NO: 20152871 NR Description: sucrose transporter SUT1A [Triticum aestivum]
  misc_feature (1)..(447): Homolog of NCBI NO: 20152873 NR Description: sucrose transporter SUT1B [Triticum aestivum]
  misc_feature (1)..(447): Homolog of NCBI NO: 15718401 NR Description: sucrose transporter [Oryza sativa (japonica
  misc_feature (1)..(447): Homolog of NCBI NO: 16152148 NR Description: sucrose transporter [Oryza sativa (indica
  misc_feature (179)..(447): Homolog of NCBI NO: 29467454 NR Description: sucrose transporter [Oryza sativa (japonica
MWLCGPIAGLVVQPLVGLYSDRCTARWGRRRPFILIGCMLICLAVIVVGFSSDIGAALGDTKEHCSLYHGPRWHAAIVYVLGFWLLDFSNNTVQGPARAMMADLCGHHGPSAANSIFCSWMALGNILGYSSGSTNNWHKWFPFLLTNACCEACANLKGAFLVAVVFLVMCLTVTLFFANEVPYRGNQNLPTKANGEVETEPSGPLAVLKGFKNLPTGMPSVLLVTGLTWLSWFPFILYDTDWMGREIYHGDPKGSNAQISAFDEGVRVGSFGLLLNSIVLGFSSFLIEPMCRKVGPRVVWVTSNFMVCVAMAATALISFWSLKDYHGYVQDAITASTSIKAVCLVLFAFLGVPLAILYSVPFAVTAQLAATKGGGQGLCTGVLNISIVIPQVIIALGAGPWDALFGKGNIPAFGVASGFALIGGVVGVFLLPKISKRQFRAVSAGGH

SEQ ID NO: 15588 - DNA, 828 bp, Zea mays subsp. mays; identical to SEQ ID NO: 14873
  misc_feature (1)..(828): Ceres Seq. ID no. 12595473
  misc_feature: MA Experiment ID: 108532 Result: Up-regulated in Transcription
  misc_feature: MA Experiment 108532 PARAMETER Experiment Name: Zm_20uM_KNO3_H-to-L_P Parameter: Age (day) Value: 11
  misc_feature: MA Experiment 108532 PARAMETER Experiment Name: Zm_20uM_KNO3_H-to-L_P Parameter: Organism Value: Zea mays
  misc_feature: MA Experiment 108532 PARAMETER Experiment Name: Zm_20uM_KNO3_H-to-L_P Parameter: Plant Line Value: 35A19
  misc_feature: MA Experiment 108532 PARAMETER Experiment Name: Zm_20uM_KNO3_H-to-L_P Parameter: Timepoint (hr) Value: 16
  misc_feature: MA Experiment 108532 PARAMETER Experiment Name: Zm_20uM_KNO3_H-to-L_P Parameter: Tissue Value: Roots
  misc_feature: MA Experiment 108532 PARAMETER Experiment Name: Zm_20uM_KNO3_H-to-L_P Parameter: Treatment Value: 20uM KNO3 vs. 60mM KNO3
  misc_feature: MA Experiment ID: 20000535 Result: Up-regulated in Transcription
  misc_feature: MA Experiment 20000535 PARAMETER Experiment Name: Zm_Hybrid_Seed_Dev_P Parameter: DAP Value: 30 vs. 12
  misc_feature: MA Experiment 20000535 PARAMETER Experiment Name: Zm_Hybrid_Seed_Dev_P Parameter: Organism Value: Zea mays
  misc_feature: MA Experiment 20000535 PARAMETER Experiment Name: Zm_Hybrid_Seed_Dev_P Parameter: Plant Line Value: 35A19
  misc_feature: MA Experiment 20000535 PARAMETER Experiment Name: Zm_Hybrid_Seed_Dev_P Parameter: Tissue Value: Embryo vs. Unfert Floret

SEQ ID NO: 15589 - protein, 230 aa, Zea mays subsp. mays; identical to SEQ ID NO: 14874
  peptide (1)..(230): Ceres Seq. ID no. 12595474
  misc_feature (106)..(208): Pfam Name: Protease inhibitor/seed storage/LTP family Pfam Description: Protease inhibitor/seed storage/LTP family
  misc_feature (106)..(208): Pfam Name: Protease inhibitor/seed storage/LTP family Pfam Description: Protease inhibitor/seed storage/LTP family
  misc_feature (106)..(208): Pfam Name: Protease inhibitor/seed storage/LTP family Pfam Description: Protease inhibitor/seed storage/LTP family
  misc_feature (106)..(208): Pfam Name: Protease inhibitor/seed storage/LTP family Pfam Description: Protease inhibitor/seed storage/LTP family
  misc_feature (53)..(230): Homolog of NCBI NO: 16305115 NR Description: 15kD beta zein [Zea mays]
  misc_feature (53)..(230): Homolog of NCBI NO: 419803 NR Description: zein protein - maize >gi|168705|gb|AAA33543.1|
  misc_feature (53)..(230): Homolog of NCBI NO: 16305115 NR Description: 15kD beta zein [Zea mays]
  misc_feature (53)..(230): Homolog of NCBI NO: 168664 NR Description: zein protein precursor
  misc_feature (53)..(230): Homolog of NCBI NO: 16305115 NR Description: 15kD beta zein [Zea mays]
  misc_feature (53)..(230): Homolog of NCBI NO: 168664 NR Description: zein protein precursor
  misc_feature (53)..(230): Homolog of NCBI NO: 100552 NR Description: beta-coixin, 17K, precursor - Job's tears
  misc_feature (53)..(230): Homolog of NCBI NO: 141616 NR Description: ZEIN-BETA PRECURSOR (16 KD) (ZEIN 2) (CLONE 15A3)
  misc_feature (53)..(230): Homolog of NCBI NO: 168664 NR Description: zein protein precursor
  misc_feature (53)..(230): Homolog of NCBI NO: 419803 NR Description: zein protein - maize >gi|168705|gb|AAA33543.1|
  misc_feature (53)..(230): Homolog of NCBI NO: 16305115 NR Description: 15kD beta zein [Zea mays]
  misc_feature (53)..(230): Homolog of NCBI NO: 100552 NR Description: beta-coixin, 17K, precursor - Job's tears
  misc_feature (53)..(230): Homolog of NCBI NO: 141616 NR Description: ZEIN-BETA PRECURSOR (16 KD) (ZEIN 2) (CLONE 15A3)
  misc_feature (53)..(230): Homolog of NCBI NO: 419803 NR Description: zein protein - maize >gi|168705|gb|AAA33543.1|
  misc_feature (53)..(230): Homolog of NCBI NO: 100552 NR Description: beta-coixin, 17K, precursor - Job's tears
  misc_feature (53)..(230): Homolog of NCBI NO: 141616 NR Description: ZEIN-BETA PRECURSOR (16 KD) (ZEIN 2) (CLONE 15A3)
  misc_feature (53)..(230): Homolog of NCBI NO: 419803 NR Description: zein protein - maize >gi|168705|gb|AAA33543.1|
  misc_feature (53)..(230): Homolog of NCBI NO: 168664 NR Description: zein protein precursor
  misc_feature (53)..(230): Homolog of NCBI NO: 141616 NR Description: ZEIN-BETA PRECURSOR (16 KD) (ZEIN 2) (CLONE 15A3)
  misc_feature (53)..(230): Homolog of NCBI NO: 100552 NR Description: beta-coixin, 17K, precursor - Job's tears

SEQ ID NO: 15590 - protein, 222 aa, Zea mays subsp. mays; identical to SEQ ID NO: 14875
  peptide (1)..(222): Ceres Seq. ID no. 12595475
  misc_feature (98)..(200): Pfam Name: Protease inhibitor/seed storage/LTP family Pfam Description: Protease inhibitor/seed storage/LTP family
  misc_feature (98)..(200): Pfam Name: Protease inhibitor/seed storage/LTP family Pfam Description: Protease inhibitor/seed storage/LTP family
  misc_feature (98)..(200): Pfam Name: Protease inhibitor/seed storage/LTP family Pfam Description: Protease inhibitor/seed storage/LTP family
  misc_feature (98)..(200): Pfam Name: Protease inhibitor/seed storage/LTP family Pfam Description: Protease inhibitor/seed storage/LTP family
  misc_feature (45)..(222): Homolog of NCBI NO: 419803 NR Description: zein protein - maize >gi|168705|gb|AAA33543.1|
  misc_feature (45)..(222): Homolog of NCBI NO: 168664 NR Description: zein protein precursor
  misc_feature (45)..(222): Homolog of NCBI NO: 16305115 NR Description: 15kD beta zein [Zea mays]
  misc_feature (45)..(222): Homolog of NCBI NO: 168664 NR Description: zein protein precursor
  misc_feature (45)..(222): Homolog of NCBI NO: 16305115 NR Description: 15kD beta zein [Zea mays]
  misc_feature (45)..(222): Homolog of NCBI NO: 168664 NR Description: zein protein precursor
  misc_feature (45)..(222): Homolog of NCBI NO: 100552 NR Description: beta-coixin, 17K, precursor - Job's tears
  misc_feature (45)..(222): Homolog of NCBI NO: 141616 NR Description: ZEIN-BETA PRECURSOR (16 KD) (ZEIN 2) (CLONE 15A3)
  misc_feature (45)..(222): Homolog of NCBI NO: 168664 NR Description: zein protein precursor
  misc_feature (45)..(222): Homolog of NCBI NO: 419803 NR Description: zein protein - maize >gi|168705|gb|AAA33543.1|
  misc_feature (45)..(222): Homolog of NCBI NO: 16305115 NR Description: 15kD beta zein [Zea mays]
  misc_feature (45)..(222): Homolog of NCBI NO: 100552 NR Description: beta-coixin, 17K, precursor - Job's tears
  misc_feature (45)..(222): Homolog of NCBI NO: 141616 NR Description: ZEIN-BETA PRECURSOR (16 KD) (ZEIN 2) (CLONE 15A3)
  misc_feature (45)..(222): Homolog of NCBI NO: 419803 NR Description: zein protein - maize >gi|168705|gb|AAA33543.1|
  misc_feature (45)..(222): Homolog of NCBI NO: 100552 NR Description: beta-coixin, 17K, precursor - Job's tears
  misc_feature (45)..(222): Homolog of NCBI NO: 141616 NR Description: ZEIN-BETA PRECURSOR (16 KD) (ZEIN 2) (CLONE 15A3)
  misc_feature (45)..(222): Homolog of NCBI NO: 419803 NR Description: zein protein - maize >gi|168705|gb|AAA33543.1|
  misc_feature (45)..(222): Homolog of NCBI NO: 16305115 NR Description: 15kD beta zein [Zea mays]
  misc_feature (45)..(222): Homolog of NCBI NO: 141616 NR Description: ZEIN-BETA PRECURSOR (16 KD) (ZEIN 2) (CLONE 15A3)
  misc_feature (45)..(222): Homolog of NCBI NO: 100552 NR Description: beta-coixin, 17K, precursor - Job's tears

SEQ ID NO: 15591 - protein, 178 aa, Zea mays subsp. mays; identical to SEQ ID NO: 14876
  peptide (1)..(178): Ceres Seq. ID no. 12595476
  misc_feature (54)..(156): Pfam Name: Protease inhibitor/seed storage/LTP family Pfam Description: Protease inhibitor/seed storage/LTP family
  misc_feature (54)..(156): Pfam Name: Protease inhibitor/seed storage/LTP family Pfam Description: Protease inhibitor/seed storage/LTP family
  misc_feature (54)..(156): Pfam Name: Protease inhibitor/seed storage/LTP family Pfam Description: Protease inhibitor/seed storage/LTP family
  misc_feature (54)..(156): Pfam Name: Protease inhibitor/seed storage/LTP family Pfam Description: Protease inhibitor/seed storage/LTP family
  misc_feature (1)..(178): Homolog of NCBI NO: 16305115 NR Description: 15kD beta zein [Zea mays]
  misc_feature (1)..(178): Homolog of NCBI NO: 419803 NR Description: zein protein - maize >gi|168705|gb|AAA33543.1|
  misc_feature (1)..(178): Homolog of NCBI NO: 16305115 NR Description: 15kD beta zein [Zea mays]
  misc_feature (1)..(178): Homolog of NCBI NO: 168664 NR Description: zein protein precursor
  misc_feature (1)..(178): Homolog of NCBI NO: 16305115 NR Description: 15kD beta zein [Zea mays]
  misc_feature (1)..(178): Homolog of NCBI NO: 168664 NR Description: zein protein precursor
  misc_feature (1)..(178): Homolog of NCBI NO: 100552 NR Description: beta-coixin, 17K, precursor - Job's tears
  misc_feature (1)..(178): Homolog of NCBI NO: 141616 NR Description: ZEIN-BETA PRECURSOR (16 KD) (ZEIN 2) (CLONE 15A3)
  misc_feature (1)..(178): Homolog of NCBI NO: 168664 NR Description: zein protein precursor
  misc_feature (1)..(178): Homolog of NCBI NO: 419803 NR Description: zein protein - maize >gi|168705|gb|AAA33543.1|
  misc_feature (1)..(178): Homolog of NCBI NO: 16305115 NR Description: 15kD beta zein [Zea mays]
  misc_feature (1)..(178): Homolog of NCBI NO: 100552 NR Description: beta-coixin, 17K, precursor - Job's tears
  misc_feature (1)..(178): Homolog of NCBI NO: 141616 NR Description: ZEIN-BETA PRECURSOR (16 KD) (ZEIN 2) (CLONE 15A3)
  misc_feature (1)..(178): Homolog of NCBI NO: 419803 NR Description: zein protein - maize >gi|168705|gb|AAA33543.1|
  misc_feature (1)..(178): Homolog of NCBI NO: 100552 NR Description: beta-coixin, 17K, precursor - Job's tears
  misc_feature (1)..(178): Homolog of NCBI NO: 141616 NR Description: ZEIN-BETA PRECURSOR (16 KD) (ZEIN 2) (CLONE 15A3)
  misc_feature (1)..(178): Homolog of NCBI NO: 419803 NR Description: zein protein - maize >gi|168705|gb|AAA33543.1|
  misc_feature (1)..(178): Homolog of NCBI NO: 168664 NR Description: zein protein precursor
  misc_feature (1)..(178): Homolog of NCBI NO: 141616 NR Description: ZEIN-BETA PRECURSOR (16 KD) (ZEIN 2) (CLONE 15A3)
  misc_feature (1)..(178): Homolog of NCBI NO: 100552 NR Description: beta-coixin, 17K, precursor - Job's tears

SEQ ID NO: 15592 - DNA, 610 bp, Zea mays subsp. mays; identical to SEQ ID NO: 6241
  misc_feature (1)..(610): Ceres Seq. ID no. 12594280
  misc_feature: MA Experiment ID: 108535 Result: Down-regulated in Transcription
  misc_feature: MA Experiment 108535 PARAMETER Experiment Name: Zm_Meristem_P Parameter: Age (day) Value: 8
  misc_feature: MA Experiment 108535 PARAMETER Experiment Name: Zm_Meristem_P Parameter: Organism Value: Zea mays
  misc_feature: MA Experiment 108535 PARAMETER Experiment Name: Zm_Meristem_P Parameter: Plant Line Value: 35A19
  misc_feature: MA Experiment 108535 PARAMETER Experiment Name: Zm_Meristem_P Parameter: Tissue Value: Root Meristem vs. Above Root Meristem
  misc_feature: MA Experiment ID: 108544 Result: Up-regulated in Transcription
  misc_feature: MA Experiment ID: 20000535 Result: Down-regulated in Transcription
  misc_feature: MA Experiment 20000535 PARAMETER Experiment Name: Zm_Hybrid_Seed_Dev_P Parameter: DAP Value: 30 vs. 12
  misc_feature: MA Experiment 20000535 PARAMETER Experiment Name: Zm_Hybrid_Seed_Dev_P Parameter: Organism Value: Zea mays
  misc_feature: MA Experiment 20000535 PARAMETER Experiment Name: Zm_Hybrid_Seed_Dev_P Parameter: Plant Line Value: 35A19
  misc_feature: MA Experiment 20000535 PARAMETER Experiment Name: Zm_Hybrid_Seed_Dev_P Parameter: Tissue Value: Embryo vs. Unfert Floret

SEQ ID NO: 15593 - protein, 115 aa, Zea mays subsp. mays; identical to SEQ ID NO: 6242
  peptide (1)..(115): Ceres Seq. ID no. 12594281
  misc_feature (10)..(106): Pfam Name: Protein of unknown function (DUF423) Pfam Description: Protein of unknown function (DUF423)
  misc_feature (10)..(106): Pfam Name: Protein of unknown function (DUF423) Pfam Description: Protein of unknown function (DUF423)
  misc_feature (2)..(115): Homolog of NCBI NO: 40538985 NR Description: expressed protein [Oryza sativa (japonica
  misc_feature (1)..(106): Homolog of NCBI NO: 7963702 NR Description: unknown [Agropyron cristatum]
  misc_feature (1)..(106): Homolog of NCBI NO: 7963659 NR Description: unknown [Leymus cinereus]
  misc_feature (1)..(115): Homolog of NCBI NO: 18395895 NR Description: expressed protein; protein id: At2g04900.1, by cDNA: 34035. [Arabidopsis thaliana] expressed protein [Arabidopsis thaliana]
  misc_feature (6)..(115): Homolog of NCBI NO: 17065460 NR Description: Unknown protein [Arabidopsis thaliana] unknown protein [Arabidopsis thaliana]
  misc_feature (1)..(106): Homolog of NCBI NO: 7963702 NR Description: unknown [Agropyron cristatum]
  misc_feature (1)..(115): Homolog of NCBI NO: 18395895 NR Description: expressed protein; protein id: At2g04900.1, by cDNA: 34035. [Arabidopsis thaliana] expressed protein [Arabidopsis thaliana]
  misc_feature (14)..(93): Homolog of NCBI NO: 7963689 NR Description: unknown [Hordeum vulgare]
  misc_feature (19)..(115): Homolog of NCBI NO: 25411133 NR Description: hypothetical protein At2g04900 [imported] -
  misc_feature (8)..(96): Homolog of NCBI NO: 7963697 NR Description: unknown [Haynaldia villosa]
  misc_feature (8)..(100): Homolog of NCBI NO: 7963694 NR Description: unknown [Psathyrostachys juncea]
  misc_feature (8)..(100): Homolog of NCBI NO: 7963699 NR Description: unknown [Leymus triticoides]
  misc_feature (6)..(115): Homolog of NCBI NO: 17065460 NR Description: Unknown protein [Arabidopsis thaliana] unknown protein [Arabidopsis thaliana]
  misc_feature (1)..(106): Homolog of NCBI NO: 7963659 NR Description: unknown [Leymus cinereus]
  misc_feature (2)..(115): Homolog of NCBI NO: 40538985 NR Description: expressed protein [Oryza sativa (japonica
  misc_feature (8)..(100): Homolog of NCBI NO: 7963699 NR Description: unknown [Leymus triticoides]
  misc_feature (8)..(100): Homolog of NCBI NO: 7963694 NR Description: unknown [Psathyrostachys juncea]
  misc_feature (8)..(96): Homolog of NCBI NO: 7963697 NR Description: unknown [Haynaldia villosa]
  misc_feature (19)..(115): Homolog of NCBI NO: 25411133 NR Description: hypothetical protein At2g04900 [imported] -
  misc_feature (14)..(93): Homolog of NCBI NO: 7963689 NR Description: unknown [Hordeum vulgare]

SEQ ID NO: 15594 - protein, 108 aa, Zea mays subsp. mays; identical to SEQ ID NO: 6243
  peptide (1)..(108): Ceres Seq. ID no. 12594282
  misc_feature (3)..(99): Pfam Name: Protein of unknown function (DUF423) Pfam Description: Protein of unknown function (DUF423)
  misc_feature (3)..(99): Pfam Name: Protein of unknown function (DUF423) Pfam Description: Protein of unknown function (DUF423)
  misc_feature (1)..(108): Homolog of NCBI NO: 40538985 NR Description: expressed protein [Oryza sativa (japonica
  misc_feature (1)..(99): Homolog of NCBI NO: 7963702 NR Description: unknown [Agropyron cristatum]
  misc_feature (1)..(99): Homolog of NCBI NO: 7963659 NR Description: unknown [Leymus cinereus]
  misc_feature (1)..(108): Homolog of NCBI NO: 18395895 NR Description: expressed protein; protein id: At2g04900.1, by cDNA: 34035. [Arabidopsis thaliana] expressed protein [Arabidopsis thaliana]
  misc_feature (1)..(108): Homolog of NCBI NO: 17065460 NR Description: Unknown protein [Arabidopsis thaliana] unknown protein [Arabidopsis thaliana]
  misc_feature (1)..(99): Homolog of NCBI NO: 7963702 NR Description: unknown [Agropyron cristatum]
  misc_feature (1)..(108): Homolog of NCBI NO: 18395895 NR Description: expressed protein; protein id: At2g04900.1, by cDNA: 34035. [Arabidopsis thaliana] expressed protein [Arabidopsis thaliana]
  misc_feature (7)..(86): Homolog of NCBI NO: 7963689 NR Description: unknown [Hordeum vulgare]
  misc_feature (12)..(108): Homolog of NCBI NO: 25411133 NR Description: hypothetical protein At2g04900 [imported] -
  misc_feature (1)..(89): Homolog of NCBI NO: 7963697 NR Description: unknown [Haynaldia villosa]
  misc_feature (1)..(93): Homolog of NCBI NO: 7963694 NR Description: unknown [Psathyrostachys juncea]
  misc_feature (1)..(93): Homolog of NCBI NO: 7963699 NR Description: unknown [Leymus triticoides]
  misc_feature (1)..(108): Homolog of NCBI NO: 17065460 NR Description: Unknown protein [Arabidopsis thaliana] unknown protein [Arabidopsis thaliana]
  misc_feature (1)..(99): Homolog of NCBI NO: 7963659 NR Description: unknown [Leymus cinereus]
  misc_feature (1)..(108): Homolog of NCBI NO: 40538985 NR Description: expressed protein [Oryza sativa (japonica
  misc_feature (1)..(93): Homolog of NCBI NO: 7963699 NR Description: unknown [Leymus triticoides]
  misc_feature (1)..(93): Homolog of NCBI NO: 7963694 NR Description: unknown [Psathyrostachys juncea]
  misc_feature (1)..(89): Homolog of NCBI NO: 7963697 NR Description: unknown [Haynaldia villosa]
  misc_feature (12)..(108): Homolog of NCBI NO: 25411133 NR Description: hypothetical protein At2g04900 [imported] -
  misc_feature (7)..(86): Homolog of NCBI NO: 7963689 NR Description: unknown [Hordeum vulgare]

SEQ ID NO: 15595 - protein, 85 aa, Zea mays subsp. mays; identical to SEQ ID NO: 6244
  peptide (1)..(85): Ceres Seq. ID no. 12594283
  misc_feature (1)..(76): Pfam Name: Protein of unknown function (DUF423) Pfam Description: Protein of unknown function (DUF423)
  misc_feature (1)..(76): Pfam Name: Protein of unknown function (DUF423) Pfam Description: Protein of unknown function (DUF423)
  misc_feature (1)..(85): Homolog of NCBI NO: 40538985 NR Description: expressed protein [Oryza sativa (japonica
  misc_feature (1)..(76): Homolog of NCBI NO: 7963702 NR Description: unknown [Agropyron cristatum]
  misc_feature (1)..(76): Homolog of NCBI NO: 7963659 NR Description: unknown [Leymus cinereus]
  misc_feature (1)..(85): Homolog of NCBI NO: 18395895 NR Description: expressed protein; protein id: At2g04900.1, by cDNA: 34035. [Arabidopsis thaliana] expressed protein [Arabidopsis thaliana]
  misc_feature (1)..(85): Homolog of NCBI NO: 17065460 NR Description: Unknown protein [Arabidopsis thaliana] unknown protein [Arabidopsis thaliana]
  misc_feature (1)..(76): Homolog of NCBI NO: 7963702 NR Description: unknown [Agropyron cristatum]
  misc_feature (1)..(85): Homolog of NCBI NO: 18395895 NR Description: expressed protein; protein id: At2g04900.1, by cDNA: 34035. [Arabidopsis thaliana] expressed protein [Arabidopsis thaliana]
  misc_feature (1)..(63): Homolog of NCBI NO: 7963689 NR Description: unknown [Hordeum vulgare]
  misc_feature (1)..(85): Homolog of NCBI NO: 25411133 NR Description: hypothetical protein At2g04900 [imported] -
  misc_feature (1)..(66): Homolog of NCBI NO: 7963697 NR Description: unknown [Haynaldia villosa]
  misc_feature (1)..(70): Homolog of NCBI NO: 7963694 NR Description: unknown [Psathyrostachys juncea]
  misc_feature (1)..(70): Homolog of NCBI NO: 7963699 NR Description: unknown [Leymus triticoides]
  misc_feature (1)..(85): Homolog of NCBI NO: 17065460 NR Description: Unknown protein [Arabidopsis thaliana] unknown protein [Arabidopsis thaliana]
  misc_feature (1)..(76): Homolog of NCBI NO: 7963659 NR Description: unknown [Leymus cinereus]
  misc_feature (1)..(85): Homolog of NCBI NO: 40538985 NR Description: expressed protein [Oryza sativa (japonica
  misc_feature (1)..(70): Homolog of NCBI NO: 7963699 NR Description: unknown [Leymus triticoides]
  misc_feature (1)..(70): Homolog of NCBI NO: 7963694 NR Description: unknown [Psathyrostachys juncea]
  misc_feature (1)..(66): Homolog of NCBI NO: 7963697 NR Description: unknown [Haynaldia villosa]
  misc_feature (1)..(85): Homolog of NCBI NO: 25411133 NR Description: hypothetical protein At2g04900 [imported] -
  misc_feature (1)..(63): Homolog of NCBI NO: 7963689 NR Description: unknown [Hordeum vulgare]

SEQ ID NO: 15596 - DNA, 1232 bp, Zea mays subsp. mays; identical to SEQ ID NO: 2188
  misc_feature (1)..(1232): Ceres Seq. ID no. 13635672
  misc_feature: MA Experiment ID: 108523 Result: Up-regulated in Transcription
  misc_feature: MA Experiment 108523 PARAMETER Experiment Name: Zm_42deg_Heat_P Parameter: Age (day) Value: 8
  misc_feature: MA Experiment 108523 PARAMETER Experiment Name: Zm_42deg_Heat_P Parameter: Organism Value: Zea mays
  misc_feature: MA Experiment 108523 PARAMETER Experiment Name: Zm_42deg_Heat_P Parameter: Plant Line Value: 35A19
  misc_feature: MA Experiment 108523 PARAMETER Experiment Name: Zm_42deg_Heat_P Parameter: Temperature (deg C) Value: 42 vs. 22
  misc_feature: MA Experiment 108523 PARAMETER Experiment Name: Zm_42deg_Heat_P Parameter: Timepoint (hr) Value: 6
  misc_feature: MA Experiment 108523 PARAMETER Experiment Name: Zm_42deg_Heat_P Parameter: Tissue Value: Aerial
  misc_feature: MA Experiment ID: 108527 Result: Up-regulated in Transcription
  misc_feature: MA Experiment 108527 PARAMETER Experiment Name: Zm_5mM_NO_P Parameter: Age (day) Value: 8
  misc_feature: MA Experiment 108527 PARAMETER Experiment Name: Zm_5mM_NO_P Parameter: Organism Value: Zea mays
  misc_feature: MA Experiment 108527 PARAMETER Experiment Name: Zm_5mM_NO_P Parameter: Plant Line Value: 35A19
  misc_feature: MA Experiment 108527 PARAMETER Experiment Name: Zm_5mM_NO_P Parameter: Timepoint (hr) Value: 6
  misc_feature: MA Experiment 108527 PARAMETER Experiment Name: Zm_5mM_NO_P Parameter: Tissue Value: Aerial
  misc_feature: MA Experiment 108527 PARAMETER Experiment Name: Zm_5mM_NO_P Parameter: Treatment Value: 5mM NO vs. No Treatment
  misc_feature: MA Experiment ID: 108543 Result: Down-regulated in Transcription

SEQ ID NO: 15597 - protein, 247 aa, Zea mays subsp. mays; identical to SEQ ID NO: 2189
  peptide (1)..(247): Ceres Seq. ID no. 15220349
  misc_feature (55)..(86): Homolog of NCBI NO: 34898416 NR Description: ESTs AU058081(E30812),AU058365(E50679), correspond to a region of the predicted gene.~Similar to Spinacia
  misc_feature (55)..(86): Homolog of NCBI NO: 34898458 NR Description: ESTs AU058081(E3082),AU075427(E30384) correspond a region of the predicted gene.~Similar to Spinacia oleracea
  misc_feature (55)..(86): Homolog of NCBI NO: 1709761 NR Description: Proteasome subunit alpha type 4 (20S proteasome
  misc_feature (55)..(86): Homolog of NCBI NO: 15233268 NR Description: 20S proteasome alpha subunit C (PAC1) thaliana] >gi|12643237|sp|O81148|PSA4_ARATH Proteasome subunit type 4 (20S proteasome alpha subunit C) (Proteasome 27 kDa
  misc_feature (55)..(86): Homolog of NCBI NO: 2511584 NR Description: multicatalytic endopeptidase [Arabidopsis
  misc_feature (55)..(86): Homolog of NCBI NO: 12229904 NR Description: Proteasome subunit alpha type 4 (20S proteasome
  misc_feature (63)..(88): Homolog of NCBI NO: 6984140 NR Description: proteasome 27 kDa subunit [Euphorbia esula]
  misc_feature (55)..(86): Homolog of NCBI NO: 23394356 NR Description: proteasome subunit [Phytophthora infestans]
  misc_feature (55)..(88): Homolog of NCBI NO: 32410633 NR Description: hypothetical protein [Neurospora crassa]
  misc_feature (55)..(88): Homolog of NCBI NO: 40744887 NR Description: conserved hypothetical protein [Aspergillus
  misc_feature (55)..(86): Homolog of NCBI NO: 34898416 NR Description: ESTs AU058081(E30812),AU058365(E50679), correspond to a region of the predicted gene.~Similar to Spinacia
  misc_feature (55)..(86): Homolog of NCBI NO: 34898458 NR Description: ESTs AU058081(E3082),AU075427(E30384) correspond a region of the predicted gene.~Similar to Spinacia oleracea
  misc_feature (55)..(86): Homolog of NCBI NO: 1709761 NR Description: Proteasome subunit alpha type 4 (20S proteasome
  misc_feature (55)..(86): Homolog of NCBI NO: 15233268 NR Description: 20S proteasome alpha subunit C (PAC1) thaliana] >gi|12643237|sp|O81148|PSA4_ARATH Proteasome subunit type 4 (20S proteasome alpha subunit C) (Proteasome 27 kDa
  misc_feature (55)..(86): Homolog of NCBI NO: 2511584 NR Description: multicatalytic endopeptidase [Arabidopsis
  misc_feature (55)..(86): Homolog of NCBI NO: 12229904 NR Description: Proteasome subunit alpha type 4 (20S proteasome
  misc_feature (63)..(88): Homolog of NCBI NO: 6984140 NR Description: proteasome 27 kDa subunit [Euphorbia esula]
  misc_feature (55)..(86): Homolog of NCBI NO: 23394356 NR Description: proteasome subunit [Phytophthora infestans]
  misc_feature (55)..(88): Homolog of NCBI NO: 32410633 NR Description: hypothetical protein [Neurospora crassa]
  misc_feature (55)..(88): Homolog of NCBI NO: 40744887 NR Description: conserved hypothetical protein [Aspergillus
  misc_feature (86)..(86): Xaa is any aa, unknown or other

SEQ ID NO: 15598 - protein, 246 aa, Zea mays subsp. mays; identical to SEQ ID NO: 2190
  peptide (1)..(246): Ceres Seq. ID no. 15220350
  misc_feature (29)..(211): Pfam Name: Proteasome A-type and B-type Pfam Description: Proteasome A-type and B-type
  misc_feature (29)..(211): Pfam Name: Proteasome A-type and B-type Pfam Description: Proteasome A-type and B-type
  misc_feature (29)..(246): Homolog of NCBI NO: 34898416 NR Description: ESTs AU058081(E30812),AU058365(E50679), correspond to a region of the predicted gene.~Similar to Spinacia
  misc_feature (29)..(246): Homolog of NCBI NO: 34898458 NR Description: ESTs AU058081(E3082),AU075427(E30384) correspond a region of the predicted gene.~Similar to Spinacia oleracea
  misc_feature (29)..(245): Homolog of NCBI NO: 1709761 NR Description: Proteasome subunit alpha type 4 (20S proteasome
  misc_feature (29)..(245): Homolog of NCBI NO: 15233268 NR Description: 20S proteasome alpha subunit C (PAC1) thaliana] >gi|12643237|sp|O81148|PSA4_ARATH Proteasome subunit type 4 (20S proteasome alpha subunit C) (Proteasome 27 kDa
  misc_feature (29)..(245): Homolog of NCBI NO: 2511584 NR Description: multicatalytic endopeptidase [Arabidopsis
  misc_feature (29)..(246): Homolog of NCBI NO: 34898458 NR Description: ESTs AU058081(E3082),AU075427(E30384) correspond a region of the predicted gene.~Similar to Spinacia oleracea
  misc_feature (29)..(245): Homolog of NCBI NO: 15233268 NR Description: 20S proteasome alpha subunit C (PAC1) thaliana] >gi|12643237|sp|O81148|PSA4_ARATH Proteasome subunit type 4 (20S proteasome alpha subunit C) (Proteasome 27 kDa
  misc_feature (29)..(241): Homolog of NCBI NO: 32410633 NR Description: hypothetical protein [Neurospora crassa]
  misc_feature (29)..(237): Homolog of NCBI NO: 23394356 NR Description: proteasome subunit [Phytophthora infestans]
  misc_feature (55)..(246): Homolog of NCBI NO: 14039743 NR Description: 20S proteasome subunit alpha 3 [Lolium perenne]
  misc_feature (29)..(246): Homolog of NCBI NO: 6984140 NR Description: proteasome 27 kDa subunit [Euphorbia esula]
  misc_feature (29)..(245): Homolog of NCBI NO: 12229904 NR Description: Proteasome subunit alpha type 4 (20S proteasome
  misc_feature (29)..(245): Homolog of NCBI NO: 2511584 NR Description: multicatalytic endopeptidase [Arabidopsis
  misc_feature (29)..(245): Homolog of NCBI NO: 1709761 NR Description: Proteasome subunit alpha type 4 (20S proteasome
  misc_feature (29)..(246): Homolog of NCBI NO: 34898416 NR Description: ESTs AU058081(E30812),AU058365(E50679), correspond to a region of the predicted gene.~Similar to Spinacia
  misc_feature (29)..(245): Homolog of NCBI NO: 12229904 NR Description: Proteasome subunit alpha type 4 (20S proteasome
  misc_feature (29)..(246): Homolog of NCBI NO: 6984140 NR Description: proteasome 27 kDa subunit [Euphorbia esula]
  misc_feature (55)..(246): Homolog of NCBI NO: 14039743 NR Description: 20S proteasome subunit alpha 3 [Lolium perenne]
  misc_feature (29)..(237): Homolog of NCBI NO: 23394356 NR Description: proteasome subunit [Phytophthora infestans]
  misc_feature (29)..(241): Homolog of NCBI NO: 32410633 NR Description: hypothetical protein [Neurospora crassa]
  misc_feature (28)..(28): Xaa is any aa, unknown or other

SEQ ID NO: 15599 - protein, 193 aa, Zea mays subsp. mays; identical to SEQ ID NO: 2191
  peptide (1)..(193): Ceres Seq. ID no. 15220351
  misc_feature (1)..(32): Homolog of NCBI NO: 34898416 NR Description: ESTs AU058081(E30812),AU058365(E50679), correspond to a region of the predicted gene.~Similar to Spinacia
  misc_feature (1)..(32): Homolog of NCBI NO: 34898458 NR Description: ESTs AU058081(E3082),AU075427(E30384) correspond a region of the predicted gene.~Similar to Spinacia oleracea
  misc_feature (1)..(32): Homolog of NCBI NO: 1709761 NR Description: Proteasome subunit alpha type 4 (20S proteasome
  misc_feature (1)..(32): Homolog of NCBI NO: 15233268 NR Description: 20S proteasome alpha subunit C (PAC1) thaliana] >gi|12643237|sp|O81148|PSA4_ARATH Proteasome subunit type 4 (20S proteasome alpha subunit C) (Proteasome 27 kDa
  misc_feature (1)..(32): Homolog of NCBI NO: 2511584 NR Description: multicatalytic endopeptidase [Arabidopsis
  misc_feature (1)..(32): Homolog of NCBI NO: 12229904 NR Description: Proteasome subunit alpha type 4 (20S proteasome
  misc_feature (9)..(34): Homolog of NCBI NO: 6984140 NR Description: proteasome 27 kDa subunit [Euphorbia esula]
  misc_feature (1)..(32): Homolog of NCBI NO: 23394356 NR Description: proteasome subunit [Phytophthora infestans]
  misc_feature (1)..(34): Homolog of NCBI NO: 32410633 NR Description: hypothetical protein [Neurospora crassa]
  misc_feature (1)..(34): Homolog of NCBI NO: 40744887 NR Description: conserved hypothetical protein [Aspergillus
  misc_feature (1)..(32): Homolog of NCBI NO: 34898416 NR Description: ESTs AU058081(E30812),AU058365(E50679), correspond to a region of the predicted gene.~Similar to Spinacia
  misc_feature (1)..(32): Homolog of NCBI NO: 34898458 NR Description: ESTs AU058081(E3082),AU075427(E30384) correspond a region of the predicted gene.~Similar to Spinacia oleracea
  misc_feature (1)..(32): Homolog of NCBI NO: 1709761 NR Description: Proteasome subunit alpha type 4 (20S proteasome
  misc_feature (1)..(32): Homolog of NCBI NO: 15233268 NR Description: 20S proteasome alpha subunit C (PAC1) thaliana] >gi|12643237|sp|O81148|PSA4_ARATH Proteasome subunit type 4 (20S proteasome alpha subunit C) (Proteasome 27 kDa
  misc_feature (1)..(32): Homolog of NCBI NO: 2511584 NR Description: multicatalytic endopeptidase [Arabidopsis
  misc_feature (1)..(32): Homolog of NCBI NO: 12229904 NR Description: Proteasome subunit alpha type 4 (20S proteasome
  misc_feature (9)..(34): Homolog of NCBI NO: 6984140 NR Description: proteasome 27 kDa subunit [Euphorbia esula]
  misc_feature (1)..(32): Homolog of NCBI NO: 23394356 NR Description: proteasome subunit [Phytophthora infestans]
  misc_feature (1)..(34): Homolog of NCBI NO: 32410633 NR Description: hypothetical protein [Neurospora crassa]
  misc_feature (1)..(34): Homolog of NCBI NO: 40744887 NR Description: conserved hypothetical protein [Aspergillus
  misc_feature (32)..(32): Xaa is any aa, unknown or other

SEQ ID NO: 15600 - DNA, 882 bp, Zea mays subsp. mays; identical to SEQ ID NO: 10553
  misc_feature (1)..(882): Ceres Seq. ID no. 12595582
  misc_feature: MA Experiment ID: 108528 Result: Down-regulated in Transcription
  misc_feature: MA Experiment 108528 PARAMETER Experiment Name: Zm_Imbibed_Seeds_P Parameter: Age (day) Value: 5 vs. 2
  misc_feature: MA Experiment 108528 PARAMETER Experiment Name: Zm_Imbibed_Seeds_P Parameter: Organism Value: Zea mays
  misc_feature: MA Experiment 108528 PARAMETER Experiment Name: Zm_Imbibed_Seeds_P Parameter: Plant Line Value: 35A19
  misc_feature: MA Experiment 108528 PARAMETER Experiment Name: Zm_Imbibed_Seeds_P Parameter: Tissue Value: Aerial vs. Embryo
  misc_feature: MA Experiment ID: 108529 Result: Down-regulated in Transcription
  misc_feature: MA Experiment 108529 PARAMETER Experiment Name: Zm_Imbibed_Seeds_P Parameter: Age (day) Value: 5 vs. 2
  misc_feature: MA Experiment 108529 PARAMETER Experiment Name: Zm_Imbibed_Seeds_P Parameter: Organism Value: Zea mays
  misc_feature: MA Experiment 108529 PARAMETER Experiment Name: Zm_Imbibed_Seeds_P Parameter: Plant Line Value: 35A19
  misc_feature: MA Experiment 108529 PARAMETER Experiment Name: Zm_Imbibed_Seeds_P Parameter: Tissue Value: Roots vs. Embryo
  misc_feature: MA Experiment ID: 108530 Result: Down-regulated in Transcription
  misc_feature: MA Experiment 108530 PARAMETER Experiment Name: Zm_Imbibed_Seeds_P Parameter: Age (day) Value: 6 vs. 2
  misc_feature: MA Experiment 108530 PARAMETER Experiment Name: Zm_Imbibed_Seeds_P Parameter: Organism Value: Zea mays
  misc_feature: MA Experiment 108530 PARAMETER Experiment Name: Zm_Imbibed_Seeds_P Parameter: Plant Line Value: 35A19
  misc_feature: MA Experiment 108530 PARAMETER Experiment Name: Zm_Imbibed_Seeds_P Parameter: Tissue Value: Aerial vs. Embryo
  misc_feature: MA Experiment ID: 108543 Result: Down-regulated in Transcription
  misc_feature: MA Experiment ID: 108544 Result: Down-regulated in Transcription
  misc_feature: MA Experiment ID: 108545 Result: Down-regulated in Transcription
  misc_feature: MA Experiment 108545 PARAMETER Experiment Name: Zm_Imbibed_Seeds_P Parameter: Age (day) Value: 3 vs. 2
  misc_feature: MA Experiment 108545 PARAMETER Experiment Name: Zm_Imbibed_Seeds_P Parameter: Organism Value: Zea mays
  misc_feature: MA Experiment 108545 PARAMETER Experiment Name: Zm_Imbibed_Seeds_P Parameter: Plant Line Value: 35A19
  misc_feature: MA Experiment 108545 PARAMETER Experiment Name: Zm_Imbibed_Seeds_P Parameter: Tissue Value: Aerial vs. Embryo
  misc_feature: MA Experiment ID: 108546 Result: Down-regulated in Transcription
  misc_feature: MA Experiment 108546 PARAMETER Experiment Name: Zm_Imbibed_Seeds_P Parameter: Age (day) Value: 3 vs. 2
  misc_feature: MA Experiment 108546 PARAMETER Experiment Name: Zm_Imbibed_Seeds_P Parameter: Organism Value: Zea mays
  misc_feature: MA Experiment 108546 PARAMETER Experiment Name: Zm_Imbibed_Seeds_P Parameter: Plant Line Value: 35A19
  misc_feature: MA Experiment 108546 PARAMETER Experiment Name: Zm_Imbibed_Seeds_P Parameter: Tissue Value: Roots vs. Embryo
  misc_feature: MA Experiment ID: 108547 Result: Down-regulated in Transcription
  misc_feature: MA Experiment 108547 PARAMETER Experiment Name: Zm_Imbibed_Seeds_P Parameter: Age (day) Value: 4 vs. 2
  misc_feature: MA Experiment 108547 PARAMETER Experiment Name: Zm_Imbibed_Seeds_P Parameter: Organism Value: Zea mays
  misc_feature: MA Experiment 108547 PARAMETER Experiment Name: Zm_Imbibed_Seeds_P Parameter: Plant Line Value: 35A19
  misc_feature: MA Experiment 108547 PARAMETER Experiment Name: Zm_Imbibed_Seeds_P Parameter: Tissue Value: Aerial vs. Embryo
  misc_feature: MA Experiment ID: 108688 Result: Down-regulated in Transcription
  misc_feature: MA Experiment 108688 PARAMETER Experiment Name: Zm_Embryos-Flowers__P Parameter: Tissue Value: Immature Flowers vs. Aerial+
  misc_feature: MA Experiment ID: 20000535 Result: Up-regulated in Transcription
  misc_feature: MA Experiment 20000535 PARAMETER Experiment Name: Zm_Hybrid_Seed_Dev_P Parameter: DAP Value: 30 vs. 12
  misc_feature: MA Experiment 20000535 PARAMETER Experiment Name: Zm_Hybrid_Seed_Dev_P Parameter: Organism Value: Zea mays
  misc_feature: MA Experiment 20000535 PARAMETER Experiment Name: Zm_Hybrid_Seed_Dev_P Parameter: Plant Line Value: 35A19
  misc_feature: MA Experiment 20000535 PARAMETER Experiment Name: Zm_Hybrid_Seed_Dev_P Parameter: Tissue Value: Embryo vs. Unfert Floret

SEQ ID NO: 15601 - protein, 156 aa, Zea mays subsp. mays; identical to SEQ ID NO: 10554
  peptide (1)..(156): Ceres Seq. ID no. 12595583
  misc_feature (36)..(146): Pfam Name: Oleosin Pfam Description: Oleosin
  misc_feature (36)..(146): Pfam Name: Oleosin Pfam Description: Oleosin
  misc_feature (1)..(156): Homolog of NCBI NO: 3334474 NR Description: OLEOSIN ZM-I (OLEOSIN 16 KD) (LIPID
  misc_feature (11)..(156): Homolog of NCBI NO: 82705 NR Description: lipid body-associated major protein L3 - maize
  misc_feature (1)..(156): Homolog of NCBI NO: 3334280 NR Description: OLEOSIN 16 KD (OSE701) >gi|7442010|pir||T03378
  misc_feature (1)..(156): Homolog of NCBI NO: 38346165 NR Description: OSJNBa0079A21.12 [Oryza sativa (japonica
  misc_feature (2)..(156): Homolog of NCBI NO: 1362168 NR Description: oleosin 2 - barley >gi|963064|emb|CAA57995.1| low
  misc_feature (11)..(156): Homolog of NCBI NO: 82705 NR Description: lipid body-associated major protein L3 - maize
  misc_feature (1)..(156): Homolog of NCBI NO: 38346165 NR Description: OSJNBa0079A21.12 [Oryza sativa (japonica
  misc_feature (24)..(147): Homolog of NCBI NO: 2119749 NR Description: oleosin - almond
  misc_feature (26)..(156): Homolog of NCBI NO: 8515912 NR Description: oleosin [Elaeis guineensis]
  misc_feature (1)..(132): Homolog of NCBI NO: 4096177 NR Description: early embryogenesis protein [Oryza sativa]
  misc_feature (1)..(156): Homolog of NCBI NO: 7442012 NR Description: oleosin isoform R16 - rice
  misc_feature (1)..(156): Homolog of NCBI NO: 3334281 NR Description: Oleosin 16 kDa >gi|1622939|gb|AAB67992.1| oleosin
  misc_feature (2)..(156): Homolog of NCBI NO: 1362168 NR Description: oleosin 2 - barley >gi|963064|emb|CAA57995.1| low
  misc_feature (1)..(156): Homolog of NCBI NO: 3334280 NR Description: OLEOSIN 16 KD (OSE701) >gi|7442010|pir||T03378
  misc_feature (1)..(156): Homolog of NCBI NO: 3334474 NR Description: OLEOSIN ZM-I (OLEOSIN 16 KD) (LIPID
  misc_feature (1)..(156): Homolog of NCBI NO: 3334281 NR Description: Oleosin 16 kDa >gi|1622939|gb|AAB67992.1| oleosin
  misc_feature (1)..(156): Homolog of NCBI NO: 7442012 NR Description: oleosin isoform R16 - rice
  misc_feature (1)..(132): Homolog of NCBI NO: 4096177 NR Description: early embryogenesis protein [Oryza sativa]
  misc_feature (26)..(156): Homolog of NCBI NO: 8515912 NR Description: oleosin [Elaeis guineensis]
  misc_feature (24)..(147): Homolog of NCBI NO: 2119749 NR Description: oleosin - almond

SEQ ID NO: 15602 - protein, 133 aa, Zea mays subsp. mays; identical to SEQ ID NO: 10555
  peptide (1)..(133): Ceres Seq. ID no. 12595584
  misc_feature (13)..(123): Pfam Name: Oleosin Pfam Description: Oleosin
  misc_feature (13)..(123): Pfam Name: Oleosin Pfam Description: Oleosin
  misc_feature (1)..(133): Homolog of NCBI NO: 3334474 NR Description: OLEOSIN ZM-I (OLEOSIN 16 KD) (LIPID
  misc_feature (1)..(133): Homolog of NCBI NO: 82705 NR Description: lipid body-associated major protein L3 - maize
  misc_feature (1)..(133): Homolog of NCBI NO: 3334280 NR Description: OLEOSIN 16 KD (OSE701) >gi|7442010|pir||T03378
  misc_feature (1)..(133): Homolog of NCBI NO: 38346165 NR Description: OSJNBa0079A21.12 [Oryza sativa (japonica
  misc_feature (1)..(133): Homolog of NCBI NO: 1362168 NR Description: oleosin 2 - barley >gi|963064|emb|CAA57995.1| low
  misc_feature (1)..(133): Homolog of NCBI NO: 82705 NR Description: lipid body-associated major protein L3 - maize
  misc_feature (1)..(133): Homolog of NCBI NO: 38346165 NR Description: OSJNBa0079A21.12 [Oryza sativa (japonica
  misc_feature (1)..(124): Homolog of NCBI NO: 2119749 NR Description: oleosin - almond
  misc_feature (3)..(133): Homolog of NCBI NO: 8515912 NR Description: oleosin [Elaeis guineensis]
  misc_feature (1)..(109): Homolog of NCBI NO: 4096177 NR Description: early embryogenesis protein [Oryza sativa]
  misc_feature (1)..(133): Homolog of NCBI NO: 7442012 NR Description: oleosin isoform R16 - rice
  misc_feature (1)..(133): Homolog of NCBI NO: 3334281 NR Description: Oleosin 16 kDa >gi|1622939|gb|AAB67992.1| oleosin
  misc_feature (1)..(133): Homolog of NCBI NO: 1362168 NR Description: oleosin 2 - barley >gi|963064|emb|CAA57995.1| low
  misc_feature (1)..(133): Homolog of NCBI NO: 3334280 NR Description: OLEOSIN 16 KD (OSE701) >gi|7442010|pir||T03378
  misc_feature (1)..(133): Homolog of NCBI NO: 3334474 NR Description: OLEOSIN ZM-I (OLEOSIN 16 KD) (LIPID
  misc_feature (1)..(133): Homolog of NCBI NO: 3334281 NR Description: Oleosin 16 kDa >gi|1622939|gb|AAB67992.1| oleosin
  misc_feature (1)..(133): Homolog of NCBI NO: 7442012 NR Description: oleosin isoform R16 - rice
  misc_feature (1)..(109): Homolog of NCBI NO: 4096177 NR Description: early embryogenesis protein [Oryza sativa]
  misc_feature (3)..(133): Homolog of NCBI NO: 8515912 NR Description: oleosin [Elaeis guineensis]
  misc_feature (1)..(124): Homolog of NCBI NO: 2119749 NR Description: oleosin - almond

SEQ ID NO: 15603 - protein, 120 aa, Zea mays subsp. mays; identical to SEQ ID NO: 10556
  peptide (1)..(120): Ceres Seq. ID no. 12595585
  misc_feature (1)..(110): Pfam Name: Oleosin Pfam Description: Oleosin
  misc_feature (1)..(110): Pfam Name: Oleosin Pfam Description: Oleosin
  misc_feature (1)..(120): Homolog of NCBI NO: 3334474 NR Description: OLEOSIN ZM-I (OLEOSIN 16 KD) (LIPID
  misc_feature (1)..(120): Homolog of NCBI NO: 82705 NR Description: lipid body-associated major protein L3 - maize
  misc_feature (1)..(120): Homolog of NCBI NO: 3334280 NR Description: OLEOSIN 16 KD (OSE701) >gi|7442010|pir||T03378
  misc_feature (1)..(120): Homolog of NCBI NO: 38346165 NR Description: OSJNBa0079A21.12 [Oryza sativa (japonica
  misc_feature (1)..(120): Homolog of NCBI NO: 1362168 NR Description: oleosin 2 - barley >gi|963064|emb|CAA57995.1| low
  misc_feature (1)..(120): Homolog of NCBI NO: 82705 NR Description: lipid body-associated major protein L3 - maize
  misc_feature (1)..(120): Homolog of NCBI NO: 38346165 NR Description: OSJNBa0079A21.12 [Oryza sativa (japonica
  misc_feature (1)..(111): Homolog of NCBI NO: 2119749 NR Description: oleosin - almond
  misc_feature (1)..(120): Homolog of NCBI NO: 8515912 NR Description: oleosin [Elaeis guineensis]
  misc_feature (1)..(96): Homolog of NCBI NO: 4096177 NR Description: early embryogenesis protein [Oryza sativa]
  misc_feature (1)..(120): Homolog of NCBI NO: 7442012 NR Description: oleosin isoform R16 - rice
  misc_feature (1)..(120): Homolog of NCBI NO: 3334281 NR Description: Oleosin 16 kDa >gi|1622939|gb|AAB67992.1| oleosin
  misc_feature (1)..(120): Homolog of NCBI NO: 1362168 NR Description: oleosin 2 - barley >gi|963064|emb|CAA57995.1| low
  misc_feature (1)..(120): Homolog of NCBI NO: 3334280 NR Description: OLEOSIN 16 KD (OSE701) >gi|7442010|pir||T03378
  misc_feature (1)..(120): Homolog of NCBI NO: 3334474 NR Description: OLEOSIN ZM-I (OLEOSIN 16 KD) (LIPID
  misc_feature (1)..(120): Homolog of NCBI NO: 3334281 NR Description: Oleosin 16 kDa >gi|1622939|gb|AAB67992.1| oleosin
  misc_feature (1)..(120): Homolog of NCBI NO: 7442012 NR Description: oleosin isoform R16 - rice
  misc_feature (1)..(96): Homolog of NCBI NO: 4096177 NR Description: early embryogenesis protein [Oryza sativa]
  misc_feature (1)..(120): Homolog of NCBI NO: 8515912 NR Description: oleosin [Elaeis guineensis]
  misc_feature (1)..(111): Homolog of NCBI NO: 2119749 NR Description: oleosin - almond

SEQ ID NO: 15604 - DNA, 785 bp, Zea mays subsp. mays
  misc_feature (1)..(785): Ceres Seq. ID no. 12577837
  misc_feature: MA Experiment ID: 108544 Result: Down-regulated in Transcription
ataaggcgcccgcggtgcccatcaattcgtgtcaccgcgtcccgagagcgcaaatcattccgcgcgacgcaaaaaccctagcctagccaccgatccctctcatggcaaccaccaccacccaggcgagcctcctcctccagaagcagctaagagatctcgcgaagcaccccgtggatgggttctctgctgggctggtcgacgacagcaatgtcttcgagtggcaggtcaccatcatcggaccgcctgacaccctatatgatggagggtacttcaatgcaataatgagcttcccacaaaattacccaaacagcccgccatcagtcagatttacctctgaaatgtggcatccaaatgtctatcctgatgggcgggtttgtatctctattcttcatccacctggtgaagatccaaacggttatgagctcgcaagtgagcgatggacacctgtgcacacagtagaaagcatagttctgagcattatatcaatgctctctagtccaaatgatgagtctccagcaaacattgaggcagctaaggaatggagggaacagagggaggatttcaagaaaaaggttaggcgcatcgtgcggaaatcacaggaaatgttctgaaggaaatgggagtgctggtgaagttaaccatgccatgtcaggctgcaggattttgctgccaacctcaaaagtgctcatctgacaccagcgtcttgtgtattttccatttatcgtctgttcattggtgacaattgcctccagaaatgcattgggacgtggtcggcttgaaggttc

SEQ ID NO: 15605 - protein, 169 aa, Zea mays subsp. mays
  peptide (1)..(169): Ceres Seq. ID no. 12577838
  misc_feature (1)..(169): Homolog of NCBI NO: 7437988 NR Description: ubiquitin-conjugating enzyme - maize
  misc_feature (1)..(168): Homolog of NCBI NO: 34908132 NR Description: putative Ubiquitin carrier protein UBC7 [Oryza
  misc_feature (1)..(168): Homolog of NCBI NO: 7437989 NR Description: ubiquitin-conjugating enzyme E2 - maize
  misc_feature (2)..(169): Homolog of NCBI NO: 19347846 NR Description: putative E2, ubiquitin-conjugating enzyme UBC7
  misc_feature (2)..(169): Homolog of NCBI NO: 28973769 NR Description: putative E2, ubiquitin-conjugating enzyme UBC7
  misc_feature (6)..(169): Homolog of NCBI NO: 31088843 NR Description: Ubiquitin-conjugating enzyme E2 7
  misc_feature (23)..(168): Homolog of NCBI NO: 136647 NR Description: Ubiquitin-conjugating enzyme E2-20 kDa
  misc_feature (6)..(169): Homolog of NCBI NO: 18408206 NR Description: E2, ubiquitin-conjugating enzyme 13 (UBC13); id: At3g46460.1, supported by cDNA: gi_15215679, supported by
  misc_feature (7)..(168): Homolog of NCBI NO: 18410268 NR Description: E2, ubiquitin-conjugating enzyme 14 (UBC14); id: At3g55380.1, supported by cDNA: 25382., supported by cDNA:
  misc_feature (33)..(169): Homolog of NCBI NO: 18424219 NR Description: E2, ubiquitin-conjugating enzyme 7 (UBC7);
MATTTTQASLLLQKQLRDLAKHPVDGFSAGLVDDSNVFEWQVTIIGPPDTLYDGGYFNAIMSFPQNYPNSPPSVRFTSEMWHPNVYPDGRVCISILHPPGEDPNGYELASERWTPVHTVESIVLSIISMLSSPNDESPANIEAAKEWREQREDFKKKVRRIVRKSQEMF

SEQ ID NO: 15606 - protein, 109 aa, Zea mays subsp. mays
  peptide (1)..(109): Ceres Seq. ID no. 12577839
  misc_feature (1)..(109): Homolog of NCBI NO: 7437988 NR Description: ubiquitin-conjugating enzyme - maize
  misc_feature (1)..(108): Homolog of NCBI NO: 34908132 NR Description: putative Ubiquitin carrier protein UBC7 [Oryza
  misc_feature (1)..(108): Homolog of NCBI NO: 7437989 NR Description: ubiquitin-conjugating enzyme E2 - maize
  misc_feature (1)..(109): Homolog of NCBI NO: 19347846 NR Description: putative E2, ubiquitin-conjugating enzyme UBC7
  misc_feature (1)..(109): Homolog of NCBI NO: 28973769 NR Description: putative E2, ubiquitin-conjugating enzyme UBC7
  misc_feature (1)..(109): Homolog of NCBI NO: 31088843 NR Description: Ubiquitin-conjugating enzyme E2 7
  misc_feature (1)..(108): Homolog of NCBI NO: 136647 NR Description: Ubiquitin-conjugating enzyme E2-20 kDa
  misc_feature (1)..(109): Homolog of NCBI NO: 18408206 NR Description: E2, ubiquitin-conjugating enzyme 13 (UBC13); id: At3g46460.1, supported by cDNA: gi_15215679, supported by
  misc_feature (1)..(108): Homolog of NCBI NO: 18410268 NR Description: E2, ubiquitin-conjugating enzyme 14 (UBC14); id: At3g55380.1, supported by cDNA: 25382., supported by cDNA:
  misc_feature (1)..(109): Homolog of NCBI NO: 18424219 NR Description: E2, ubiquitin-conjugating enzyme 7 (UBC7);
MSFPQNYPNSPPSVRFTSEMWHPNVYPDGRVCISILHPPGEDPNGYELASERWTPVHTVESIVLSIISMLSSPNDESPANIEAAKEWREQREDFKKKVRRIVRKSQEMF

SEQ ID NO: 15607 - protein, 90 aa, Zea mays subsp. mays
  peptide (1)..(90): Ceres Seq. ID no. 12577840
  misc_feature (1)..(89): Homolog of NCBI NO: 136647 NR Description: Ubiquitin-conjugating enzyme E2-20 kDa
  misc_feature (1)..(90): Homolog of NCBI NO: 18408206 NR Description: E2, ubiquitin-conjugating enzyme 13 (UBC13); id: At3g46460.1, supported by cDNA: gi_15215679, supported by
  misc_feature (1)..(89): Homolog of NCBI NO: 18410268 NR Description: E2, ubiquitin-conjugating enzyme 14 (UBC14); id: At3g55380.1, supported by cDNA: 25382., supported by cDNA:
  misc_feature (1)..(90): Homolog of NCBI NO: 18424219 NR Description: E2, ubiquitin-conjugating enzyme 7 (UBC7);
  misc_feature (1)..(90): Homolog of NCBI NO: 7437988 NR Description: ubiquitin-conjugating enzyme - maize
  misc_feature (1)..(89): Homolog of NCBI NO: 34908132 NR Description: putative Ubiquitin carrier protein UBC7 [Oryza
  misc_feature (1)..(89): Homolog of NCBI NO: 7437989 NR Description: ubiquitin-conjugating enzyme E2 - maize
  misc_feature (1)..(90): Homolog of NCBI NO: 19347846 NR Description: putative E2, ubiquitin-conjugating enzyme UBC7
  misc_feature (1)..(90): Homolog of NCBI NO: 28973769 NR Description: putative E2, ubiquitin-conjugating enzyme UBC7
  misc_feature (1)..(90): Homolog of NCBI NO: 31088843 NR Description: Ubiquitin-conjugating enzyme E2 7
MWHPNVYPDGRVCISILHPPGEDPNGYELASERWTPVHTVESIVLSIISMLSSPNDESPANIEAAKEWREQREDFKKKVRRIVRKSQEMF

SEQ ID NO: 15608 - DNA, 1041 bp, Zea mays subsp. mays
  misc_feature (1)..(1041): Ceres Seq. ID no. 13579624
  misc_feature: MA Experiment ID: 108515 Result: Up-regulated in Transcription
  misc_feature: MA Experiment 108515 PARAMETER Experiment Name: Zm_2mM_SA_P Parameter: Age (day) Value: 8
  misc_feature: MA Experiment 108515 PARAMETER Experiment Name: Zm_2mM_SA_P Parameter: Organism Value: Zea mays
  misc_feature: MA Experiment 108515 PARAMETER Experiment Name: Zm_2mM_SA_P Parameter: Plant Line Value: 35A19
  misc_feature: MA Experiment 108515 PARAMETER Experiment Name: Zm_2mM_SA_P Parameter: Timepoint (hr) Value: 12
  misc_feature: MA Experiment 108515 PARAMETER Experiment Name: Zm_2mM_SA_P Parameter: Tissue Value: Aerial
  misc_feature: MA Experiment 108515 PARAMETER Experiment Name: Zm_2mM_SA_P Parameter: Treatment Value: 2mM SA vs. No Treatment
  misc_feature: MA Experiment ID: 108522 Result: Up-regulated in Transcription
  misc_feature: MA Experiment 108522 PARAMETER Experiment Name: Zm_42deg_Heat_P Parameter: Age (day) Value: 8
  misc_feature: MA Experiment 108522 PARAMETER Experiment Name: Zm_42deg_Heat_P Parameter: Organism Value: Zea mays
  misc_feature: MA Experiment 108522 PARAMETER Experiment Name: Zm_42deg_Heat_P Parameter: Plant Line Value: 35A19
  misc_feature: MA Experiment 108522 PARAMETER Experiment Name: Zm_42deg_Heat_P Parameter: Temperature (deg C) Value: 42 vs. 22
  misc_feature: MA Experiment 108522 PARAMETER Experiment Name: Zm_42deg_Heat_P Parameter: Timepoint (hr) Value: 1
  misc_feature: MA Experiment 108522 PARAMETER Experiment Name: Zm_42deg_Heat_P Parameter: Tissue Value: Aerial
  misc_feature: MA Experiment ID: 108523 Result: Up-regulated in Transcription
  misc_feature: MA Experiment 108523 PARAMETER Experiment Name: Zm_42deg_Heat_P Parameter: Age (day) Value: 8
  misc_feature: MA Experiment 108523 PARAMETER Experiment Name: Zm_42deg_Heat_P Parameter: Organism Value: Zea mays
  misc_feature: MA Experiment 108523 PARAMETER Experiment Name: Zm_42deg_Heat_P Parameter: Plant Line Value: 35A19
  misc_feature: MA Experiment 108523 PARAMETER Experiment Name: Zm_42deg_Heat_P Parameter: Temperature (deg C) Value: 42 vs. 22
  misc_feature: MA Experiment 108523 PARAMETER Experiment Name: Zm_42deg_Heat_P Parameter: Timepoint (hr) Value: 6
  misc_feature: MA Experiment 108523 PARAMETER Experiment Name: Zm_42deg_Heat_P Parameter: Tissue Value: Aerial
  misc_feature: MA Experiment ID: 108527 Result: Up-regulated in Transcription
  misc_feature: MA Experiment 108527 PARAMETER Experiment Name: Zm_5mM_NO_P Parameter: Age (day) Value: 8
  misc_feature: MA Experiment 108527 PARAMETER Experiment Name: Zm_5mM_NO_P Parameter: Organism Value: Zea mays
  misc_feature: MA Experiment 108527 PARAMETER Experiment Name: Zm_5mM_NO_P Parameter: Plant Line Value: 35A19
  misc_feature: MA Experiment 108527 PARAMETER Experiment Name: Zm_5mM_NO_P Parameter: Timepoint (hr) Value: 6
  misc_feature: MA Experiment 108527 PARAMETER Experiment Name: Zm_5mM_NO_P Parameter: Tissue Value: Aerial
  misc_feature: MA Experiment 108527 PARAMETER Experiment Name: Zm_5mM_NO_P Parameter: Treatment Value: 5mM NO vs. No Treatment
  misc_feature: MA Experiment ID: 108528 Result: Down-regulated in Transcription
  misc_feature: MA Experiment 108528 PARAMETER Experiment Name: Zm_Imbibed_Seeds_P Parameter: Age (day) Value: 5 vs. 2
  misc_feature: MA Experiment 108528 PARAMETER Experiment Name: Zm_Imbibed_Seeds_P Parameter: Organism Value: Zea mays
  misc_feature: MA Experiment 108528 PARAMETER Experiment Name: Zm_Imbibed_Seeds_P Parameter: Plant Line Value: 35A19
  misc_feature: MA Experiment 108528 PARAMETER Experiment Name: Zm_Imbibed_Seeds_P Parameter: Tissue Value: Aerial vs. Embryo
  misc_feature: MA Experiment ID: 108529 Result: Down-regulated in Transcription
  misc_feature: MA Experiment 108529 PARAMETER Experiment Name: Zm_Imbibed_Seeds_P Parameter: Age (day) Value: 5 vs. 2
  misc_feature: MA Experiment 108529 PARAMETER Experiment Name: Zm_Imbibed_Seeds_P Parameter: Organism Value: Zea mays
  misc_feature: MA Experiment 108529 PARAMETER Experiment Name: Zm_Imbibed_Seeds_P Parameter: Plant Line Value: 35A19
  misc_feature: MA Experiment 108529 PARAMETER Experiment Name: Zm_Imbibed_Seeds_P Parameter: Tissue Value: Roots vs. Embryo
  misc_feature: MA Experiment ID: 108530 Result: Down-regulated in Transcription
  misc_feature: MA Experiment 108530 PARAMETER Experiment Name: Zm_Imbibed_Seeds_P Parameter: Age (day) Value: 6 vs. 2
  misc_feature: MA Experiment 108530 PARAMETER Experiment Name: Zm_Imbibed_Seeds_P Parameter: Organism Value: Zea mays
  misc_feature: MA Experiment 108530 PARAMETER Experiment Name: Zm_Imbibed_Seeds_P Parameter: Plant Line Value: 35A19
  misc_feature: MA Experiment 108530 PARAMETER Experiment Name: Zm_Imbibed_Seeds_P Parameter: Tissue Value: Aerial vs. Embryo
  misc_feature: MA Experiment ID: 108534 Result: Up-regulated in Transcription
  misc_feature: MA Experiment 108534 PARAMETER Experiment Name: Zm_4deg_Cold_P Parameter: Age (hr) Value: 8
  misc_feature: MA Experiment 108534 PARAMETER Experiment Name: Zm_4deg_Cold_P Parameter: Organism Value: Zea mays
  misc_feature: MA Experiment 108534 PARAMETER Experiment Name: Zm_4deg_Cold_P Parameter: Plant Line Value: 35A19
  misc_feature: MA Experiment 108534 PARAMETER Experiment Name: Zm_4deg_Cold_P Parameter: Temperature (deg C) Value: 4 vs. 22
  misc_feature: MA Experiment 108534 PARAMETER Experiment Name: Zm_4deg_Cold_P Parameter: Timepoint (hr) Value: 6
  misc_feature: MA Experiment 108534 PARAMETER Experiment Name: Zm_4deg_Cold_P Parameter: Tissue Value: Aerial
  misc_feature: MA Experiment ID: 108545 Result: Down-regulated in Transcription
  misc_feature: MA Experiment 108545 PARAMETER Experiment Name: Zm_Imbibed_Seeds_P Parameter: Age (day) Value: 3 vs. 2
  misc_feature: MA Experiment 108545 PARAMETER Experiment Name: Zm_Imbibed_Seeds_P Parameter: Organism Value: Zea mays
  misc_feature: MA Experiment 108545 PARAMETER Experiment Name: Zm_Imbibed_Seeds_P Parameter: Plant Line Value: 35A19
  misc_feature: MA Experiment 108545 PARAMETER Experiment Name: Zm_Imbibed_Seeds_P Parameter: Tissue Value: Aerial vs. Embryo
  misc_feature: MA Experiment ID: 108546 Result: Down-regulated in Transcription
  misc_feature: MA Experiment 108546 PARAMETER Experiment Name: Zm_Imbibed_Seeds_P Parameter: Age (day) Value: 3 vs. 2
  misc_feature: MA Experiment 108546 PARAMETER Experiment Name: Zm_Imbibed_Seeds_P Parameter: Organism Value: Zea mays
  misc_feature: MA Experiment 108546 PARAMETER Experiment Name: Zm_Imbibed_Seeds_P Parameter: Plant Line Value: 35A19
  misc_feature: MA Experiment 108546 PARAMETER Experiment Name: Zm_Imbibed_Seeds_P Parameter: Tissue Value: Roots vs. Embryo
  misc_feature: MA Experiment ID: 108547 Result: Down-regulated in Transcription
  misc_feature: MA Experiment 108547 PARAMETER Experiment Name: Zm_Imbibed_Seeds_P Parameter: Age (day) Value: 4 vs. 2
  misc_feature: MA Experiment 108547 PARAMETER Experiment Name: Zm_Imbibed_Seeds_P Parameter: Organism Value: Zea mays
  misc_feature: MA Experiment 108547 PARAMETER Experiment Name: Zm_Imbibed_Seeds_P Parameter: Plant Line Value: 35A19
  misc_feature: MA Experiment 108547 PARAMETER Experiment Name: Zm_Imbibed_Seeds_P Parameter: Tissue Value: Aerial vs. Embryo
  misc_feature: MA Experiment ID: 108559 Result: Up-regulated in Transcription
  misc_feature: MA Experiment 108559 PARAMETER Experiment Name: Zm_5mM_NO_P Parameter: Age (day) Value: 8
  misc_feature: MA Experiment 108559 PARAMETER Experiment Name: Zm_5mM_NO_P Parameter: Organism Value: Zea mays
  misc_feature: MA Experiment 108559 PARAMETER Experiment Name: Zm_5mM_NO_P Parameter: Plant Line Value: 35A19
  misc_feature: MA Experiment 108559 PARAMETER Experiment Name: Zm_5mM_NO_P Parameter: Timepoint (hr) Value: 12
  misc_feature: MA Experiment 108559 PARAMETER Experiment Name: Zm_5mM_NO_P Parameter: Tissue Value: Aerial
  misc_feature: MA Experiment 108559 PARAMETER Experiment Name: Zm_5mM_NO_P Parameter: Treatment Value: 5mM NO vs. No Treatment
  misc_feature: MA Experiment ID: 20000478 Result: Up-regulated in Transcription
  misc_feature: MA Experiment 20000478 PARAMETER Experiment Name: Zm_5mM_SA_P Parameter: Age (day) Value: 11
  misc_feature: MA Experiment 20000478 PARAMETER Experiment Name: Zm_5mM_SA_P Parameter: Organism Value: Zea mays
  misc_feature: MA Experiment 20000478 PARAMETER Experiment Name: Zm_5mM_SA_P Parameter: Plant Line Value: 35A19
  misc_feature: MA Experiment 20000478 PARAMETER Experiment Name: Zm_5mM_SA_P Parameter: Timepoint (hr) Value: 72
  misc_feature: MA Experiment 20000478 PARAMETER Experiment Name: Zm_5mM_SA_P Parameter: Tissue Value: Aerial
  misc_feature: MA Experiment 20000478 PARAMETER Experiment Name: Zm_5mM_SA_P Parameter: Treatment Value: 5mM SA vs. No Treatment
  misc_feature: MA Experiment ID: 20000492 Result: Up-regulated in Transcription
  misc_feature: MA Experiment 20000492 PARAMETER Experiment Name: Zm_Hybrid_Seed_Dev_P Parameter: DAP Value: 12
  misc_feature: MA Experiment 20000492 PARAMETER Experiment Name: Zm_Hybrid_Seed_Dev_P Parameter: Organism Value: Zea mays
  misc_feature: MA Experiment 20000492 PARAMETER Experiment Name: Zm_Hybrid_Seed_Dev_P Parameter: Plant Line Value: 35A19
  misc_feature: MA Experiment 20000492 PARAMETER Experiment Name: Zm_Hybrid_Seed_Dev_P Parameter: Tissue Value: Fert Kernel vs. Unfert Floret
  misc_feature: MA Experiment ID: 20000535 Result: Up-regulated in Transcription
  misc_feature: MA Experiment 20000535 PARAMETER Experiment Name: Zm_Hybrid_Seed_Dev_P Parameter: DAP Value: 30 vs. 12
  misc_feature: MA Experiment 20000535 PARAMETER Experiment Name: Zm_Hybrid_Seed_Dev_P Parameter: Organism Value: Zea mays
  misc_feature: MA Experiment 20000535 PARAMETER Experiment Name: Zm_Hybrid_Seed_Dev_P Parameter: Plant Line Value: 35A19
  misc_feature: MA Experiment 20000535 PARAMETER Experiment Name: Zm_Hybrid_Seed_Dev_P Parameter: Tissue Value: Embryo vs. Unfert Floret
  misc_feature: MA Experiment ID: 20000626 Result: Up-regulated in Transcription
  misc_feature: MA Experiment 20000626 PARAMETER Experiment Name: Zm_Herbicide-Treatments_P Parameter: Timepoint (hr) Value: 12
  misc_feature: MA Experiment 20000626 PARAMETER Experiment Name: Zm_Herbicide-Treatments_P Parameter: Tissue Value: Aerial
  misc_feature: MA Experiment 20000626 PARAMETER Experiment Name: Zm_Herbicide-Treatments_P Parameter: Treatment Value: Roundup vs. No Treatment
  misc_feature: MA Experiment ID: 20000629 Result: Up-regulated in Transcription
  misc_feature: MA Experiment 20000629 PARAMETER Experiment Name: Zm_Herbicide-Treatments_P Parameter: Timepoint (hr) Value: 12
  misc_feature: MA Experiment 20000629 PARAMETER Experiment Name: Zm_Herbicide-Treatments_P Parameter: Tissue Value: Aerial
  misc_feature: MA Experiment 20000629 PARAMETER Experiment Name: Zm_Herbicide-Treatments_P Parameter: Treatment Value: Trimec vs. No Treatment
  misc_feature: MA Experiment ID: 20001610 Result: Up-regulated in Transcription
  misc_feature: MA Experiment 20001610 PARAMETER Experiment Name: Zm_50ppm_KNO3_L-to-H_P Parameter: Age (day) Value: 19
  misc_feature: MA Experiment 20001610 PARAMETER Experiment Name: Zm_50ppm_KNO3_L-to-H_P Parameter: Organism Value: Zea mays
  misc_feature: MA Experiment 20001610 PARAMETER Experiment Name: Zm_50ppm_KNO3_L-to-H_P Parameter: Plant Line Value: 35A19
  misc_feature: MA Experiment 20001610 PARAMETER Experiment Name: Zm_50ppm_KNO3_L-to-H_P Parameter: Timepoint (hr) Value: 2
  misc_feature: MA Experiment 20001610 PARAMETER Experiment Name: Zm_50ppm_KNO3_L-to-H_P Parameter: Tissue Value: Roots
  misc_feature: MA Experiment 20001610 PARAMETER Experiment Name: Zm_50ppm_KNO3_L-to-H_P Parameter: Treatment Value: 50ppm KNO3 vs. 50ppm KCl
ccgcaaggatccaccacaacagcgaaggagaaagcagaccaacctagccacccagggagaaagaggccaaaagggaggggagagtgtcgtcatggcttccattgtcgcttccaggagggccgttcctctagttcgcgctctggagaagctcatcgcagcgtcctccgctcccgggactggctccgccctcaggccggtggcagtcgccggcggcctccgcggctacaacaccggcgctccgctccgacgctacgagggggccgagtcggaagacgatagcgtccgcgagtacgatgggcggcacggcggccgggactacgctgtgcccagcctgttctcagatattttccgtgatccgcttagtgcgccgcacagcattggccgcctgctgaaccttgtggacgacttggcggtggcggcgccaggtcgtgcggtgcgccgtggctggaacgcgaaggaggacgaggaggcgctgcacctgagggtggacatgccaggcctggggaaggagcacgtcaaggtgtgggcggagcagaacagcctggtgatcaagggcgagggcgagaaggaggatagcgaggacgaggccgccccgcctccgagatacagcggtcgcatcgagctcgcgccagaggtttacaggatggacaagatcaaggcggagatgaagaacggcgtgctcaaggtggtcgtgccgaaggtgaaggagcagcagcgcaaggacgtgttccaagtcaacgtcgagtagatgtttccaaatagaagcaagtgccggtacgggatggaggattggaggggcactgccaaactaggattcctctctctcaatctgatctggattctggaatcagatttctcttctttcatttttctcgtctatcttctatcagtatgaaataagcaacgtcgcttcagttttcgtgtcaaggccggtggagtcgcctatgtttattttattttctttgtatttcctacctggacacacgttctctatgccgtgtttggtttccgcagatttttaaaatatgcatgttcaaaccc

SEQ ID NO: 15609 - protein, 248 aa, Zea mays subsp. mays
  peptide (1)..(248): Ceres Seq. ID no. 13579625
  misc_feature (31)..(248): Homolog of NCBI NO: 7441311 NR Description: heat shock protein hsp22 precursor, mitochondrial maize >gi|3015621|gb|AAC12279.1| low molecular weight heat shock
  misc_feature (31)..(248): Homolog of NCBI NO: 4138869 NR Description: small heat shock protein Hsp23.5 [Triticum
  misc_feature (46)..(248): Homolog of NCBI NO: 123564 NR Description: Small heat shock protein, chloroplast precursor
  misc_feature (63)..(248): Homolog of NCBI NO: 7441310 NR Description: heat shock protein MTSHP precursor, mitochondrial tomato >gi|3492854|dbj|BAA32547.1| mitochondrial small heat shock
  misc_feature (46)..(248): Homolog of NCBI NO: 21554988 NR Description: mitochondrial heat shock 22 kd protein-like
  misc_feature (46)..(248): Homolog of NCBI NO: 15242086 NR Description: heat shock protein, putative [Arabidopsis
  misc_feature (54)..(248): Homolog of NCBI NO: 4138871 NR Description: small heat shock protein Hsp23.6 [Triticum
  misc_feature (46)..(248): Homolog of NCBI NO: 1170368 NR Description: Heat shock 22 kDa protein, mitochondrial precursor
  misc_feature (46)..(248): Homolog of NCBI NO: 7159338 NR Description: LMW heat shock protein [Euphorbia esula]
  misc_feature (46)..(247): Homolog of NCBI NO: 15234969 NR Description: mitochondrion-localized small heat shock protein thaliana] >gi|3122232|sp|Q96331|HS2M_ARATH Heat shock 22 kDa mitochondrial precursor >gi|7441312|pir||T05541 heat shock heat
RKDPPQQRRRKQTNLATQGERGQKGGESVVMASIVASRRAVPLVRALEKLIAASSAPGTGSALRPVAVAGGLRGYNTGAPLRRYEGAESEDDSVREYDGRHGGRDYAVPSLFSDIFRDPLSAPHSIGRLLNLVDDLAVAAPGRAVRRGWNAKEDEEALHLRVDMPGLGKEHVKVWAEQNSLVIKGEGEKEDSEDEAAPPPRYSGRIELAPEVYRMDKIKAEMKNGVLKVVVPKVKEQQRKDVFQVNVE

SEQ ID NO: 15610 - protein, 218 aa, Zea mays subsp. mays
  peptide (1)..(218): Ceres Seq. ID no. 13579626
  misc_feature (1)..(218): Homolog of NCBI NO: 7441311 NR Description: heat shock protein hsp22 precursor, mitochondrial maize >gi|3015621|gb|AAC12279.1| low molecular weight heat shock
  misc_feature (1)..(218): Homolog of NCBI NO: 4138869 NR Description: small heat shock protein Hsp23.5 [Triticum
  misc_feature (16)..(218): Homolog of NCBI NO: 123564 NR Description: Small heat shock protein, chloroplast precursor
  misc_feature (33)..(218): Homolog of NCBI NO: 7441310 NR Description: heat shock protein MTSHP precursor, mitochondrial tomato >gi|3492854|dbj|BAA32547.1| mitochondrial small heat shock
  misc_feature (16)..(218): Homolog of NCBI NO: 21554988 NR Description: mitochondrial heat shock 22 kd protein-like
  misc_feature (16)..(218): Homolog of NCBI NO: 15242086 NR Description: heat shock protein, putative [Arabidopsis
  misc_feature (24)..(218): Homolog of NCBI NO: 4138871 NR Description: small heat shock protein Hsp23.6 [Triticum
  misc_feature (16)..(218): Homolog of NCBI NO: 1170368 NR Description: Heat shock 22 kDa protein, mitochondrial precursor
  misc_feature (16)..(218): Homolog of NCBI NO: 7159338 NR Description: LMW heat shock protein [Euphorbia esula]
  misc_feature (16)..(217): Homolog of NCBI NO: 15234969 NR Description: mitochondrion-localized small heat shock protein thaliana] >gi|3122232|sp|Q96331|HS2M_ARATH Heat shock 22 kDa mitochondrial precursor >gi|7441312|pir||T05541 heat shock heat
MASIVASRRAVPLVRALEKLIAASSAPGTGSALRPVAVAGGLRGYNTGAPLRRYEGAESEDDSVREYDGRHGGRDYAVPSLFSDIFRDPLSAPHSIGRLLNLVDDLAVAAPGRAVRRGWNAKEDEEALHLRVDMPGLGKEHVKVWAEQNSLVIKGEGEKEDSEDEAAPPPRYSGRIELAPEVYRMDKIKAEMKNGVLKVVVPKVKEQQRKDVFQVNVE

SEQ ID NO: 15611 - DNA, 453 bp, Zea mays subsp. mays
  misc_feature (1)..(453): Ceres Seq. ID no. 7117146
  misc_feature: MA Experiment ID: 108535 Result: Up-regulated in Transcription
  misc_feature: MA Experiment 108535 PARAMETER Experiment Name: Zm_Meristem_P Parameter: Age (day) Value: 8
  misc_feature: MA Experiment 108535 PARAMETER Experiment Name: Zm_Meristem_P Parameter: Organism Value: Zea mays
  misc_feature: MA Experiment 108535 PARAMETER Experiment Name: Zm_Meristem_P Parameter: Plant Line Value: 35A19
  misc_feature: MA Experiment 108535 PARAMETER Experiment Name: Zm_Meristem_P Parameter: Tissue Value: Root Meristem vs. Above Root Meristem
  misc_feature: MA Experiment ID: 108544 Result: Down-regulated in Transcription
  misc_feature: MA Experiment ID: 108556 Result: Down-regulated in Transcription
  misc_feature: MA Experiment 108556 PARAMETER Experiment Name: Zm_Drought_P Parameter: Age (day) Value: 9
  misc_feature: MA Experiment 108556 PARAMETER Experiment Name: Zm_Drought_P Parameter: Organism Value: Zea mays
  misc_feature: MA Experiment 108556 PARAMETER Experiment Name: Zm_Drought_P Parameter: Plant Line Value: 35A19
  misc_feature: MA Experiment 108556 PARAMETER Experiment Name: Zm_Drought_P Parameter: Timepoint (hr) Value: 24
  misc_feature: MA Experiment 108556 PARAMETER Experiment Name: Zm_Drought_P Parameter: Tissue Value: Aerial
  misc_feature: MA Experiment 108556 PARAMETER Experiment Name: Zm_Drought_P Parameter: Treatment Value: Drought vs. No Drought
  misc_feature: MA Experiment ID: 20000487 Result: Up-regulated in Transcription
  misc_feature: MA Experiment 20000487 PARAMETER Experiment Name: Zm_50mM_NH4NO3_L_to_H_P Parameter: Organism Value: Zea mays
  misc_feature: MA Experiment 20000487 PARAMETER Experiment Name: Zm_50mM_NH4NO3_L_to_H_P Parameter: Timepoint (hr) Value: 4
  misc_feature: MA Experiment 20000487 PARAMETER Experiment Name: Zm_50mM_NH4NO3_L_to_H_P Parameter: Tissue Value: Leaves
  misc_feature: MA Experiment 20000487 PARAMETER Experiment Name: Zm_50mM_NH4NO3_L_to_H_P Parameter: Treatment Value: 50mM NH4NO3 vs. 100mM Mannitol
catagaaatctgccantttttgccncgggttggtggtgttgaattggaactgattgccattgctacaggagggcggattgttccgagattccaagagttgagtcctgaaaagcttggaaaggctggattagtcagagagaaatcattcggaacaacaaaggaccggatgctttacattgagaagtgtgccaattctagagctgtaaccattttcatccgtgggggaaacaaaatgatgattgaggagaccaagcgcagtcttcntgntgttctttgcncaccanggaatctgatccggaataactcgattgtgtacggtggcggctcagccgagatatcttgctcaattgctgttgaaactgctgcagatcggcacccgggagttgagcagtatgctatcaggtcattcgctgatgcattagatgctgttccactagcgttggccgaaaacag

SEQ ID NO: 15612 - protein, 150 aa, Zea mays subsp. mays
  peptide (1)..(150): Ceres Seq. ID no. 7117147
  misc_feature (10)..(149): Pfam Name: TCP-1/cpn60 chaperonin family Pfam Description: TCP-1/cpn60 chaperonin family
  misc_feature (10)..(149): Homolog of NCBI NO: 730919 NR Description: T-COMPLEX PROTEIN 1, EPSILON SUBUNIT
  misc_feature (10)..(149): Homolog of NCBI NO: 1729864 NR Description: T-COMPLEX PROTEIN 1, EPSILON SUBUNIT
  misc_feature (10)..(149): Homolog of NCBI NO: 1587206 NR Description: T complex protein
  misc_feature (10)..(149): Homolog of NCBI NO: 4206124 NR Description: T-complex protein 1 epsilon subunit
  misc_feature (10)..(149): Homolog of NCBI NO: 15221770 NR Description: T-complex chaperonin protein , epsilon subunit; id: At1g24510.1, supported by cDNA: gi_19715604 [Arabidopsis
  misc_feature (10)..(149): Homolog of NCBI NO: 27924333 NR Description: Similar to chaperonin containing TCP1, subunit 5
  misc_feature (10)..(149): Homolog of NCBI NO: 39850245 NR Description: Unknown (protein for MGC:76252) [Silurana
  misc_feature (10)..(149): Homolog of NCBI NO: 32405372 NR Description: hypothetical protein [Neurospora crassa]
  misc_feature (10)..(149): Homolog of NCBI NO: 40745913 NR Description: conserved hypothetical protein [Aspergillus
  misc_feature (10)..(149): Homolog of NCBI NO: 6683670 NR Description: CCT (chaperonin containing T-complex polypeptide
  misc_feature (5)..(5): Xaa is any aa, unknown or other
  misc_feature (8)..(8): Xaa is any aa, unknown or other
  misc_feature (88)..(88): Xaa is any aa, unknown or other
  misc_feature (89)..(89): Xaa is any aa, unknown or other
  misc_feature (93)..(93): Xaa is any aa, unknown or other
  misc_feature (95)..(95): Xaa is any aa, unknown or other
IEICXFLXRVGGVELELIAIATGGRIVPRFQELSPEKLGKAGLVREKSFGTTKDRMLYIEKCANSRAVTIFIRGGNKMMIEETKRSLXXVLCXPXNLIRNNSIVYGGGSAEISCSIAVETAADRHPGVEQYAIRSFADALDAVPLALAEN

SEQ ID NO: 15613 - protein, 95 aa, Zea mays subsp. mays
  peptide (1)..(95): Ceres Seq. ID no. 7117148
  misc_feature (1)..(94): Pfam Name: TCP-1/cpn60 chaperonin family Pfam Description: TCP-1/cpn60 chaperonin family
  misc_feature (1)..(94): Homolog of NCBI NO: 730919 NR Description: T-COMPLEX PROTEIN 1, EPSILON SUBUNIT
  misc_feature (1)..(94): Homolog of NCBI NO: 1729864 NR Description: T-COMPLEX PROTEIN 1, EPSILON SUBUNIT
  misc_feature (1)..(94): Homolog of NCBI NO: 1587206 NR Description: T complex protein
  misc_feature (1)..(94): Homolog of NCBI NO: 4206124 NR Description: T-complex protein 1 epsilon subunit
  misc_feature (1)..(94): Homolog of NCBI NO: 15221770 NR Description: T-complex chaperonin protein , epsilon subunit; id: At1g24510.1, supported by cDNA: gi_19715604 [Arabidopsis
  misc_feature (1)..(94): Homolog of NCBI NO: 27924333 NR Description: Similar to chaperonin containing TCP1, subunit 5
  misc_feature (1)..(94): Homolog of NCBI NO: 39850245 NR Description: Unknown (protein for MGC:76252) [Silurana
  misc_feature (1)..(94): Homolog of NCBI NO: 32405372 NR Description: hypothetical protein [Neurospora crassa]
  misc_feature (1)..(94): Homolog of NCBI NO: 40745913 NR Description: conserved hypothetical protein [Aspergillus
  misc_feature (1)..(94): Homolog of NCBI NO: 6683670 NR Description: CCT (chaperonin containing T-complex polypeptide
  misc_feature (33)..(33): Xaa is any aa, unknown or other
  misc_feature (34)..(34): Xaa is any aa, unknown or other
  misc_feature (38)..(38): Xaa is any aa, unknown or other
  misc_feature (40)..(40): Xaa is any aa, unknown or other
MLYIEKCANSRAVTIFIRGGNKMMIEETKRSLXXVLCXPXNLIRNNSIVYGGGSAEISCSIAVETAADRHPGVEQYAIRSFADALDAVPLALAEN

SEQ ID NO: 15614 - DNA, 1132 bp, Zea mays subsp. mays
  misc_feature (1)..(1132): Ceres Seq. ID no. 13579672
  misc_feature: MA Experiment ID: 108504 Result: Up-regulated in Transcription
  misc_feature: MA Experiment 108504 PARAMETER Experiment Name: Zm_Drought_P Parameter: Age (day) Value: 8
  misc_feature: MA Experiment 108504 PARAMETER Experiment Name: Zm_Drought_P Parameter: Organism Value: Zea mays
  misc_feature: MA Experiment 108504 PARAMETER Experiment Name: Zm_Drought_P Parameter: Plant Line Value: 35A19
  misc_feature: MA Experiment 108504 PARAMETER Experiment Name: Zm_Drought_P Parameter: Timepoint (hr) Value: 12
  misc_feature: MA Experiment 108504 PARAMETER Experiment Name: Zm_Drought_P Parameter: Tissue Value: Aerial
  misc_feature: MA Experiment 108504 PARAMETER Experiment Name: Zm_Drought_P Parameter: Treatment Value: Drought vs. No Drought
  misc_feature: MA Experiment ID: 108522 Result: Up-regulated in Transcription
  misc_feature: MA Experiment 108522 PARAMETER Experiment Name: Zm_42deg_Heat_P Parameter: Age (day) Value: 8
  misc_feature: MA Experiment 108522 PARAMETER Experiment Name: Zm_42deg_Heat_P Parameter: Organism Value: Zea mays
  misc_feature: MA Experiment 108522 PARAMETER Experiment Name: Zm_42deg_Heat_P Parameter: Plant Line Value: 35A19
  misc_feature: MA Experiment 108522 PARAMETER Experiment Name: Zm_42deg_Heat_P Parameter: Temperature (deg C) Value: 42 vs. 22
  misc_feature: MA Experiment 108522 PARAMETER Experiment Name: Zm_42deg_Heat_P Parameter: Timepoint (hr) Value: 1
  misc_feature: MA Experiment 108522 PARAMETER Experiment Name: Zm_42deg_Heat_P Parameter: Tissue Value: Aerial
  misc_feature: MA Experiment ID: 108536 Result: Down-regulated in Transcription
  misc_feature: MA Experiment 108536 PARAMETER Experiment Name: Zm_Meristem_P Parameter: Age (day) Value: 8
  misc_feature: MA Experiment 108536 PARAMETER Experiment Name: Zm_Meristem_P Parameter: Organism Value: Zea mays
  misc_feature: MA Experiment 108536 PARAMETER Experiment Name: Zm_Meristem_P Parameter: Plant Line Value: 35A19
  misc_feature: MA Experiment 108536 PARAMETER Experiment Name: Zm_Meristem_P Parameter: Tissue Value: Shoot Meristem vs. Above Shoot Meristem
  misc_feature: MA Experiment ID: 108543 Result: Up-regulated in Transcription
  misc_feature: MA Experiment ID: 108559 Result: Up-regulated in Transcription
  misc_feature: MA Experiment 108559 PARAMETER Experiment Name: Zm_5mM_NO_P Parameter: Age (day) Value: 8
  misc_feature: MA Experiment 108559 PARAMETER Experiment Name: Zm_5mM_NO_P Parameter: Organism Value: Zea mays
  misc_feature: MA Experiment 108559 PARAMETER Experiment Name: Zm_5mM_NO_P Parameter: Plant Line Value: 35A19
  misc_feature: MA Experiment 108559 PARAMETER Experiment Name: Zm_5mM_NO_P Parameter: Timepoint (hr) Value: 12
  misc_feature: MA Experiment 108559 PARAMETER Experiment Name: Zm_5mM_NO_P Parameter: Tissue Value: Aerial
  misc_feature: MA Experiment 108559 PARAMETER Experiment Name: Zm_5mM_NO_P Parameter: Treatment Value: 5mM NO vs. No Treatment
  misc_feature: MA Experiment ID: 20000492 Result: Down-regulated in Transcription
  misc_feature: MA Experiment 20000492 PARAMETER Experiment Name: Zm_Hybrid_Seed_Dev_P Parameter: DAP Value: 12
  misc_feature: MA Experiment 20000492 PARAMETER Experiment Name: Zm_Hybrid_Seed_Dev_P Parameter: Organism Value: Zea mays
  misc_feature: MA Experiment 20000492 PARAMETER Experiment Name: Zm_Hybrid_Seed_Dev_P Parameter: Plant Line Value: 35A19
  misc_feature: MA Experiment 20000492 PARAMETER Experiment Name: Zm_Hybrid_Seed_Dev_P Parameter: Tissue Value: Fert Kernel vs. Unfert Floret
accaccgcatcccacaccgggcacaccccccgagctcagcttagctccactccagctccaatcacagtcgtgaccagagcgcgagagctagctagagggccgtgaaaatgccgatcaataggatcgccctggggagccaccaggaggtgtaccacccgggcgccctcaaggcggcgttcgctgagttcatctccaccctcatcttcgtcttcgccggccagggctccggcatggccttcagcaagctgaccggcggcggcccgacgaccccggcgggcctgatcgcggcggcggtggcgcacgcgttcgcgctgttcgtggcggtgtcggtgggcgcgaacatctcgggcgggcacgtgaacccggccgtgaccttcggcgccttcgtgggcggcaacatcaccctgttccgggggctcctgtactgggtggcgcagctgctggggtccaccgtggcgtgcttcctgctccgcttctcgacgggcgggcaggccacgggcaccttcgggctgacgggcgtgtcggtgtgggaggcgctggtgctggagatcgtgatgaccttcgggctggtgtacacggtgtacgccacggcggtggacccgaagaagggcagcctgggcaccatcgcccccatcgccatcggcttcatcgtgggggccaacatcctggtgggcggcgccttcgacggcgcgtccatgaaccccgccgtgtccttcggccccgccctcgtcagctgggagtggggctaccagtgggtgtactgggtcggccccctcatcggcggcggcctcgccggcgtcatctacgagctgctcttcatctcccacacccacgagcagctcccctccaccgactactaaaagccgaagccgaccgacccaggggtgcgcagcgcagcgcagctagcatccagctctctctccccggcccgctcgccgccgtttagtttctctcgtgcacgtgcatgcatcgtagactgtctcaggccgccgctgcgccggcgccgctcgcatcgtttgcttttccttggaccagcagtcgtcgccgtcaggttgagctgcttgtaaccgttaattccggacccgtttgcttctgtaagatttgtgcatttgcctgtgagtattcaccggcc

SEQ ID NO: 15615 - protein, 250 aa, Zea mays subsp. mays; identical to SEQ ID NO: 15013
  peptide (1)..(250): Ceres Seq. ID no. 13579673
  misc_feature (13)..(233): Pfam Name: Major intrinsic protein Pfam Description: Major intrinsic protein
  misc_feature (1)..(250): Homolog of NCBI NO: 3004950 NR Description: tonoplast intrinsic protein; ZmTIP1 [Zea mays]
  misc_feature (1)..(250): Homolog of NCBI NO: 1729971 NR Description: TONOPLAST INTRINSIC PROTEIN, GAMMA (GAMMA TIP)
  misc_feature (1)..(250): Homolog of NCBI NO: 629784 NR Description: tonoplast intrinsic protein gamma - barley
  misc_feature (1)..(250): Homolog of NCBI NO: 4099406 NR Description: gamma-type tonoplast intrinsic protein [Triticum
  misc_feature (1)..(250): Homolog of NCBI NO: 6478150 NR Description: putative gamma tonoplast intrinsic protein (TIP)
  misc_feature (1)..(250): Homolog of NCBI NO: 12006843 NR Description: putative gamma TIP [Nicotiana glauca]
  misc_feature (1)..(250): Homolog of NCBI NO: 4138262 NR Description: aquaporin 1 [Nicotiana tabacum]
  misc_feature (1)..(250): Homolog of NCBI NO: 17940748 NR Description: aquaporin-like protein [Petunia x hybrida]
  misc_feature (1)..(250): Homolog of NCBI NO: 8699604 NR Description: putative aquaporin TIP3 [Vitis berlandieri x
  misc_feature (1)..(250): Homolog of NCBI NO: 9988412 NR Description: gamma tonoplast intrinsic protein [Pyrus communis]

SEQ ID NO: 15616 - protein, 209 aa, Zea mays subsp. mays; identical to SEQ ID NO: 15014
  peptide (1)..(209): Ceres Seq. ID no. 13579674
  misc_feature (1)..(192): Pfam Name: Major intrinsic protein Pfam Description: Major intrinsic protein
  misc_feature (1)..(209): Homolog of NCBI NO: 3004950 NR Description: tonoplast intrinsic protein; ZmTIP1 [Zea mays]
  misc_feature (1)..(209): Homolog of NCBI NO: 1729971 NR Description: TONOPLAST INTRINSIC PROTEIN, GAMMA (GAMMA TIP)
  misc_feature (1)..(209): Homolog of NCBI NO: 629784 NR Description: tonoplast intrinsic protein gamma - barley
  misc_feature (1)..(209): Homolog of NCBI NO: 4099406 NR Description: gamma-type tonoplast intrinsic protein [Triticum
  misc_feature (1)..(209): Homolog of NCBI NO: 6478150 NR Description: putative gamma tonoplast intrinsic protein (TIP)
  misc_feature (1)..(209): Homolog of NCBI NO: 12006843 NR Description: putative gamma TIP [Nicotiana glauca]
  misc_feature (1)..(209): Homolog of NCBI NO: 4138262 NR Description: aquaporin 1 [Nicotiana tabacum]
  misc_feature (1)..(209): Homolog of NCBI NO: 17940748 NR Description: aquaporin-like protein [Petunia x hybrida]
  misc_feature (1)..(209): Homolog of NCBI NO: 8699604 NR Description: putative aquaporin TIP3 [Vitis berlandieri x
  misc_feature (1)..(209): Homolog of NCBI NO: 9988412 NR Description: gamma tonoplast intrinsic protein [Pyrus communis]

SEQ ID NO: 15617 - DNA, 420 bp, Zea mays subsp. mays
  misc_feature (1)..(420): Ceres Seq. ID no. 11412440
  misc_feature: MA Experiment ID: 108515 Result: Up-regulated in Transcription
  misc_feature: MA Experiment 108515 PARAMETER Experiment Name: Zm_2mM_SA_P Parameter: Age (day) Value: 8
  misc_feature: MA Experiment 108515 PARAMETER Experiment Name: Zm_2mM_SA_P Parameter: Organism Value: Zea mays
  misc_feature: MA Experiment 108515 PARAMETER Experiment Name: Zm_2mM_SA_P Parameter: Plant Line Value: 35A19
  misc_feature: MA Experiment 108515 PARAMETER Experiment Name: Zm_2mM_SA_P Parameter: Timepoint (hr) Value: 12
  misc_feature: MA Experiment 108515 PARAMETER Experiment Name: Zm_2mM_SA_P Parameter: Tissue Value: Aerial
  misc_feature: MA Experiment 108515 PARAMETER Experiment Name: Zm_2mM_SA_P Parameter: Treatment Value: 2mM SA vs. No Treatment
  misc_feature: MA Experiment ID: 20000478 Result: Up-regulated in Transcription
  misc_feature: MA Experiment 20000478 PARAMETER Experiment Name: Zm_5mM_SA_P Parameter: Age (day) Value: 11
  misc_feature: MA Experiment 20000478 PARAMETER Experiment Name: Zm_5mM_SA_P Parameter: Organism Value: Zea mays
  misc_feature: MA Experiment 20000478 PARAMETER Experiment Name: Zm_5mM_SA_P Parameter: Plant Line Value: 35A19
  misc_feature: MA Experiment 20000478 PARAMETER Experiment Name: Zm_5mM_SA_P Parameter: Timepoint (hr) Value: 72
  misc_feature: MA Experiment 20000478 PARAMETER Experiment Name: Zm_5mM_SA_P Parameter: Tissue Value: Aerial
  misc_feature: MA Experiment 20000478 PARAMETER Experiment Name: Zm_5mM_SA_P Parameter: Treatment Value: 5mM SA vs. No Treatment
gggcctctcgcctgccagaccgcgataacggtgttcgacaagatcacgagacccggtttcctggccgaggtgtccaggaaaggggagagcttcaagcagctgctccgcgccaagctgagcgggaacccgcacgtgagggaggtccgcggggtcggccttctcgtcggcgtcgagctggacgtgccggctggtcctctggtcgacgcgtgcttggacgccggcgtcatcgtgctgactgccggtaagggcaatgtggtgaggctggtgccgccgctcatcgtctcggagaaggagctggagcatgccgctgatgtcataagggactgtctaccggcgctcgatgtccggatatgaaacctgattccaaattttggaatcgaataatttcatgtcgggccaataatgttgttgtgttcattg

SEQ ID NO: 15618 - protein, 117 aa, Zea mays subsp. mays
  peptide (1)..(117): Ceres Seq. ID no. 11412441
  misc_feature (1)..(114): Pfam Name: Aminotransferase class-III Pfam Description: Aminotransferase class-III
  misc_feature (1)..(114): Homolog of NCBI NO: 2811029 NR Description: Acetylornithine aminotransferase, mitochondrial (ACOAT) (Acetylornithine transaminase) (AOTA)
  misc_feature (2)..(114): Homolog of NCBI NO: 15220176 NR Description: putative acetylornithine transaminase; protein At1g80600.1, supported by cDNA: 19586., supported by cDNA: [Arabidopsis thaliana] >gi|25406676|pir||B96838 hypothetical
  misc_feature (1)..(87): Homolog of NCBI NO: 34394063 NR Description: putative acetylornithine aminotransferase [Oryza
  misc_feature (2)..(114): Homolog of NCBI NO: 21554043 NR Description: putative acetylornithine transaminase
  misc_feature (2)..(110): Homolog of NCBI NO: 20808850 NR Description: PLP-dependent aminotransferases
  misc_feature (2)..(115): Homolog of NCBI NO: 15615460 NR Description: N-acetylornithine aminotransferase [Bacillus >gi|28376948|sp|Q9K8V5|ARGD_BACHD Acetylornithine
  misc_feature (1)..(113): Homolog of NCBI NO: 33600973 NR Description: putative acetylornithine aminotransferase bronchiseptica] >gi|33575408|emb|CAE32485.1| putative
  misc_feature (1)..(113): Homolog of NCBI NO: 33597129 NR Description: putative acetylornithine aminotransferase parapertussis] >gi|33566580|emb|CAE37837.1| putative
  misc_feature (1)..(113): Homolog of NCBI NO: 33594410 NR Description: putative acetylornithine aminotransferase pertussis] >gi|33564485|emb|CAE43798.1| putative acetylornithine
  misc_feature (3)..(110): Homolog of NCBI NO: 16803628 NR Description: highly similar to N-acetylornithine
GPLACQTAITVFDKITRPGFLAEVSRKGESFKQLLRAKLSGNPHVREVRGVGLLVGVELDVPAGPLVDACLDAGVIVLTAGKGNVVRLVPPLIVSEKELEHAADVIRDCLPALDVRI

SEQ ID NO: 15619 - protein, 80 aa, Zea mays subsp. mays
  peptide (1)..(80): Ceres Seq. ID no. 11412442
ASRLPDRDNGVRQDHETRFPGRGVQERGELQAAAPRQAEREPAREGGPRGRPSRRRRAGRAGWSSGRRVLGRRRHRADCR

SEQ ID NO: 15620 - DNA, 482 bp, Zea mays subsp. mays
  misc_feature (1)..(482): Ceres Seq. ID no. 11412782
  misc_feature: MA Experiment ID: 20000534 Result: Down-regulated in Transcription
  misc_feature: MA Experiment 20000534 PARAMETER Experiment Name: Zm_Hybrid_Pollen_P Parameter: Age (day) Value: 8
  misc_feature: MA Experiment 20000534 PARAMETER Experiment Name: Zm_Hybrid_Pollen_P Parameter: Organism Value: Zea mays
  misc_feature: MA Experiment 20000534 PARAMETER Experiment Name: Zm_Hybrid_Pollen_P Parameter: Plant Line Value: 35A19
  misc_feature: MA Experiment 20000534 PARAMETER Experiment Name: Zm_Hybrid_Pollen_P Parameter: Tissue Value: Pollen vs. Aerial
ggcgagatggtcggctcgaggaacgtgagggacaggcagccgctgatgggcgccgaggacttcgcgttctacgccgaggcggtcccttccacctactactacttcgtgggcatgtacaacgagacgcgcgggccgcaggcgccccaccactccccctacttcaccgtcaacgaagacgccctcccctacggcgcggccgggcaggcggcgctggcagctcgctacctactcgagcgtcagcagcctgctgccgccaccgctgataaggcagaaacccatgatgagctgtagattagtacatgatgtttgcgtccctgtccctgtgttgatggaattagattgagcaataatttcctcgccaagttattcagcggctgtacatatcctggtatctccatggcccatgctttggtaatgatcggttgggatcaggcattatttggtccagacgttcagtcagagctatttgcaattcgtttgat

SEQ ID NO: 15621 - protein, 96 aa, Zea mays subsp. mays
  peptide (1)..(96): Ceres Seq. ID no. 11412783
  misc_feature (2)..(77): Pfam Name: Peptidase family M20/M25/M40 Pfam Description: Peptidase family M20/M25/M40
  misc_feature (2)..(96): Homolog of NCBI NO: 34914096 NR Description: putative IAA-Ala hydrolase [Oryza sativa
  misc_feature (2)..(96): Homolog of NCBI NO: 27948556 NR Description: IAA-amino acid hydrolase [Oryza sativa (indica
  misc_feature (1)..(96): Homolog of NCBI NO: 15218027 NR Description: IAA-Ala hydrolase (IAR3); protein id:
  misc_feature (1)..(96): Homolog of NCBI NO: 2181184 NR Description: JR3 protein [Arabidopsis thaliana]
  misc_feature (2)..(78): Homolog of NCBI NO: 15218029 NR Description: auxin conjugate hydrolase (ILL5); protein id: [Arabidopsis thaliana] >gi|25319490|pir||H96556 auxin conjugate
  misc_feature (13)..(96): Homolog of NCBI NO: 34910396 NR Description: putative IAA-Ala hydrolase [Oryza sativa
  misc_feature (2)..(96): Homolog of NCBI NO: 902791 NR Description: ILL2
  misc_feature (2)..(96): Homolog of NCBI NO: 15241894 NR Description: IAA-amino acid hydrolase (gb|AAC04866.1); protein At5g56660.1, supported by cDNA: gi_18175666, supported by cDNA:
  misc_feature (2)..(96): Homolog of NCBI NO: 18175667 NR Description: IAA-amino acid hydrolase [Arabidopsis thaliana]
  misc_feature (2)..(96): Homolog of NCBI NO: 15241892 NR Description: IAA-amino acid hydrolase homolog 1 precursor protein id: At5g56650.1, supported by cDNA: gi_902788
GEMVGSRNVRDRQPLMGAEDFAFYAEAVPSTYYYFVGMYNETRGPQAPHHSPYFTVNEDALPYGAAGQAALAARYLLERQQPAAATADKAETHDEL

SEQ ID NO: 15622 - protein, 94 aa, Zea mays subsp. mays
  peptide (1)..(94): Ceres Seq. ID no. 11412784
  misc_feature (1)..(75): Pfam Name: Peptidase family M20/M25/M40 Pfam Description: Peptidase family M20/M25/M40
  misc_feature (1)..(94): Homolog of NCBI NO: 34914096 NR Description: putative IAA-Ala hydrolase [Oryza sativa
  misc_feature (1)..(94): Homolog of NCBI NO: 27948556 NR Description: IAA-amino acid hydrolase [Oryza sativa (indica
  misc_feature (1)..(94): Homolog of NCBI NO: 15218027 NR Description: IAA-Ala hydrolase (IAR3); protein id:
  misc_feature (1)..(94): Homolog of NCBI NO: 2181184 NR Description: JR3 protein [Arabidopsis thaliana]
  misc_feature (1)..(76): Homolog of NCBI NO: 15218029 NR Description: auxin conjugate hydrolase (ILL5); protein id: [Arabidopsis thaliana] >gi|25319490|pir||H96556 auxin conjugate
  misc_feature (11)..(94): Homolog of NCBI NO: 34910396 NR Description: putative IAA-Ala hydrolase [Oryza sativa
  misc_feature (1)..(94): Homolog of NCBI NO: 902791 NR Description: ILL2
  misc_feature (1)..(94): Homolog of NCBI NO: 18175667 NR Description: IAA-amino acid hydrolase [Arabidopsis thaliana]
  misc_feature (1)..(94): Homolog of NCBI NO: 15241894 NR Description: IAA-amino acid hydrolase (gb|AAC04866.1); protein At5g56660.1, supported by cDNA: gi_18175666, supported by cDNA:
  misc_feature (1)..(94): Homolog of NCBI NO: 15241892 NR Description: IAA-amino acid hydrolase homolog 1 precursor protein id: At5g56650.1, supported by cDNA: gi_902788
MVGSRNVRDRQPLMGAEDFAFYAEAVPSTYYYFVGMYNETRGPQAPHHSPYFTVNEDALPYGAAGQAALAARYLLERQQPAAATADKAETHDEL

SEQ ID NO: 15623 - protein, 86 aa, Zea mays subsp. mays
  peptide (1)..(86): Ceres Seq. ID no. 11412785
RDGRLEEREGQAAADGRRGLRVLRRGGPFHLLLLRGHVQRDARAAGAPPLPLLHRQRRRPPLRRGRAGGAGSSLPTRASAACCRHR

SEQ ID NO: 15624 - DNA, 695 bp, Zea mays subsp. mays
  misc_feature (1)..(695): Ceres Seq. ID no. 11412660
  misc_feature: MA Experiment ID: 108536 Result: Up-regulated in Transcription
  misc_feature: MA Experiment 108536 PARAMETER Experiment Name: Zm_Meristem_P Parameter: Age (day) Value: 8
  misc_feature: MA Experiment 108536 PARAMETER Experiment Name: Zm_Meristem_P Parameter: Organism Value: Zea mays
  misc_feature: MA Experiment 108536 PARAMETER Experiment Name: Zm_Meristem_P Parameter: Plant Line Value: 35A19
  misc_feature: MA Experiment 108536 PARAMETER Experiment Name: Zm_Meristem_P Parameter: Tissue Value: Shoot Meristem vs. Above Shoot Meristem
  misc_feature: MA Experiment ID: 20000478 Result: Up-regulated in Transcription
  misc_feature: MA Experiment 20000478 PARAMETER Experiment Name: Zm_5mM_SA_P Parameter: Age (day) Value: 11
  misc_feature: MA Experiment 20000478 PARAMETER Experiment Name: Zm_5mM_SA_P Parameter: Organism Value: Zea mays
  misc_feature: MA Experiment 20000478 PARAMETER Experiment Name: Zm_5mM_SA_P Parameter: Plant Line Value: 35A19
  misc_feature: MA Experiment 20000478 PARAMETER Experiment Name: Zm_5mM_SA_P Parameter: Timepoint (hr) Value: 72
  misc_feature: MA Experiment 20000478 PARAMETER Experiment Name: Zm_5mM_SA_P Parameter: Tissue Value: Aerial
  misc_feature: MA Experiment 20000478 PARAMETER Experiment Name: Zm_5mM_SA_P Parameter: Treatment Value: 5mM SA vs. No Treatment
atcctctacaagcccggcgaacatccggatcacgtaatcgtgatcaagtacatcccctacgtgggtgacagcaagagggctatggacgagtatacctctgagatcttcatgggtggcaagaacaccatcgcgctgcacaacacctgcgaggactcgcttctcgccgcgcccatcatccttgacttggtgctcctagctgagctcagcactcggattcagctcaaggccgaagggcaggataagttccactccttccaccctgtcgccactattctgagctacctcagcaaggctcctcttgtacctcctggcacaccagtggtgaatgctctagccaagcagagggccatgctggaaaacatcttgcgggcctgcattggccttgcccctgagaacaacatgatgcttgagcacaagtgaagagtttcacgtcccttaattaactaccacaagataggatgaatggaaaaaggagggatcaagcgaaggtgtgggaataatcagtgactcctctgagcccaacgaagaaatgtcaggaggctacaggaaggagaagtgtaaggagagaagaccaagcatggatatatcctcttttcgaaggcaatctatctannnnttttttgtagatttgactcgttttttgtactcgtgggacgagattgtgtactggctatatatccactgtatgcagcatg

SEQ ID NO: 15625 - protein, 139 aa, Zea mays subsp. mays
  peptide (1)..(139): Ceres Seq. ID no. 11412661
  misc_feature (1)..(124): Pfam Name: Myo-inositol-1-phosphate synthase Pfam Description: Myo-inositol-1-phosphate synthase
  misc_feature (1)..(139): Homolog of NCBI NO: 37533568 NR Description: putative Myo-inositol-1-phosphate synthase
  misc_feature (1)..(139): Homolog of NCBI NO: 11762100 NR Description: myo-inositol 1-phosphate synthase [Zea mays]
  misc_feature (1)..(139): Homolog of NCBI NO: 14548094 NR Description: Inositol-3-phosphate synthase
  misc_feature (1)..(139): Homolog of NCBI NO: 18181983 NR Description: myo-inositol-1-phosphate synthase [Avena sativa]
  misc_feature (1)..(139): Homolog of NCBI NO: 14548096 NR Description: Inositol-3-phosphate synthase
  misc_feature (1)..(139): Homolog of NCBI NO: 14548099 NR Description: Inositol-3-phosphate synthase
  misc_feature (1)..(139): Homolog of NCBI NO: 32492882 NR Description: myo-inositol-1-phosphate synthase INO1 [Xerophyta
  misc_feature (1)..(139): Homolog of NCBI NO: 1170568 NR Description: Inositol-3-phosphate synthase
  misc_feature (1)..(139): Homolog of NCBI NO: 14548095 NR Description: Inositol-3-phosphate synthase
  misc_feature (1)..(139): Homolog of NCBI NO: 14548089 NR Description: Inositol-3-phosphate synthase
ILYKPGEHPDHVIVIKYIPYVGDSKRAMDEYTSEIFMGGKNTIALHNTCEDSLLAAPIILDLVLLAELSTRIQLKAEGQDKFHSFHPVATILSYLSKAPLVPPGTPVVNALAKQRAMLENILRACIGLAPENNMMLEHK

SEQ ID NO: 15626 - protein, 112 aa, Zea mays subsp. mays
  peptide (1)..(112): Ceres Seq. ID no. 11412662
  misc_feature (1)..(97): Pfam Name: Myo-inositol-1-phosphate synthase Pfam Description: Myo-inositol-1-phosphate synthase
  misc_feature (1)..(112): Homolog of NCBI NO: 37533568 NR Description: putative Myo-inositol-1-phosphate synthase
  misc_feature (1)..(112): Homolog of NCBI NO: 11762100 NR Description: myo-inositol 1-phosphate synthase [Zea mays]
  misc_feature (1)..(112): Homolog of NCBI NO: 14548094 NR Description: Inositol-3-phosphate synthase
  misc_feature (1)..(112): Homolog of NCBI NO: 18181983 NR Description: myo-inositol-1-phosphate synthase [Avena sativa]
  misc_feature (1)..(112): Homolog of NCBI NO: 14548096 NR Description: Inositol-3-phosphate synthase
  misc_feature (1)..(112): Homolog of NCBI NO: 14548099 NR Description: Inositol-3-phosphate synthase
  misc_feature (1)..(112): Homolog of NCBI NO: 32492882 NR Description: myo-inositol-1-phosphate synthase INO1 [Xerophyta
  misc_feature (1)..(112): Homolog of NCBI NO: 1170568 NR Description: Inositol-3-phosphate synthase
  misc_feature (1)..(112): Homolog of NCBI NO: 14548095 NR Description: Inositol-3-phosphate synthase
  misc_feature (1)..(112): Homolog of NCBI NO: 14548089 NR Description: Inositol-3-phosphate synthase
MDEYTSEIFMGGKNTIALHNTCEDSLLAAPIILDLVLLAELSTRIQLKAEGQDKFHSFHPVATILSYLSKAPLVPPGTPVVNALAKQRAMLENILRACIGLAPENNMMLEHK

SEQ ID NO: 15627 - protein, 103 aa, Zea mays subsp. mays
  peptide (1)..(103): Ceres Seq. ID no. 11412663
  misc_feature (1)..(88): Pfam Name: Myo-inositol-1-phosphate synthase Pfam Description: Myo-inositol-1-phosphate synthase
  misc_feature (1)..(103): Homolog of NCBI NO: 37533568 NR Description: putative Myo-inositol-1-phosphate synthase
  misc_feature (1)..(103): Homolog of NCBI NO: 11762100 NR Description: myo-inositol 1-phosphate synthase [Zea mays]
  misc_feature (1)..(103): Homolog of NCBI NO: 14548094 NR Description: Inositol-3-phosphate synthase
  misc_feature (1)..(103): Homolog of NCBI NO: 18181983 NR Description: myo-inositol-1-phosphate synthase [Avena sativa]
  misc_feature (1)..(103): Homolog of NCBI NO: 14548096 NR Description: Inositol-3-phosphate synthase
  misc_feature (1)..(103): Homolog of NCBI NO: 14548099 NR Description: Inositol-3-phosphate synthase
  misc_feature (1)..(103): Homolog of NCBI NO: 32492882 NR Description: myo-inositol-1-phosphate synthase INO1 [Xerophyta
  misc_feature (1)..(103): Homolog of NCBI NO: 1170568 NR Description: Inositol-3-phosphate synthase
  misc_feature (1)..(103): Homolog of NCBI NO: 14548095 NR Description: Inositol-3-phosphate synthase
  misc_feature (1)..(103): Homolog of NCBI NO: 14548089 NR Description: Inositol-3-phosphate synthase
MGGKNTIALHNTCEDSLLAAPIILDLVLLAELSTRIQLKAEGQDKFHSFHPVATILSYLSKAPLVPPGTPVVNALAKQRAMLENILRACIGLAPENNMMLEHK

SEQ ID NO: 15628 - DNA, 450 bp, Zea mays subsp. mays; identical to SEQ ID NO: 14059
  misc_feature (1)..(450): Ceres Seq. ID no. 13635772
  misc_feature: MA Experiment ID: 20000492 Result: Up-regulated in Transcription
  misc_feature: MA Experiment 20000492 PARAMETER Experiment Name: Zm_Hybrid_Seed_Dev_P Parameter: DAP Value: 12
  misc_feature: MA Experiment 20000492 PARAMETER Experiment Name: Zm_Hybrid_Seed_Dev_P Parameter: Organism Value: Zea mays
  misc_feature: MA Experiment 20000492 PARAMETER Experiment Name: Zm_Hybrid_Seed_Dev_P Parameter: Plant Line Value: 35A19
  misc_feature: MA Experiment 20000492 PARAMETER Experiment Name: Zm_Hybrid_Seed_Dev_P Parameter: Tissue Value: Fert Kernel vs. Unfert Floret

SEQ ID NO: 15629 - protein, 150 aa, Zea mays subsp. mays; identical to SEQ ID NO: 14060
  peptide (1)..(150): Ceres Seq. ID no. 13635773

SEQ ID NO: 15630 - protein, 134 aa, Zea mays subsp. mays; identical to SEQ ID NO: 14061
  peptide (1)..(134): Ceres Seq. ID no. 13635774
  misc_feature (56)..(133): Pfam Name: Peroxidase Pfam Description: Peroxidase
  misc_feature (56)..(133): Pfam Name: Peroxidase Pfam Description: Peroxidase
  misc_feature (22)..(133): Homolog of NCBI NO: 34903770 NR Description: unnamed protein product [Oryza sativa (japonica group)] >gi|7340877|dbj|BAA92967.1| unnamed protein product
  misc_feature (20)..(133): Homolog of NCBI NO: 5453379 NR Description: bacterial-induced peroxidase precursor [Gossypium
  misc_feature (17)..(133): Homolog of NCBI NO: 2117619 NR Description: peroxidase (EC 1.11.1.7) 4 precursor - wheat
  misc_feature (20)..(133): Homolog of NCBI NO: 34393249 NR Description: putative peroxidase precursor [Oryza sativa
  misc_feature (22)..(133): Homolog of NCBI NO: 15237190 NR Description: peroxidase, putative [Arabidopsis thaliana] Peroxidase 68 precursor (Atperox P68) >gi|8777341|dbj|BAA96931.1| [Arabidopsis thaliana] >gi|26451590|dbj|BAC42892.1| putative
  misc_feature (20)..(133): Homolog of NCBI NO: 5453379 NR Description: bacterial-induced peroxidase precursor [Gossypium
  misc_feature (20)..(133): Homolog of NCBI NO: 34393249 NR Description: putative peroxidase precursor [Oryza sativa
  misc_feature (31)..(133): Homolog of NCBI NO: 34015359 NR Description: putative peroxidase [Oryza sativa (japonica
  misc_feature (27)..(133): Homolog of NCBI NO: 7433049 NR Description: peroxidase (EC 1.11.1.7) - flax (fragment)
  misc_feature (40)..(130): Homolog of NCBI NO: 4760704 NR Description: peroxidase 3 [Scutellaria baicalensis]
  misc_feature (20)..(133): Homolog of NCBI NO: 34393250 NR Description: peroxidase [Oryza sativa (japonica
  misc_feature (20)..(133): Homolog of NCBI NO: 2429288 NR Description: peroxidase [Oryza sativa]
  misc_feature (22)..(133): Homolog of NCBI NO: 15237190 NR Description: peroxidase, putative [Arabidopsis thaliana] Peroxidase 68 precursor (Atperox P68) >gi|8777341|dbj|BAA96931.1| [Arabidopsis thaliana] >gi|26451590|dbj|BAC42892.1| putative
  misc_feature (17)..(133): Homolog of NCBI NO: 2117619 NR Description: peroxidase (EC 1.11.1.7) 4 precursor - wheat
  misc_feature (22)..(133): Homolog of NCBI NO: 34903770 NR Description: unnamed protein product [Oryza sativa (japonica group)] >gi|7340877|dbj|BAA92967.1| unnamed protein product
  misc_feature (20)..(133): Homolog of NCBI NO: 2429288 NR Description: peroxidase [Oryza sativa]
  misc_feature (20)..(133): Homolog of NCBI NO: 34393250 NR Description: peroxidase [Oryza sativa (japonica
  misc_feature (40)..(130): Homolog of NCBI NO: 4760704 NR Description: peroxidase 3 [Scutellaria baicalensis]
  misc_feature (27)..(133): Homolog of NCBI NO: 7433049 NR Description: peroxidase (EC 1.11.1.7) - flax (fragment)
  misc_feature (31)..(133): Homolog of NCBI NO: 34015359 NR Description: putative peroxidase [Oryza sativa (japonica

SEQ ID NO: 15631 - protein, 128 aa, Zea mays subsp. mays; identical to SEQ ID NO: 14062
  peptide (1)..(128): Ceres Seq. ID no. 13635775
  misc_feature (50)..(127): Pfam Name: Peroxidase Pfam Description: Peroxidase
  misc_feature (50)..(127): Pfam Name: Peroxidase Pfam Description: Peroxidase
  misc_feature (16)..(127): Homolog of NCBI NO: 34903770 NR Description: unnamed protein product [Oryza sativa (japonica group)] >gi|7340877|dbj|BAA92967.1| unnamed protein product
  misc_feature (14)..(127): Homolog of NCBI NO: 5453379 NR Description: bacterial-induced peroxidase precursor [Gossypium
  misc_feature (11)..(127): Homolog of NCBI NO: 2117619 NR Description: peroxidase (EC 1.11.1.7) 4 precursor - wheat
  misc_feature (14)..(127): Homolog of NCBI NO: 34393249 NR Description: putative peroxidase precursor [Oryza sativa
  misc_feature (16)..(127): Homolog of NCBI NO: 15237190 NR Description: peroxidase, putative [Arabidopsis thaliana] Peroxidase 68 precursor (Atperox P68) >gi|8777341|dbj|BAA96931.1| [Arabidopsis thaliana] >gi|26451590|dbj|BAC42892.1| putative
  misc_feature (14)..(127): Homolog of NCBI NO: 5453379 NR Description: bacterial-induced peroxidase precursor [Gossypium
  misc_feature (14)..(127): Homolog of NCBI NO: 34393249 NR Description: putative peroxidase precursor [Oryza sativa
  misc_feature (25)..(127): Homolog of NCBI NO: 34015359 NR Description: putative peroxidase [Oryza sativa (japonica
  misc_feature (21)..(127): Homolog of NCBI NO: 7433049 NR Description: peroxidase (EC 1.11.1.7) - flax (fragment)
  misc_feature (34)..(124): Homolog of NCBI NO: 4760704 NR Description: peroxidase 3 [Scutellaria baicalensis]
  misc_feature (14)..(127): Homolog of NCBI NO: 34393250 NR Description: peroxidase [Oryza sativa (japonica
  misc_feature (14)..(127): Homolog of NCBI NO: 2429288 NR Description: peroxidase [Oryza sativa]
  misc_feature (16)..(127): Homolog of NCBI NO: 15237190 NR Description: peroxidase, putative [Arabidopsis thaliana] Peroxidase 68 precursor (Atperox P68) >gi|8777341|dbj|BAA96931.1| [Arabidopsis thaliana] >gi|26451590|dbj|BAC42892.1| putative
  misc_feature (11)..(127): Homolog of NCBI NO: 2117619 NR Description: peroxidase (EC 1.11.1.7) 4 precursor - wheat
  misc_feature (16)..(127): Homolog of NCBI NO: 34903770 NR Description: unnamed protein product [Oryza sativa (japonica group)] >gi|7340877|dbj|BAA92967.1| unnamed protein product
  misc_feature (14)..(127): Homolog of NCBI NO: 2429288 NR Description: peroxidase [Oryza sativa]
  misc_feature (14)..(127): Homolog of NCBI NO: 34393250 NR Description: peroxidase [Oryza sativa (japonica
  misc_feature (34)..(124): Homolog of NCBI NO: 4760704 NR Description: peroxidase 3 [Scutellaria baicalensis]
  misc_feature (21)..(127): Homolog of NCBI NO: 7433049 NR Description: peroxidase (EC 1.11.1.7) - flax (fragment)
  misc_feature (25)..(127): Homolog of NCBI NO: 34015359 NR Description: putative peroxidase [Oryza sativa (japonica

SEQ ID NO: 15632 - DNA, 1064 bp, Zea mays subsp. mays
  misc_feature (1)..(1064): Ceres Seq. ID no. 12405342
  misc_feature: MA Experiment ID: 20000477 Result: Down-regulated in Transcription
  misc_feature: MA Experiment 20000477 PARAMETER Experiment Name: Zm_5mM_SA_P Parameter: Age (day) Value: 10
  misc_feature: MA Experiment 20000477 PARAMETER Experiment Name: Zm_5mM_SA_P Parameter: Organism Value: Zea mays
  misc_feature: MA Experiment 20000477 PARAMETER Experiment Name: Zm_5mM_SA_P Parameter: Plant Line Value: 35A19
  misc_feature: MA Experiment 20000477 PARAMETER Experiment Name: Zm_5mM_SA_P Parameter: Timepoint (hr) Value: 48
  misc_feature: MA Experiment 20000477 PARAMETER Experiment Name: Zm_5mM_SA_P Parameter: Tissue Value: Aerial
  misc_feature: MA Experiment 20000477 PARAMETER Experiment Name: Zm_5mM_SA_P Parameter: Treatment Value: 5mM SA vs. No Treatment
  misc_feature: MA Experiment ID: 20000479 Result: Down-regulated in Transcription
  misc_feature: MA Experiment 20000479 PARAMETER Experiment Name: Zm_Drought_P Parameter: Age (day) Value: 10
  misc_feature: MA Experiment 20000479 PARAMETER Experiment Name: Zm_Drought_P Parameter: Organism Value: Zea mays
  misc_feature: MA Experiment 20000479 PARAMETER Experiment Name: Zm_Drought_P Parameter: Plant Line Value: 35A19
  misc_feature: MA Experiment 20000479 PARAMETER Experiment Name: Zm_Drought_P Parameter: Timepoint (hr) Value: 48
  misc_feature: MA Experiment 20000479 PARAMETER Experiment Name: Zm_Drought_P Parameter: Tissue Value: Aerial
  misc_feature: MA Experiment 20000479 PARAMETER Experiment Name: Zm_Drought_P Parameter: Treatment Value: Drought vs. No Drought
  misc_feature: MA Experiment ID: 20000535 Result: Up-regulated in Transcription
  misc_feature: MA Experiment 20000535 PARAMETER Experiment Name: Zm_Hybrid_Seed_Dev_P Parameter: DAP Value: 30 vs. 12
  misc_feature: MA Experiment 20000535 PARAMETER Experiment Name: Zm_Hybrid_Seed_Dev_P Parameter: Organism Value: Zea mays
  misc_feature: MA Experiment 20000535 PARAMETER Experiment Name: Zm_Hybrid_Seed_Dev_P Parameter: Plant Line Value: 35A19
  misc_feature: MA Experiment 20000535 PARAMETER Experiment Name: Zm_Hybrid_Seed_Dev_P Parameter: Tissue Value: Embryo vs. Unfert Floret
  misc_feature: MA Experiment ID: 20000632 Result: Down-regulated in Transcription
  misc_feature: MA Experiment 20000632 PARAMETER Experiment Name: Zm_Herbicide-Treatments_P Parameter: Timepoint (hr) Value: 4
  misc_feature: MA Experiment 20000632 PARAMETER Experiment Name: Zm_Herbicide-Treatments_P Parameter: Tissue Value: Aerial
  misc_feature: MA Experiment 20000632 PARAMETER Experiment Name: Zm_Herbicide-Treatments_P Parameter: Treatment Value: Glean vs. No Treatment
gaaaactacccacaccacaaagaaatcgaagaggggaacagagaggagagagaagggagatggcggaggcgacggcgtacgaggagcagcgccggaggcaggtggaggcgaacaagcgaaagctggaggagcttcagctccactacctctccgccgccgtcagagaggccgcagccgccgccaagccctcgccggtcaagaagcggaaggcgcgggtgccgcttgacgccgccgactccgtgatggagccactacggcggtccggccggctcgccaacctccccgataagtccgtgcaccgcgaggaggttccaactttttggagaaagattaggaggacgtatggatcagtgagaaaagatctggaaaaccgggtgtacgcgaccgacgaggcgaggggctacgccatctgtaaggcggaagaagtggagcaagagctggactccagcttccccgtcttcatcaaacccatgacccagtcccatgtcaccggaggcttctggctgggcctcccaaatcatttctgccggaagtacctgcccaagcgtgacgagacgatcaccctgctggatgaggatgacaacgagtcctacacgctatacctcgcattgaagcgaggcctcagcgctggatggagagggttcgctatccagcacaagctggttgatggagattgcttggtcttccagctgactgagagaacaaagttcaaggtaatcataattagagcaagttcttactatgaaagtgaggactgatgaaactaatagcttgtaatgcggtgattggagcacagtttatggaggtgggctgcattggacaagctcgcatctggaaattgctgggtgtcttgaaccttttgggtgacagaaagttatctcatgtacaaaatgtttacacagcccagttgctaccaattgctgatttgtgtacttcttgggctttaccacttgcacggttcagaaacctgcactatgtaaggggatgttgatggcaattgacctcattttgtaaatgatcctcgtttatcttggattcatttttagtgttcagtttggcagttg

SEQ ID NO: 15633 - protein, 251 aa, Zea mays subsp. mays
  peptide (1)..(251): Ceres Seq. ID no. 12405343
  misc_feature (153)..(244): Pfam Name: B3 DNA binding domain Pfam Description: B3 DNA binding domain
  misc_feature (24)..(244): Homolog of NCBI NO: 15217278 NR Description: Unknown protein [Oryza sativa]
  misc_feature (20)..(244): Homolog of NCBI NO: 9294620 NR Description: gene_id:MVI11.9~unknown protein [Arabidopsis
  misc_feature (111)..(249): Homolog of NCBI NO: 30694114 NR Description: expressed protein [Arabidopsis thaliana]
  misc_feature (133)..(239): Homolog of NCBI NO: 34904376 NR Description: unnamed protein product [Oryza sativa (japonica group)] >gi|8467994|dbj|BAA96595.1| unnamed protein product
  misc_feature (23)..(244): Homolog of NCBI NO: 15237157 NR Description: unknown protein; protein id: At5g58280.1 thaliana] >gi|10176791|dbj|BAA96919.2| gene_id:MCK7.15~unknown
  misc_feature (111)..(168): Homolog of NCBI NO: 10177273 NR Description: gene_id:MJB21.7~unknown protein [Arabidopsis
KLPTPQRNRRGEQRGERREMAEATAYEEQRRRQVEANKRKLEELQLHYLSAAVREAAAAAKPSPVKKRKARVPLDAADSVMEPLRRSGRLANLPDKSVHREEVPTFWRKIRRTYGSVRKDLENRVYATDEARGYAICKAEEVEQELDSSFPVFIKPMTQSHVTGGFWLGLPNHFCRKYLPKRDETITLLDEDDNESYTLYLALKRGLSAGWRGFAIQHKLVDGDCLVFQLTERTKFKVIIIRASSYYESED

SEQ ID NO: 15634 - protein, 232 aa, Zea mays subsp. mays
  peptide (1)..(232): Ceres Seq. ID no. 12405344
  misc_feature (134)..(225): Pfam Name: B3 DNA binding domain Pfam Description: B3 DNA binding domain
  misc_feature (5)..(225): Homolog of NCBI NO: 15217278 NR Description: Unknown protein [Oryza sativa]
  misc_feature (1)..(225): Homolog of NCBI NO: 9294620 NR Description: gene_id:MVI11.9~unknown protein [Arabidopsis
  misc_feature (92)..(230): Homolog of NCBI NO: 30694114 NR Description: expressed protein [Arabidopsis thaliana]
  misc_feature (114)..(220): Homolog of NCBI NO: 34904376 NR Description: unnamed protein product [Oryza sativa (japonica group)] >gi|8467994|dbj|BAA96595.1| unnamed protein product
  misc_feature (4)..(225): Homolog of NCBI NO: 15237157 NR Description: unknown protein; protein id: At5g58280.1 thaliana] >gi|10176791|dbj|BAA96919.2| gene_id:MCK7.15~unknown
  misc_feature (92)..(149): Homolog of NCBI NO: 10177273 NR Description: gene_id:MJB21.7~unknown protein [Arabidopsis
MAEATAYEEQRRRQVEANKRKLEELQLHYLSAAVREAAAAAKPSPVKKRKARVPLDAADSVMEPLRRSGRLANLPDKSVHREEVPTFWRKIRRTYGSVRKDLENRVYATDEARGYAICKAEEVEQELDSSFPVFIKPMTQSHVTGGFWLGLPNHFCRKYLPKRDETITLLDEDDNESYTLYLALKRGLSAGWRGFAIQHKLVDGDCLVFQLTERTKFKVIIIRASSYYESED

SEQ ID NO: 15635 - protein, 171 aa, Zea mays subsp. mays
  peptide (1)..(171): Ceres Seq. ID no. 12405345
  misc_feature (73)..(164): Pfam Name: B3 DNA binding domain Pfam Description: B3 DNA binding domain
  misc_feature (1)..(164): Homolog of NCBI NO: 15217278 NR Description: Unknown protein [Oryza sativa]
  misc_feature (1)..(164): Homolog of NCBI NO: 9294620 NR Description: gene_id:MVI11.9~unknown protein [Arabidopsis
  misc_feature (31)..(169): Homolog of NCBI NO: 30694114 NR Description: expressed protein [Arabidopsis thaliana]
  misc_feature (53)..(159): Homolog of NCBI NO: 34904376 NR Description: unnamed protein product [Oryza sativa (japonica group)] >gi|8467994|dbj|BAA96595.1| unnamed protein product
  misc_feature (1)..(164): Homolog of NCBI NO: 15237157 NR Description: unknown protein; protein id: At5g58280.1 thaliana] >gi|10176791|dbj|BAA96919.2| gene_id:MCK7.15~unknown
  misc_feature (31)..(88): Homolog of NCBI NO: 10177273 NR Description: gene_id:MJB21.7~unknown protein [Arabidopsis
MEPLRRSGRLANLPDKSVHREEVPTFWRKIRRTYGSVRKDLENRVYATDEARGYAICKAEEVEQELDSSFPVFIKPMTQSHVTGGFWLGLPNHFCRKYLPKRDETITLLDEDDNESYTLYLALKRGLSAGWRGFAIQHKLVDGDCLVFQLTERTKFKVIIIRASSYYESED

SEQ ID NO: 15636 - DNA, 1295 bp, Zea mays subsp. mays
  misc_feature (1)..(1295): Ceres Seq. ID no. 15179550
  misc_feature: MA Experiment ID: 108523 Result: Down-regulated in Transcription
  misc_feature: MA Experiment 108523 PARAMETER Experiment Name: Zm_42deg_Heat_P Parameter: Age (day) Value: 8
  misc_feature: MA Experiment 108523 PARAMETER Experiment Name: Zm_42deg_Heat_P Parameter: Organism Value: Zea mays
  misc_feature: MA Experiment 108523 PARAMETER Experiment Name: Zm_42deg_Heat_P Parameter: Plant Line Value: 35A19
  misc_feature: MA Experiment 108523 PARAMETER Experiment Name: Zm_42deg_Heat_P Parameter: Temperature (deg C) Value: 42 vs. 22
  misc_feature: MA Experiment 108523 PARAMETER Experiment Name: Zm_42deg_Heat_P Parameter: Timepoint (hr) Value: 6
  misc_feature: MA Experiment 108523 PARAMETER Experiment Name: Zm_42deg_Heat_P Parameter: Tissue Value: Aerial
  misc_feature: MA Experiment ID: 108527 Result: Down-regulated in Transcription
  misc_feature: MA Experiment 108527 PARAMETER Experiment Name: Zm_5mM_NO_P Parameter: Age (day) Value: 8
  misc_feature: MA Experiment 108527 PARAMETER Experiment Name: Zm_5mM_NO_P Parameter: Organism Value: Zea mays
  misc_feature: MA Experiment 108527 PARAMETER Experiment Name: Zm_5mM_NO_P Parameter: Plant Line Value: 35A19
  misc_feature: MA Experiment 108527 PARAMETER Experiment Name: Zm_5mM_NO_P Parameter: Timepoint (hr) Value: 6
  misc_feature: MA Experiment 108527 PARAMETER Experiment Name: Zm_5mM_NO_P Parameter: Tissue Value: Aerial
  misc_feature: MA Experiment 108527 PARAMETER Experiment Name: Zm_5mM_NO_P Parameter: Treatment Value: 5mM NO vs. No Treatment
  misc_feature: MA Experiment ID: 108535 Result: Down-regulated in Transcription
  misc_feature: MA Experiment 108535 PARAMETER Experiment Name: Zm_Meristem_P Parameter: Age (day) Value: 8
  misc_feature: MA Experiment 108535 PARAMETER Experiment Name: Zm_Meristem_P Parameter: Organism Value: Zea mays
  misc_feature: MA Experiment 108535 PARAMETER Experiment Name: Zm_Meristem_P Parameter: Plant Line Value: 35A19
  misc_feature: MA Experiment 108535 PARAMETER Experiment Name: Zm_Meristem_P Parameter: Tissue Value: Root Meristem vs. Above Root Meristem
  misc_feature: MA Experiment ID: 108543 Result: Up-regulated in Transcription
  misc_feature: MA Experiment ID: 108544 Result: Down-regulated in Transcription
  misc_feature: MA Experiment ID: 108559 Result: Down-regulated in Transcription
  misc_feature: MA Experiment 108559 PARAMETER Experiment Name: Zm_5mM_NO_P Parameter: Age (day) Value: 8
  misc_feature: MA Experiment 108559 PARAMETER Experiment Name: Zm_5mM_NO_P Parameter: Organism Value: Zea mays
  misc_feature: MA Experiment 108559 PARAMETER Experiment Name: Zm_5mM_NO_P Parameter: Plant Line Value: 35A19
  misc_feature: MA Experiment 108559 PARAMETER Experiment Name: Zm_5mM_NO_P Parameter: Timepoint (hr) Value: 12
  misc_feature: MA Experiment 108559 PARAMETER Experiment Name: Zm_5mM_NO_P Parameter: Tissue Value: Aerial
  misc_feature: MA Experiment 108559 PARAMETER Experiment Name: Zm_5mM_NO_P Parameter: Treatment Value: 5mM NO vs. No Treatment
  misc_feature: MA Experiment ID: 20000477 Result: Down-regulated in Transcription
  misc_feature: MA Experiment 20000477 PARAMETER Experiment Name: Zm_5mM_SA_P Parameter: Age (day) Value: 10
  misc_feature: MA Experiment 20000477 PARAMETER Experiment Name: Zm_5mM_SA_P Parameter: Organism Value: Zea mays
  misc_feature: MA Experiment 20000477 PARAMETER Experiment Name: Zm_5mM_SA_P Parameter: Plant Line Value: 35A19
  misc_feature: MA Experiment 20000477 PARAMETER Experiment Name: Zm_5mM_SA_P Parameter: Timepoint (hr) Value: 48
  misc_feature: MA Experiment 20000477 PARAMETER Experiment Name: Zm_5mM_SA_P Parameter: Tissue Value: Aerial
  misc_feature: MA Experiment 20000477 PARAMETER Experiment Name: Zm_5mM_SA_P Parameter: Treatment Value: 5mM SA vs. No Treatment
  misc_feature: MA Experiment ID: 20000478 Result: Down-regulated in Transcription
  misc_feature: MA Experiment 20000478 PARAMETER Experiment Name: Zm_5mM_SA_P Parameter: Age (day) Value: 11
  misc_feature: MA Experiment 20000478 PARAMETER Experiment Name: Zm_5mM_SA_P Parameter: Organism Value: Zea mays
  misc_feature: MA Experiment 20000478 PARAMETER Experiment Name: Zm_5mM_SA_P Parameter: Plant Line Value: 35A19
  misc_feature: MA Experiment 20000478 PARAMETER Experiment Name: Zm_5mM_SA_P Parameter: Timepoint (hr) Value: 72
  misc_feature: MA Experiment 20000478 PARAMETER Experiment Name: Zm_5mM_SA_P Parameter: Tissue Value: Aerial
  misc_feature: MA Experiment 20000478 PARAMETER Experiment Name: Zm_5mM_SA_P Parameter: Treatment Value: 5mM SA vs. No Treatment
  misc_feature: MA Experiment ID: 20000487 Result: Down-regulated in Transcription
  misc_feature: MA Experiment 20000487 PARAMETER Experiment Name: Zm_50mM_NH4NO3_L_to_H_P Parameter: Organism Value: Zea mays
  misc_feature: MA Experiment 20000487 PARAMETER Experiment Name: Zm_50mM_NH4NO3_L_to_H_P Parameter: Timepoint (hr) Value: 4
  misc_feature: MA Experiment 20000487 PARAMETER Experiment Name: Zm_50mM_NH4NO3_L_to_H_P Parameter: Tissue Value: Leaves
  misc_feature: MA Experiment 20000487 PARAMETER Experiment Name: Zm_50mM_NH4NO3_L_to_H_P Parameter: Treatment Value: 50mM NH4NO3 vs. 100mM Mannitol
  misc_feature: MA Experiment ID: 20000534 Result: Down-regulated in Transcription
  misc_feature: MA Experiment 20000534 PARAMETER Experiment Name: Zm_Hybrid_Pollen_P Parameter: Age (day) Value: 8
  misc_feature: MA Experiment 20000534 PARAMETER Experiment Name: Zm_Hybrid_Pollen_P Parameter: Organism Value: Zea mays
  misc_feature: MA Experiment 20000534 PARAMETER Experiment Name: Zm_Hybrid_Pollen_P Parameter: Plant Line Value: 35A19
  misc_feature: MA Experiment 20000534 PARAMETER Experiment Name: Zm_Hybrid_Pollen_P Parameter: Tissue Value: Pollen vs. Aerial
  misc_feature: MA Experiment ID: 20000535 Result: Down-regulated in Transcription
  misc_feature: MA Experiment 20000535 PARAMETER Experiment Name: Zm_Hybrid_Seed_Dev_P Parameter: DAP Value: 30 vs. 12
  misc_feature: MA Experiment 20000535 PARAMETER Experiment Name: Zm_Hybrid_Seed_Dev_P Parameter: Organism Value: Zea mays
  misc_feature: MA Experiment 20000535 PARAMETER Experiment Name: Zm_Hybrid_Seed_Dev_P Parameter: Plant Line Value: 35A19
  misc_feature: MA Experiment 20000535 PARAMETER Experiment Name: Zm_Hybrid_Seed_Dev_P Parameter: Tissue Value: Embryo vs. Unfert Floret
  misc_feature: MA Experiment ID: 20001614 Result: Up-regulated in Transcription
  misc_feature: MA Experiment 20001614 PARAMETER Experiment Name: Zm_50ppm_KNO3_L-to-H_P Parameter: Age (day) Value: 21
  misc_feature: MA Experiment 20001614 PARAMETER Experiment Name: Zm_50ppm_KNO3_L-to-H_P Parameter: Organism Value: Zea mays
  misc_feature: MA Experiment 20001614 PARAMETER Experiment Name: Zm_50ppm_KNO3_L-to-H_P Parameter: Plant Line Value: 35A19
  misc_feature: MA Experiment 20001614 PARAMETER Experiment Name: Zm_50ppm_KNO3_L-to-H_P Parameter: Timepoint (hr) Value: 48
  misc_feature: MA Experiment 20001614 PARAMETER Experiment Name: Zm_50ppm_KNO3_L-to-H_P Parameter: Tissue Value: Roots
  misc_feature: MA Experiment 20001614 PARAMETER Experiment Name: Zm_50ppm_KNO3_L-to-H_P Parameter: Treatment Value: 50ppm KNO3 vs. 50ppm KCl
acaatattattggactattcctaacacaacggaggccataggatgggatggtcatctataaatacgtagcccggcgcagccttctttggagcagggagaagaacacagggcacacgcacggcacgcagatacatatagagagaggttagctatagcttgcacatctatttaactaactaactaactggctagctagctcgatcggcagagcaaagcgaaagcagcaagaagcaaagcaatggagaaccctgcgagtgtgctagttctaccagcgcagttcaccaaactcaccttccgaaacctgtacatccgccgggccgggccgggcagcagggagataaccgaggagggcaggtgcgacctggacaagagatacgtgagtgacttccccgtctacgacggccgcggccccgacgccagccttgtggcccgcgtgcaggggatcaccagcgaaatcgggaacgcgcaccaactgttcgtcgttgttttcgacaccgacaggctcaagggctccacgctcgtcaccaatggcgtgataacggccgggtctgacgagtgggcgatctacggcggaaccggggtgtttgccatggcgaggggcgtcataaggagaaggtatctcgccgacagggccggcgggaacactgatgagctcaacatggatgtcttctgccggccgtttggctcacagtcagagctgcaagataaggtgcaggggcagggctctagcgtcaccaagattggactatggggtggaccgggagggtcggcacaggacatcacggcggagcggccgccgcagcgtctgcacagcgtcaccgttcgtgctggcgtcgccgtcgactccatcgagttcacctatactgacagcgcttggcagaggcgcgccgctgggcgatggggtggactcgggggcaatgttcgaacgatcgaccttggcgacgccgaggatgtcagggaagtctcgggaacatacggcgcatttgaaggtgccactacgctgacctcgctcaggctcgtcaccagcagcagaacctggggcccctggggtgtcgagaacgggacgcgtttctccgtcacggcgcccatcggcagcagcatcgtgggattctatgcgcgggcgggaaccaggctcgtcgatgctatcggtgtttacttgcgtcagatttaattcgaataatagcaggggagctactgctagctacgtacctgctccatcctccattatcctttatttcaattcgctcatcatcgtcgtgtgtaaattaaataaataaagctcttgtgcccatatt

SEQ ID NO: 15637 - protein, 310 aa, Zea mays subsp. mays
  peptide (1)..(310): Ceres Seq. ID no. 15179551
  misc_feature (176)..(308): Pfam Name: Jacalin-like lectin domain Pfam Description: Jacalin-like lectin domain
  misc_feature (5)..(310): Homolog of NCBI NO: 9313027 NR Description: beta-glucosidase aggregating factor precursor
  misc_feature (13)..(310): Homolog of NCBI NO: 7489383 NR Description: jacalin homolog - barley
  misc_feature (13)..(310): Homolog of NCBI NO: 7489385 NR Description: jakalin homolog - barley
  misc_feature (13)..(296): Homolog of NCBI NO: 7489384 NR Description: jacalin homolog - barley
  misc_feature (15)..(306): Homolog of NCBI NO: 16151819 NR Description: VER2 [Triticum aestivum]
  misc_feature (48)..(307): Homolog of NCBI NO: 7489661 NR Description: benzothiadiazole-induced protein (clone WCI-1) -
  misc_feature (48)..(308): Homolog of NCBI NO: 21311647 NR Description: hessian fly response gene 1 protein [Triticum
  misc_feature (164)..(308): Homolog of NCBI NO: 34915016 NR Description: putative Mannose-Binding Rice Lectin [Oryza
  misc_feature (164)..(307): Homolog of NCBI NO: 134190 NR Description: Salt-stress induced protein (Salt protein)
  misc_feature (158)..(308): Homolog of NCBI NO: 26006817 NR Description: Mannose/glucose-specific lectin
MENPASVLVLPAQFTKLTFRNLYIRRAGPGSREITEEGRCDLDKRYVSDFPVYDGRGPDASLVARVQGITSEIGNAHQLFVVVFDTDRLKGSTLVTNGVITAGSDEWAIYGGTGVFAMARGVIRRRYLADRAGGNTDELNMDVFCRPFGSQSELQDKVQGQGSSVTKIGLWGGPGGSAQDITAERPPQRLHSVTVRAGVAVDSIEFTYTDSAWQRRAAGRWGGLGGNVRTIDLGDAEDVREVSGTYGAFEGATTLTSLRLVTSSRTWGPWGVENGTRFSVTAPIGSSIVGFYARAGTRLVDAIGVYLRQI

SEQ ID NO: 15638 - protein, 193 aa, Zea mays subsp. mays
  peptide (1)..(193): Ceres Seq. ID no. 15179552
  misc_feature (59)..(191): Pfam Name: Jacalin-like lectin domain Pfam Description: Jacalin-like lectin domain
  misc_feature (1)..(193): Homolog of NCBI NO: 9313027 NR Description: beta-glucosidase aggregating factor precursor
  misc_feature (1)..(193): Homolog of NCBI NO: 7489383 NR Description: jacalin homolog - barley
  misc_feature (1)..(193): Homolog of NCBI NO: 7489385 NR Description: jakalin homolog - barley
  misc_feature (1)..(179): Homolog of NCBI NO: 7489384 NR Description: jacalin homolog - barley
  misc_feature (1)..(189): Homolog of NCBI NO: 16151819 NR Description: VER2 [Triticum aestivum]
  misc_feature (1)..(190): Homolog of NCBI NO: 7489661 NR Description: benzothiadiazole-induced protein (clone WCI-1) -
  misc_feature (1)..(191): Homolog of NCBI NO: 21311647 NR Description: hessian fly response gene 1 protein [Triticum
  misc_feature (47)..(191): Homolog of NCBI NO: 34915016 NR Description: putative Mannose-Binding Rice Lectin [Oryza
  misc_feature (47)..(190): Homolog of NCBI NO: 134190 NR Description: Salt-stress induced protein (Salt protein)
  misc_feature (41)..(191): Homolog of NCBI NO: 26006817 NR Description: Mannose/glucose-specific lectin
MARGVIRRRYLADRAGGNTDELNMDVFCRPFGSQSELQDKVQGQGSSVTKIGLWGGPGGSAQDITAERPPQRLHSVTVRAGVAVDSIEFTYTDSAWQRRAAGRWGGLGGNVRTIDLGDAEDVREVSGTYGAFEGATTLTSLRLVTSSRTWGPWGVENGTRFSVTAPIGSSIVGFYARAGTRLVDAIGVYLRQI

SEQ ID NO: 15639 - protein, 170 aa, Zea mays subsp. mays
  peptide (1)..(170): Ceres Seq. ID no. 15179553
  misc_feature (36)..(168): Pfam Name: Jacalin-like lectin domain Pfam Description: Jacalin-like lectin domain
  misc_feature (1)..(170): Homolog of NCBI NO: 9313027 NR Description: beta-glucosidase aggregating factor precursor
  misc_feature (1)..(170): Homolog of NCBI NO: 7489383 NR Description: jacalin homolog - barley
  misc_feature (1)..(170): Homolog of NCBI NO: 7489385 NR Description: jakalin homolog - barley
  misc_feature (1)..(156): Homolog of NCBI NO: 7489384 NR Description: jacalin homolog - barley
  misc_feature (1)..(166): Homolog of NCBI NO: 16151819 NR Description: VER2 [Triticum aestivum]
  misc_feature (1)..(167): Homolog of NCBI NO: 7489661 NR Description: benzothiadiazole-induced protein (clone WCI-1) -
  misc_feature (1)..(168): Homolog of NCBI NO: 21311647 NR Description: hessian fly response gene 1 protein [Triticum
  misc_feature (24)..(168): Homolog of NCBI NO: 34915016 NR Description: putative Mannose-Binding Rice Lectin [Oryza
  misc_feature (24)..(167): Homolog of NCBI NO: 134190 NR Description: Salt-stress induced protein (Salt protein)
  misc_feature (18)..(168): Homolog of NCBI NO: 26006817 NR Description: Mannose/glucose-specific lectin
MDVFCRPFGSQSELQDKVQGQGSSVTKIGLWGGPGGSAQDITAERPPQRLHSVTVRAGVAVDSIEFTYTDSAWQRRAAGRWGGLGGNVRTIDLGDAEDVREVSGTYGAFEGATTLTSLRLVTSSRTWGPWGVENGTRFSVTAPIGSSIVGFYARAGTRLVDAIGVYLRQI

SEQ ID NO: 15640 - DNA, 1442 bp, Zea mays subsp. mays
  misc_feature (1)..(1442): Ceres Seq. ID no. 12377630
  misc_feature: MA Experiment ID: 108527 Result: Up-regulated in Transcription
  misc_feature: MA Experiment 108527 PARAMETER Experiment Name: Zm_5mM_NO_P Parameter: Age (day) Value: 8
  misc_feature: MA Experiment 108527 PARAMETER Experiment Name: Zm_5mM_NO_P Parameter: Organism Value: Zea mays
  misc_feature: MA Experiment 108527 PARAMETER Experiment Name: Zm_5mM_NO_P Parameter: Plant Line Value: 35A19
  misc_feature: MA Experiment 108527 PARAMETER Experiment Name: Zm_5mM_NO_P Parameter: Timepoint (hr) Value: 6
  misc_feature: MA Experiment 108527 PARAMETER Experiment Name: Zm_5mM_NO_P Parameter: Tissue Value: Aerial
  misc_feature: MA Experiment 108527 PARAMETER Experiment Name: Zm_5mM_NO_P Parameter: Treatment Value: 5mM NO vs. No Treatment
  misc_feature: MA Experiment ID: 108534 Result: Up-regulated in Transcription
  misc_feature: MA Experiment 108534 PARAMETER Experiment Name: Zm_4deg_Cold_P Parameter: Age (hr) Value: 8
  misc_feature: MA Experiment 108534 PARAMETER Experiment Name: Zm_4deg_Cold_P Parameter: Organism Value: Zea mays
  misc_feature: MA Experiment 108534 PARAMETER Experiment Name: Zm_4deg_Cold_P Parameter: Plant Line Value: 35A19
  misc_feature: MA Experiment 108534 PARAMETER Experiment Name: Zm_4deg_Cold_P Parameter: Temperature (deg C) Value: 4 vs. 22
  misc_feature: MA Experiment 108534 PARAMETER Experiment Name: Zm_4deg_Cold_P Parameter: Timepoint (hr) Value: 6
  misc_feature: MA Experiment 108534 PARAMETER Experiment Name: Zm_4deg_Cold_P Parameter: Tissue Value: Aerial
  misc_feature: MA Experiment ID: 108559 Result: Up-regulated in Transcription
  misc_feature: MA Experiment 108559 PARAMETER Experiment Name: Zm_5mM_NO_P Parameter: Age (day) Value: 8
  misc_feature: MA Experiment 108559 PARAMETER Experiment Name: Zm_5mM_NO_P Parameter: Organism Value: Zea mays
  misc_feature: MA Experiment 108559 PARAMETER Experiment Name: Zm_5mM_NO_P Parameter: Plant Line Value: 35A19
  misc_feature: MA Experiment 108559 PARAMETER Experiment Name: Zm_5mM_NO_P Parameter: Timepoint (hr) Value: 12
  misc_feature: MA Experiment 108559 PARAMETER Experiment Name: Zm_5mM_NO_P Parameter: Tissue Value: Aerial
  misc_feature: MA Experiment 108559 PARAMETER Experiment Name: Zm_5mM_NO_P Parameter: Treatment Value: 5mM NO vs. No Treatment
gcacgagaccattacctagaacatcctaatcgaaaaagggaacccatcttcttcttccccgcgctgcctgctgcctgctcgagcttggagatggcgttggtgcggcgatgcctctgtggatccgaggaagactgcagagcgcttttgggcatggaaaatctccggctgttctcctacagagagatcagagcaggcacaaacaacttcgatcagagtaacaagcttggacgaggtggttttggaactgtctacaagggagttctaagagacggcactgaatttgccgcgaaggttctgtcctcggaatccgagcaggggatcaaggagttcctagctgagatcgagagcatatcccaggtgaagcacgcgaacctcgtcaggcttctgggctgctgcgtacagaggaaaaaaaggatactggtgtacgagtaccttgcgaacaacagcctcgatcatgcgctcaaaggagcagcagcagatctaccctggagcacgaggtcgggcatctgcttgggcaccgccaaggggctgagctacctgcacgaggagcacgagccgaacatcgtgcacagggacatcaaagccagcaatgttcttctcgaccgagactacctgccaaagatcggagatttcgggctcgcgaagctgttcccggacaacatcacccacatcagcaccgcagtggtcggaacgagtggatacttggcgcctgaatacttcgtgcatgggcagctgaccaagaaagccgacgtctacagcttcggggtgcttgtcctggagatcatcagcgggaggagggtctcgcaaacgatccaggtcggacatgttcccggtgcgagaggcatggatgatgtaccagcaaggcaggctgctagagatcgtggacgcgagcatggggagctacccggagaaggaggtgctccggtacatcaaggtggggctggcctgcacgcaggccacgcccagcagccgccccacgatgcgccaggtgcttgccttgctgtcggaacggagatgctcccgccgagtttcgccgagcaccgcggccaccacacggcccctgccctggggggtttgcccgccggtccgctaatccatgcgtcgccgagggcgaggtggccggcggcggcgccgtcagcagcaacgtcgccgaagcaggtcctgagcctgaacgcgcaaccggcaatccggcatgtaactgaaactgatatagtcacgtgtgaggcggcgttcgttctgtcacgtaatcacttgcgttagaatttgattttctagtcttgttcgtgctcgcagtttggaccgggaaaaaagggtaggaggggctaggcaggtccataaacgagcatattgtttttaatctcaatccatatgagttagagaggattgagaatctgttcattttaatctcaattcatgtggattgaaagaaattgagtagattt

SEQ ID NO: 15641 - protein, 419 aa, Zea mays subsp. mays
  peptide (1)..(419): Ceres Seq. ID no. 12377631
  misc_feature (52)..(271): Homolog of NCBI NO: 38344039 NR Description: OSJNBb0017I01.6 [Oryza sativa (japonica
  misc_feature (53)..(270): Homolog of NCBI NO: 34901978 NR Description: putative receptor ser/thr protein [Oryza sativa
  misc_feature (53)..(264): Homolog of NCBI NO: 5923666 NR Description: putative receptor ser/thr protein kinase
  misc_feature (53)..(264): Homolog of NCBI NO: 18398327 NR Description: putative receptor ser/thr protein kinase; protein At3g09010.1, supported by cDNA: 124301. [Arabidopsis thaliana]
  misc_feature (53)..(264): Homolog of NCBI NO: 6403501 NR Description: putative protein kinase [Arabidopsis thaliana]
  misc_feature (48)..(270): Homolog of NCBI NO: 18394385 NR Description: receptor-like serine/threonine kinase, putative; id: At1g16670.1, supported by cDNA: gi_16649102 [Arabidopsis >gi|16649103|gb|AAL24403.1| Unknown protein [Arabidopsis
  misc_feature (48)..(270): Homolog of NCBI NO: 25287648 NR Description: hypothetical protein F19K19.4 [imported] - thaliana >gi|9989053|gb|AAG10816.1|AC011808_4 Unknown protein
  misc_feature (57)..(265): Homolog of NCBI NO: 6056375 NR Description: Similar to serine/threonine kinases [Arabidopsis
  misc_feature (57)..(265): Homolog of NCBI NO: 18405703 NR Description: receptor protein kinase, putative; protein id:
  misc_feature (57)..(274): Homolog of NCBI NO: 25404093 NR Description: hypothetical protein T6H22.9 [imported] -
ARDHYLEHPNRKREPIFFFPALPAACSSLEMALVRRCLCGSEEDCRALLGMENLRLFSYREIRAGTNNFDQSNKLGRGGFGTVYKGVLRDGTEFAAKVLSSESEQGIKEFLAEIESISQVKHANLVRLLGCCVQRKKRILVYEYLANNSLDHALKGAAADLPWSTRSGICLGTAKGLSYLHEEHEPNIVHRDIKASNVLLDRDYLPKIGDFGLAKLFPDNITHISTAVVGTSGYLAPEYFVHGQLTKKADVYSFGVLVLEIISGRRVSQTIQVGHVPGARGMDDVPARQAARDRGREHGELPGEGGAPVHQGGAGLHAGHAQQPPHDAPGACLAVGTEMLPPSFAEHRGHHTAPALGGLPAGPLIHASPRARWPAAAPSAATSPKQVLSLNAQPAIRHVTETDIVTCEAAFVLSRNHLR

SEQ ID NO: 15642 - protein, 389 aa, Zea mays subsp. mays
  peptide (1)..(389): Ceres Seq. ID no. 12377632
  misc_feature (22)..(241): Homolog of NCBI NO: 38344039 NR Description: OSJNBb0017I01.6 [Oryza sativa (japonica
  misc_feature (23)..(240): Homolog of NCBI NO: 34901978 NR Description: putative receptor ser/thr protein [Oryza sativa
  misc_feature (23)..(234): Homolog of NCBI NO: 5923666 NR Description: putative receptor ser/thr protein kinase
  misc_feature (23)..(234): Homolog of NCBI NO: 18398327 NR Description: putative receptor ser/thr protein kinase; protein At3g09010.1, supported by cDNA: 124301. [Arabidopsis thaliana]
  misc_feature (23)..(234): Homolog of NCBI NO: 6403501 NR Description: putative protein kinase [Arabidopsis thaliana]
  misc_feature (18)..(240): Homolog of NCBI NO: 18394385 NR Description: receptor-like serine/threonine kinase, putative; id: At1g16670.1, supported by cDNA: gi_16649102 [Arabidopsis >gi|16649103|gb|AAL24403.1| Unknown protein [Arabidopsis
  misc_feature (18)..(240): Homolog of NCBI NO: 25287648 NR Description: hypothetical protein F19K19.4 [imported] - thaliana >gi|9989053|gb|AAG10816.1|AC011808_4 Unknown protein
  misc_feature (27)..(235): Homolog of NCBI NO: 6056375 NR Description: Similar to serine/threonine kinases [Arabidopsis
  misc_feature (27)..(235): Homolog of NCBI NO: 18405703 NR Description: receptor protein kinase, putative; protein id:
  misc_feature (27)..(244): Homolog of NCBI NO: 25404093 NR Description: hypothetical protein T6H22.9 [imported] -
MALVRRCLCGSEEDCRALLGMENLRLFSYREIRAGTNNFDQSNKLGRGGFGTVYKGVLRDGTEFAAKVLSSESEQGIKEFLAEIESISQVKHANLVRLLGCCVQRKKRILVYEYLANNSLDHALKGAAADLPWSTRSGICLGTAKGLSYLHEEHEPNIVHRDIKASNVLLDRDYLPKIGDFGLAKLFPDNITHISTAVVGTSGYLAPEYFVHGQLTKKADVYSFGVLVLEIISGRRVSQTIQVGHVPGARGMDDVPARQAARDRGREHGELPGEGGAPVHQGGAGLHAGHAQQPPHDAPGACLAVGTEMLPPSFAEHRGHHTAPALGGLPAGPLIHASPRARWPAAAPSAATSPKQVLSLNAQPAIRHVTETDIVTCEAAFVLSRNHLR

SEQ ID NO: 15643 - protein, 369 aa, Zea mays subsp. mays
  peptide (1)..(369): Ceres Seq. ID no. 12377633
  misc_feature (2)..(221): Homolog of NCBI NO: 38344039 NR Description: OSJNBb0017I01.6 [Oryza sativa (japonica
  misc_feature (3)..(220): Homolog of NCBI NO: 34901978 NR Description: putative receptor ser/thr protein [Oryza sativa
  misc_feature (3)..(214): Homolog of NCBI NO: 5923666 NR Description: putative receptor ser/thr protein kinase
  misc_feature (3)..(214): Homolog of NCBI NO: 18398327 NR Description: putative receptor ser/thr protein kinase; protein At3g09010.1, supported by cDNA: 124301. [Arabidopsis thaliana]
  misc_feature (3)..(214): Homolog of NCBI NO: 6403501 NR Description: putative protein kinase [Arabidopsis thaliana]
  misc_feature (1)..(220): Homolog of NCBI NO: 18394385 NR Description: receptor-like serine/threonine kinase, putative; id: At1g16670.1, supported by cDNA: gi_16649102 [Arabidopsis >gi|16649103|gb|AAL24403.1| Unknown protein [Arabidopsis
  misc_feature (1)..(220): Homolog of NCBI NO: 25287648 NR Description: hypothetical protein F19K19.4 [imported] - thaliana >gi|9989053|gb|AAG10816.1|AC011808_4 Unknown protein
  misc_feature (7)..(215): Homolog of NCBI NO: 6056375 NR Description: Similar to serine/threonine kinases [Arabidopsis
  misc_feature (7)..(215): Homolog of NCBI NO: 18405703 NR Description: receptor protein kinase, putative; protein id:
  misc_feature (7)..(224): Homolog of NCBI NO: 25404093 NR Description: hypothetical protein T6H22.9 [imported] -
MENLRLFSYREIRAGTNNFDQSNKLGRGGFGTVYKGVLRDGTEFAAKVLSSESEQGIKEFLAEIESISQVKHANLVRLLGCCVQRKKRILVYEYLANNSLDHALKGAAADLPWSTRSGICLGTAKGLSYLHEEHEPNIVHRDIKASNVLLDRDYLPKIGDFGLAKLFPDNITHISTAVVGTSGYLAPEYFVHGQLTKKADVYSFGVLVLEIISGRRVSQTIQVGHVPGARGMDDVPARQAARDRGREHGELPGEGGAPVHQGGAGLHAGHAQQPPHDAPGACLAVGTEMLPPSFAEHRGHHTAPALGGLPAGPLIHASPRARWPAAAPSAATSPKQVLSLNAQPAIRHVTETDIVTCEAAFVLSRNHLR

SEQ ID NO: 15644 - DNA, 582 bp, Zea mays subsp. mays
  misc_feature (1)..(582): Ceres Seq. ID no. 13598824
  misc_feature: MA Experiment ID: 108543 Result: Up-regulated in Transcription
gcaattggaaaggatgttcaggccatgaaggcagtcgttggagaggaggcactctcgtctgaggatctgctttacttagagttccttgacaagtttgagaggaagtttgtgacacaaggagcatacgacacacggaacatcttccagtcactagatcttgcatggacattgcttcggatcttccctcgcgaacttctccaccgtatcccggcgaagaccttggaccagtactatagcagagatgcctcccactgaatcactgatcgttgatcagtgttccaatagtttggcaagtgttgaataaattgaacagattggcttcatggccttttccctgtatttatgtgtagtcaggtccaattcttttctgttgatgagcgcaagtttttcgtagatgactcgcggtcacggcaatatttgtgatattgtgtcatctgtggactatggttaaatttcagttatttgttttctttcaccttccagaactgttagcaagagcattctggaccaggatgctcgaacacaactggctgtatgtacatttgtgaatggtgaataaagaaggggcaataaactgctgcc

SEQ ID NO: 15645 - protein, 84 aa, Zea mays subsp. mays
  peptide (1)..(84): Ceres Seq. ID no. 13598825
  misc_feature (1)..(84): Homolog of NCBI NO: 14150751 NR Description: vacuolar ATPase B subunit [Oryza sativa]
  misc_feature (1)..(84): Homolog of NCBI NO: 34910488 NR Description: putative H+-transporting ATP synthase [Oryza
  misc_feature (1)..(84): Homolog of NCBI NO: 2493130 NR Description: Vacuolar ATP synthase subunit B isoform 2 B subunit 2) (Vacuolar proton pump B subunit 2)
  misc_feature (1)..(84): Homolog of NCBI NO: 2493132 NR Description: Vacuolar ATP synthase subunit B isoform 2 B subunit 2) (Vacuolar proton pump B subunit 2)
  misc_feature (1)..(84): Homolog of NCBI NO: 2493131 NR Description: Vacuolar ATP synthase subunit B isoform 1 B subunit 1) (Vacuolar proton pump B subunit 1)
  misc_feature (1)..(84): Homolog of NCBI NO: 26986106 NR Description: vacuolar ATPase subunit B [Mesembryanthemum
  misc_feature (1)..(84): Homolog of NCBI NO: 29424043 NR Description: vacuolar H(+)-ATPase subunit B [Suaeda maritima
  misc_feature (1)..(84): Homolog of NCBI NO: 11266665 NR Description: H+-transporting two-sector ATPase (EC 3.6.3.14)
  misc_feature (1)..(84): Homolog of NCBI NO: 15010616 NR Description: AT4g38510/F20M13_70 [Arabidopsis thaliana]
  misc_feature (1)..(84): Homolog of NCBI NO: 15233891 NR Description: probable H+-transporting ATPase [Arabidopsis
AIGKDVQAMKAVVGEEALSSEDLLYLEFLDKFERKFVTQGAYDTRNIFQSLDLAWTLLRIFPRELLHRIPAKTLDQYYSRDASH

SEQ ID NO: 15646 - protein, 76 aa, Zea mays subsp. mays
  peptide (1)..(76): Ceres Seq. ID no. 13598826
  misc_feature (1)..(76): Homolog of NCBI NO: 14150751 NR Description: vacuolar ATPase B subunit [Oryza sativa]
  misc_feature (1)..(76): Homolog of NCBI NO: 34910488 NR Description: putative H+-transporting ATP synthase [Oryza
  misc_feature (1)..(76): Homolog of NCBI NO: 2493130 NR Description: Vacuolar ATP synthase subunit B isoform 2 B subunit 2) (Vacuolar proton pump B subunit 2)
  misc_feature (1)..(76): Homolog of NCBI NO: 2493132 NR Description: Vacuolar ATP synthase subunit B isoform 2 B subunit 2) (Vacuolar proton pump B subunit 2)
  misc_feature (1)..(76): Homolog of NCBI NO: 2493131 NR Description: Vacuolar ATP synthase subunit B isoform 1 B subunit 1) (Vacuolar proton pump B subunit 1)
  misc_feature (1)..(76): Homolog of NCBI NO: 26986106 NR Description: vacuolar ATPase subunit B [Mesembryanthemum
  misc_feature (1)..(76): Homolog of NCBI NO: 29424043 NR Description: vacuolar H(+)-ATPase subunit B [Suaeda maritima
  misc_feature (1)..(76): Homolog of NCBI NO: 11266665 NR Description: H+-transporting two-sector ATPase (EC 3.6.3.14)
  misc_feature (1)..(76): Homolog of NCBI NO: 15233891 NR Description: probable H+-transporting ATPase [Arabidopsis
  misc_feature (1)..(76): Homolog of NCBI NO: 15010616 NR Description: AT4g38510/F20M13_70 [Arabidopsis thaliana]
MKAVVGEEALSSEDLLYLEFLDKFERKFVTQGAYDTRNIFQSLDLAWTLLRIFPRELLHRIPAKTLDQYYSRDASH

SEQ ID NO: 15647 - DNA, 758 bp, Zea mays subsp. mays
  misc_feature (1)..(758): Ceres Seq. ID no. 13493495
  misc_feature: MA Experiment ID: 108535 Result: Up-regulated in Transcription
  misc_feature: MA Experiment 108535 PARAMETER Experiment Name: Zm_Meristem_P Parameter: Age (day) Value: 8
  misc_feature: MA Experiment 108535 PARAMETER Experiment Name: Zm_Meristem_P Parameter: Organism Value: Zea mays
  misc_feature: MA Experiment 108535 PARAMETER Experiment Name: Zm_Meristem_P Parameter: Plant Line Value: 35A19
  misc_feature: MA Experiment 108535 PARAMETER Experiment Name: Zm_Meristem_P Parameter: Tissue Value: Root Meristem vs. Above Root Meristem
  misc_feature: MA Experiment ID: 108544 Result: Down-regulated in Transcription
  misc_feature: MA Experiment ID: 20000108 Result: Up-regulated in Transcription
  misc_feature: MA Experiment 20000108 PARAMETER Experiment Name: Zm_Root-Tips_P Parameter: Age (day) Value: 12
  misc_feature: MA Experiment 20000108 PARAMETER Experiment Name: Zm_Root-Tips_P Parameter: Organism Value: Zea mays
  misc_feature: MA Experiment 20000108 PARAMETER Experiment Name: Zm_Root-Tips_P Parameter: Tissue Value: Root tips vs. Root mid region    35
  misc_feature: MA Experiment 20000108 PARAMETER Experiment Name: Zm_Root-Tips_P Parameter: Tissue Value: Root tips vs. Root mid region   Sequence Listing-Misc Features (4)
  misc_feature: MA Experiment ID: 20000487 Result: Up-regulated in Transcription
  misc_feature: MA Experiment 20000487 PARAMETER Experiment Name: Zm_50mM_NH4NO3_L_to_H_P Parameter: Organism Value: Zea mays
  misc_feature: MA Experiment 20000487 PARAMETER Experiment Name: Zm_50mM_NH4NO3_L_to_H_P Parameter: Timepoint (hr) Value: 4
  misc_feature: MA Experiment 20000487 PARAMETER Experiment Name: Zm_50mM_NH4NO3_L_to_H_P Parameter: Tissue Value: Leaves
  misc_feature: MA Experiment 20000487 PARAMETER Experiment Name: Zm_50mM_NH4NO3_L_to_H_P Parameter: Treatment Value: 50mM NH4NO3 vs. 100mM Mannitol
atcaaccctaaaccacccactatacccacccgcccggctagggttttgccaccatggccgccgccgcggccgccgcccggaggctcctctcccgccgcgcctcctcgaactcgctctccgcgttcctccgccgcggcgctgccccggagcagtcgctgctgcgcccggccgtcgtcgcggcggcctcccgcctcggcttcccgcgcgggatggcgcggcggcctggcggggacggctacggcgcgggccgggaccgcgcgcccacggagatggcgccgctgttccccggctgcgactacgagcactggctcatcgtgatggacaagcccggcggggagggcgccaccaagcagcagatgatcgactgctacatccagaccctcgccaaggtcctcggaagtgaggaggaggcgaagaagaagatctacaacgtctcgtgcgagcgctatttcgggttcgggtgcgagatcgatgaggagacatctaacaagctcgaggggctccctggtgttctctttgtgctaccggattcgtatgttgaccctgagtacaaggactacggagctgaactgcttgttaacggtgagattgttcagaggcctcctgagaggcagagaagggtcgagcccgtgccacagagggctgcagacaggcctaggtacaatgacaggacccgctacgcacgcaggagggagaaccagcgatgagatgaaaaaagtccacaataacaagttcaggtggtttgagctctgtaattc

SEQ ID NO: 15648 - protein, 217 aa, Zea mays subsp. mays
  peptide (1)..(217): Ceres Seq. ID no. 13493496
  misc_feature (2)..(217): Homolog of NCBI NO: 34897972 NR Description: putative plastid protein [Oryza sativa (japonica group)] >gi|24413962|dbj|BAC22214.1| putative plastid protein
  misc_feature (1)..(216): Homolog of NCBI NO: 38344141 NR Description: OSJNBa0041A02.8 [Oryza sativa (japonica
  misc_feature (67)..(217): Homolog of NCBI NO: 15226108 NR Description: plastid protein [Arabidopsis thaliana]
  misc_feature (67)..(217): Homolog of NCBI NO: 25370552 NR Description: DAG protein homolog [imported] - Arabidopsis >gi|2246378|emb|CAB06698.1| plastid protein [Arabidopsis
  misc_feature (67)..(217): Homolog of NCBI NO: 21617909 NR Description: plastid protein [Arabidopsis thaliana]
  misc_feature (67)..(217): Homolog of NCBI NO: 2440029 NR Description: DAL1 protein [Arabidopsis thaliana]
  misc_feature (1)..(217): Homolog of NCBI NO: 15223247 NR Description: plastid protein -related [Arabidopsis thaliana]
  misc_feature (67)..(217): Homolog of NCBI NO: 15226934 NR Description: expressed protein [Arabidopsis thaliana]
  misc_feature (1)..(214): Homolog of NCBI NO: 38636775 NR Description: putative DAG protein [Oryza sativa (japonica
  misc_feature (40)..(217): Homolog of NCBI NO: 27754695 NR Description: putative DAG protein [Arabidopsis thaliana]
MAAAAAAARRLLSRRASSNSLSAFLRRGAAPEQSLLRPAVVAAASRLGFPRGMARRPGGDGYGAGRDRAPTEMAPLFPGCDYEHWLIVMDKPGGEGATKQQMIDCYIQTLAKVLGSEEEAKKKIYNVSCERYFGFGCEIDEETSNKLEGLPGVLFVLPDSYVDPEYKDYGAELLVNGEIVQRPPERQRRVEPVPQRAADRPRYNDRTRYARRRENQR

SEQ ID NO: 15649 - protein, 165 aa, Zea mays subsp. mays
  peptide (1)..(165): Ceres Seq. ID no. 13493497
  misc_feature (1)..(165): Homolog of NCBI NO: 34897972 NR Description: putative plastid protein [Oryza sativa (japonica group)] >gi|24413962|dbj|BAC22214.1| putative plastid protein
  misc_feature (1)..(164): Homolog of NCBI NO: 38344141 NR Description: OSJNBa0041A02.8 [Oryza sativa (japonica
  misc_feature (15)..(165): Homolog of NCBI NO: 15226108 NR Description: plastid protein [Arabidopsis thaliana]
  misc_feature (15)..(165): Homolog of NCBI NO: 25370552 NR Description: DAG protein homolog [imported] - Arabidopsis >gi|2246378|emb|CAB06698.1| plastid protein [Arabidopsis
  misc_feature (15)..(165): Homolog of NCBI NO: 21617909 NR Description: plastid protein [Arabidopsis thaliana]
  misc_feature (15)..(165): Homolog of NCBI NO: 2440029 NR Description: DAL1 protein [Arabidopsis thaliana]
  misc_feature (1)..(165): Homolog of NCBI NO: 15223247 NR Description: plastid protein -related [Arabidopsis thaliana]
  misc_feature (15)..(165): Homolog of NCBI NO: 15226934 NR Description: expressed protein [Arabidopsis thaliana]
  misc_feature (1)..(162): Homolog of NCBI NO: 38636775 NR Description: putative DAG protein [Oryza sativa (japonica
  misc_feature (1)..(165): Homolog of NCBI NO: 27754695 NR Description: putative DAG protein [Arabidopsis thaliana]
MARRPGGDGYGAGRDRAPTEMAPLFPGCDYEHWLIVMDKPGGEGATKQQMIDCYIQTLAKVLGSEEEAKKKIYNVSCERYFGFGCEIDEETSNKLEGLPGVLFVLPDSYVDPEYKDYGAELLVNGEIVQRPPERQRRVEPVPQRAADRPRYNDRTRYARRRENQR

SEQ ID NO: 15650 - protein, 145 aa, Zea mays subsp. mays
  peptide (1)..(145): Ceres Seq. ID no. 13493498
  misc_feature (1)..(145): Homolog of NCBI NO: 34897972 NR Description: putative plastid protein [Oryza sativa (japonica group)] >gi|24413962|dbj|BAC22214.1| putative plastid protein
  misc_feature (1)..(144): Homolog of NCBI NO: 38344141 NR Description: OSJNBa0041A02.8 [Oryza sativa (japonica
  misc_feature (1)..(145): Homolog of NCBI NO: 15226108 NR Description: plastid protein [Arabidopsis thaliana]
  misc_feature (1)..(145): Homolog of NCBI NO: 25370552 NR Description: DAG protein homolog [imported] - Arabidopsis >gi|2246378|emb|CAB06698.1| plastid protein [Arabidopsis
  misc_feature (1)..(145): Homolog of NCBI NO: 21617909 NR Description: plastid protein [Arabidopsis thaliana]
  misc_feature (1)..(145): Homolog of NCBI NO: 2440029 NR Description: DAL1 protein [Arabidopsis thaliana]
  misc_feature (1)..(145): Homolog of NCBI NO: 15223247 NR Description: plastid protein -related [Arabidopsis thaliana]
  misc_feature (1)..(145): Homolog of NCBI NO: 15226934 NR Description: expressed protein [Arabidopsis thaliana]
  misc_feature (1)..(142): Homolog of NCBI NO: 38636775 NR Description: putative DAG protein [Oryza sativa (japonica
  misc_feature (1)..(145): Homolog of NCBI NO: 27754695 NR Description: putative DAG protein [Arabidopsis thaliana]
MAPLFPGCDYEHWLIVMDKPGGEGATKQQMIDCYIQTLAKVLGSEEEAKKKIYNVSCERYFGFGCEIDEETSNKLEGLPGVLFVLPDSYVDPEYKDYGAELLVNGEIVQRPPERQRRVEPVPQRAADRPRYNDRTRYARRRENQR

SEQ ID NO: 15651 - DNA, 1973 bp, Zea mays subsp. mays
  misc_feature (1)..(1973): Ceres Seq. ID no. 12366695
  misc_feature: MA Experiment ID: 108504 Result: Down-regulated in Transcription
  misc_feature: MA Experiment 108504 PARAMETER Experiment Name: Zm_Drought_P Parameter: Age (day) Value: 8
  misc_feature: MA Experiment 108504 PARAMETER Experiment Name: Zm_Drought_P Parameter: Organism Value: Zea mays
  misc_feature: MA Experiment 108504 PARAMETER Experiment Name: Zm_Drought_P Parameter: Plant Line Value: 35A19
  misc_feature: MA Experiment 108504 PARAMETER Experiment Name: Zm_Drought_P Parameter: Timepoint (hr) Value: 12
  misc_feature: MA Experiment 108504 PARAMETER Experiment Name: Zm_Drought_P Parameter: Tissue Value: Aerial
  misc_feature: MA Experiment 108504 PARAMETER Experiment Name: Zm_Drought_P Parameter: Treatment Value: Drought vs. No Drought
  misc_feature: MA Experiment ID: 108522 Result: Down-regulated in Transcription
  misc_feature: MA Experiment 108522 PARAMETER Experiment Name: Zm_42deg_Heat_P Parameter: Age (day) Value: 8
  misc_feature: MA Experiment 108522 PARAMETER Experiment Name: Zm_42deg_Heat_P Parameter: Organism Value: Zea mays
  misc_feature: MA Experiment 108522 PARAMETER Experiment Name: Zm_42deg_Heat_P Parameter: Plant Line Value: 35A19
  misc_feature: MA Experiment 108522 PARAMETER Experiment Name: Zm_42deg_Heat_P Parameter: Temperature (deg C) Value: 42 vs. 22
  misc_feature: MA Experiment 108522 PARAMETER Experiment Name: Zm_42deg_Heat_P Parameter: Timepoint (hr) Value: 1
  misc_feature: MA Experiment 108522 PARAMETER Experiment Name: Zm_42deg_Heat_P Parameter: Tissue Value: Aerial
  misc_feature: MA Experiment ID: 108523 Result: Down-regulated in Transcription
  misc_feature: MA Experiment 108523 PARAMETER Experiment Name: Zm_42deg_Heat_P Parameter: Age (day) Value: 8
  misc_feature: MA Experiment 108523 PARAMETER Experiment Name: Zm_42deg_Heat_P Parameter: Organism Value: Zea mays
  misc_feature: MA Experiment 108523 PARAMETER Experiment Name: Zm_42deg_Heat_P Parameter: Plant Line Value: 35A19
  misc_feature: MA Experiment 108523 PARAMETER Experiment Name: Zm_42deg_Heat_P Parameter: Temperature (deg C) Value: 42 vs. 22
  misc_feature: MA Experiment 108523 PARAMETER Experiment Name: Zm_42deg_Heat_P Parameter: Timepoint (hr) Value: 6
  misc_feature: MA Experiment 108523 PARAMETER Experiment Name: Zm_42deg_Heat_P Parameter: Tissue Value: Aerial
  misc_feature: MA Experiment ID: 108535 Result: Up-regulated in Transcription
  misc_feature: MA Experiment 108535 PARAMETER Experiment Name: Zm_Meristem_P Parameter: Age (day) Value: 8
  misc_feature: MA Experiment 108535 PARAMETER Experiment Name: Zm_Meristem_P Parameter: Organism Value: Zea mays
  misc_feature: MA Experiment 108535 PARAMETER Experiment Name: Zm_Meristem_P Parameter: Plant Line Value: 35A19
  misc_feature: MA Experiment 108535 PARAMETER Experiment Name: Zm_Meristem_P Parameter: Tissue Value: Root Meristem vs. Above Root Meristem
  misc_feature: MA Experiment ID: 108543 Result: Up-regulated in Transcription
  misc_feature: MA Experiment ID: 108546 Result: Down-regulated in Transcription
  misc_feature: MA Experiment 108546 PARAMETER Experiment Name: Zm_Imbibed_Seeds_P Parameter: Age (day) Value: 3 vs. 2
  misc_feature: MA Experiment 108546 PARAMETER Experiment Name: Zm_Imbibed_Seeds_P Parameter: Organism Value: Zea mays
  misc_feature: MA Experiment 108546 PARAMETER Experiment Name: Zm_Imbibed_Seeds_P Parameter: Plant Line Value: 35A19
  misc_feature: MA Experiment 108546 PARAMETER Experiment Name: Zm_Imbibed_Seeds_P Parameter: Tissue Value: Roots vs. Embryo
  misc_feature: MA Experiment ID: 108556 Result: Down-regulated in Transcription
  misc_feature: MA Experiment 108556 PARAMETER Experiment Name: Zm_Drought_P Parameter: Age (day) Value: 9
  misc_feature: MA Experiment 108556 PARAMETER Experiment Name: Zm_Drought_P Parameter: Organism Value: Zea mays
  misc_feature: MA Experiment 108556 PARAMETER Experiment Name: Zm_Drought_P Parameter: Plant Line Value: 35A19
  misc_feature: MA Experiment 108556 PARAMETER Experiment Name: Zm_Drought_P Parameter: Timepoint (hr) Value: 24
  misc_feature: MA Experiment 108556 PARAMETER Experiment Name: Zm_Drought_P Parameter: Tissue Value: Aerial
  misc_feature: MA Experiment 108556 PARAMETER Experiment Name: Zm_Drought_P Parameter: Treatment Value: Drought vs. No Drought
  misc_feature: MA Experiment ID: 108597 Result: Down-regulated in Transcription
  misc_feature: MA Experiment 108597 PARAMETER Experiment Name: Zm_100uM_ABA_P Parameter: Age (day) Value: 9
  misc_feature: MA Experiment 108597 PARAMETER Experiment Name: Zm_100uM_ABA_P Parameter: Organism Value: Zea mays
  misc_feature: MA Experiment 108597 PARAMETER Experiment Name: Zm_100uM_ABA_P Parameter: Plant Line Value: 35A19
  misc_feature: MA Experiment 108597 PARAMETER Experiment Name: Zm_100uM_ABA_P Parameter: Timepoint (hr) Value: 24
  misc_feature: MA Experiment 108597 PARAMETER Experiment Name: Zm_100uM_ABA_P Parameter: Tissue Value: Aerial
  misc_feature: MA Experiment 108597 PARAMETER Experiment Name: Zm_100uM_ABA_P Parameter: Treatment Value: 100uM ABA vs. No Treatment
  misc_feature: MA Experiment ID: 108689 Result: Down-regulated in Transcription
  misc_feature: MA Experiment 108689 PARAMETER Experiment Name: Zm_Drought_Roots_P Parameter: Age (day) Value: 9
  misc_feature: MA Experiment 108689 PARAMETER Experiment Name: Zm_Drought_Roots_P Parameter: Organism Value: Zea mays
  misc_feature: MA Experiment 108689 PARAMETER Experiment Name: Zm_Drought_Roots_P Parameter: Plant Line Value: 35A19
  misc_feature: MA Experiment 108689 PARAMETER Experiment Name: Zm_Drought_Roots_P Parameter: Timepoint (hr) Value: 24
  misc_feature: MA Experiment 108689 PARAMETER Experiment Name: Zm_Drought_Roots_P Parameter: Tissue Value: Roots
  misc_feature: MA Experiment 108689 PARAMETER Experiment Name: Zm_Drought_Roots_P Parameter: Treatment Value: Drought vs. No Drought
  misc_feature: MA Experiment ID: 20000478 Result: Down-regulated in Transcription
  misc_feature: MA Experiment 20000478 PARAMETER Experiment Name: Zm_5mM_SA_P Parameter: Age (day) Value: 11
  misc_feature: MA Experiment 20000478 PARAMETER Experiment Name: Zm_5mM_SA_P Parameter: Organism Value: Zea mays
  misc_feature: MA Experiment 20000478 PARAMETER Experiment Name: Zm_5mM_SA_P Parameter: Plant Line Value: 35A19
  misc_feature: MA Experiment 20000478 PARAMETER Experiment Name: Zm_5mM_SA_P Parameter: Timepoint (hr) Value: 72
  misc_feature: MA Experiment 20000478 PARAMETER Experiment Name: Zm_5mM_SA_P Parameter: Tissue Value: Aerial
  misc_feature: MA Experiment 20000478 PARAMETER Experiment Name: Zm_5mM_SA_P Parameter: Treatment Value: 5mM SA vs. No Treatment
  misc_feature: MA Experiment ID: 20000479 Result: Down-regulated in Transcription
  misc_feature: MA Experiment 20000479 PARAMETER Experiment Name: Zm_Drought_P Parameter: Age (day) Value: 10
  misc_feature: MA Experiment 20000479 PARAMETER Experiment Name: Zm_Drought_P Parameter: Organism Value: Zea mays
  misc_feature: MA Experiment 20000479 PARAMETER Experiment Name: Zm_Drought_P Parameter: Plant Line Value: 35A19
  misc_feature: MA Experiment 20000479 PARAMETER Experiment Name: Zm_Drought_P Parameter: Timepoint (hr) Value: 48
  misc_feature: MA Experiment 20000479 PARAMETER Experiment Name: Zm_Drought_P Parameter: Tissue Value: Aerial
  misc_feature: MA Experiment 20000479 PARAMETER Experiment Name: Zm_Drought_P Parameter: Treatment Value: Drought vs. No Drought
  misc_feature: MA Experiment ID: 20000492 Result: Up-regulated in Transcription
  misc_feature: MA Experiment 20000492 PARAMETER Experiment Name: Zm_Hybrid_Seed_Dev_P Parameter: DAP Value: 12
  misc_feature: MA Experiment 20000492 PARAMETER Experiment Name: Zm_Hybrid_Seed_Dev_P Parameter: Organism Value: Zea mays
  misc_feature: MA Experiment 20000492 PARAMETER Experiment Name: Zm_Hybrid_Seed_Dev_P Parameter: Plant Line Value: 35A19
  misc_feature: MA Experiment 20000492 PARAMETER Experiment Name: Zm_Hybrid_Seed_Dev_P Parameter: Tissue Value: Fert Kernel vs. Unfert Floret
  misc_feature: MA Experiment ID: 20000535 Result: Up-regulated in Transcription
  misc_feature: MA Experiment 20000535 PARAMETER Experiment Name: Zm_Hybrid_Seed_Dev_P Parameter: DAP Value: 30 vs. 12
  misc_feature: MA Experiment 20000535 PARAMETER Experiment Name: Zm_Hybrid_Seed_Dev_P Parameter: Organism Value: Zea mays
  misc_feature: MA Experiment 20000535 PARAMETER Experiment Name: Zm_Hybrid_Seed_Dev_P Parameter: Plant Line Value: 35A19
  misc_feature: MA Experiment 20000535 PARAMETER Experiment Name: Zm_Hybrid_Seed_Dev_P Parameter: Tissue Value: Embryo vs. Unfert Floret
  misc_feature: MA Experiment ID: 20000632 Result: Down-regulated in Transcription
  misc_feature: MA Experiment 20000632 PARAMETER Experiment Name: Zm_Herbicide-Treatments_P Parameter: Timepoint (hr) Value: 4
  misc_feature: MA Experiment 20000632 PARAMETER Experiment Name: Zm_Herbicide-Treatments_P Parameter: Tissue Value: Aerial
  misc_feature: MA Experiment 20000632 PARAMETER Experiment Name: Zm_Herbicide-Treatments_P Parameter: Treatment Value: Glean vs. No Treatment
  misc_feature: MA Experiment ID: 20000633 Result: Down-regulated in Transcription
  misc_feature: MA Experiment 20000633 PARAMETER Experiment Name: Zm_Herbicide-Treatments_P Parameter: Timepoint (hr) Value: 4
  misc_feature: MA Experiment 20000633 PARAMETER Experiment Name: Zm_Herbicide-Treatments_P Parameter: Tissue Value: Aerial
  misc_feature: MA Experiment 20000633 PARAMETER Experiment Name: Zm_Herbicide-Treatments_P Parameter: Treatment Value: Trimec vs. No Treatment
  misc_feature: MA Experiment ID: 20001614 Result: Up-regulated in Transcription
  misc_feature: MA Experiment 20001614 PARAMETER Experiment Name: Zm_50ppm_KNO3_L-to-H_P Parameter: Age (day) Value: 21
  misc_feature: MA Experiment 20001614 PARAMETER Experiment Name: Zm_50ppm_KNO3_L-to-H_P Parameter: Organism Value: Zea mays
  misc_feature: MA Experiment 20001614 PARAMETER Experiment Name: Zm_50ppm_KNO3_L-to-H_P Parameter: Plant Line Value: 35A19
  misc_feature: MA Experiment 20001614 PARAMETER Experiment Name: Zm_50ppm_KNO3_L-to-H_P Parameter: Timepoint (hr) Value: 48
  misc_feature: MA Experiment 20001614 PARAMETER Experiment Name: Zm_50ppm_KNO3_L-to-H_P Parameter: Tissue Value: Roots
  misc_feature: MA Experiment 20001614 PARAMETER Experiment Name: Zm_50ppm_KNO3_L-to-H_P Parameter: Treatment Value: 50ppm KNO3 vs. 50ppm KCl
acatatgagtatatgacatatccccactctagccaagtagccagtcctctctccactctcctctcgcaccaccaaaaaaaccggccccaccgttcgccatgagctccgaagcagaatgcgcagctccagccgccgccgcgccggatggggcgggcggcggcagggtggagatcgacacgtccgcgccgttcgagtccgtgcgggaggccgtcgaccggttcggtggcagcgccgtctggagctccgacctcgtcaggcgcatgttcgcgccctccaagaaacatgaacagtctgaccaagctgcagaggccatcaacgccgaggagcaggctgcacagctagagaacgagctggcagttaaagaaagggagactcttgatgtgctcaaggagctggaggcaaccaagaagatcatagcagacctgaaactgaagatacggaaggaagccactgaaacatcccctgaagaggctgctgaccaggtttctgaggcgggagctcaacagcagaaacctgaaaacaccaacattgatgtggtggtggacatggaaggtgtagaggagaaccattcaggttcggttccggtggatctcgagcaggcgaaggcaaacctgaacagagctacatgtgatctggctgcggtgcgggctgcagtcgagctactgcgaaacagcatagcgaaagagaaagtgttgcttgaaagagcccgagagaagctctcctctgatacttcgtcggtttcttctttggaggatgacctggatcagacagcgcaaaagatggaaacgctgaaggatctgcagaggagacgcaaagacccctcagatatttttgtagagatcaagaaaatgaccaccgaggtgcagcagctcaggagcatggcagacgattcgaaatctgaggcaatggtgttggctgcagaaatcgagcaggtaaaggccagcatttgcacggctgaggtcaggtgcattgcagccaggaagatggaagacgccgctagagcagcagaggccctcgcgctggccgagatcaaagcgctagtgagcagcggaagttctttcgaaggagacaccgcttccgatggaggaggggtaactctctcgatggaggagtatttcaagctgtgctcccgagctctggaagctgacgaaagctccaggaggaaagtggagaacgcaatgctgcaggtagacgcagctgacgattcagagtccgagtctgtcaagaggctcgaggatgccagagtggaggtcgaggagtgcaagaaggcgctgcaagaggccctgaggagggtagaggctgcaaaccatgggaagtttgcggtggaagagattcttcgtagatggaaatctgagagcgggcacaagaggcggtctcttggtggctccccaagattcaaaagggcggcagctcaccgtcgcgaagattcgcacgccacggatatgatctctgatgcttcagacagaccacccaaaccaacattgtcgatcgggcagatactgagcatgaagctaatgggacctgatgggtacgacaagagtgtttgggatgacaaaacaggcgagataccggagatctcgctcggtcagattataaacaggagtggtgttctgtgcagagaggatgtggctgctcgcagaagaatttcggggaagaggaagaagtttgcattgactgggctttctgttctcctggccaagcaatcgaagaacaagaagaagagagaatccttttaagctggtacaagtcgtcccacaaatatcagtgctgtactttatagtcttgtgatatgcagttgtagttcaaccttgtcattagtagctggttatatcgagatattttgtatgaggaatgaggtagtatattttagttcctcatgttaaatgtaccggtagcgattatttgctgctaattagagtagcgactggcagttctctgctatgtatgctgttgaggtctacgtaattggaccc

SEQ ID NO: 15652 - protein, 545 aa, Zea mays subsp. mays
  peptide (1)..(545): Ceres Seq. ID no. 12366696
  misc_feature (136)..(396): Pfam Name: Plant protein of unknown function (DUF827) Pfam Description: Plant protein of unknown function (DUF827)
  misc_feature (11)..(543): Homolog of NCBI NO: 33146426 NR Description: myosin heavy chain-like [Oryza sativa (japonica
  misc_feature (136)..(543): Homolog of NCBI NO: 15224495 NR Description: hypothetical protein; protein id: At2g38370.1
  misc_feature (71)..(463): Homolog of NCBI NO: 15234171 NR Description: putative protein; protein id: At4g33390.1
  misc_feature (63)..(429): Homolog of NCBI NO: 15225334 NR Description: unknown protein; protein id: At2g26570.1
  misc_feature (19)..(206): Homolog of NCBI NO: 4433618 NR Description: putative myosin heavy chain [Dendrobium grex
  misc_feature (53)..(432): Homolog of NCBI NO: 34906758 NR Description: putative paramyosin [Oryza sativa (japonica
  misc_feature (57)..(426): Homolog of NCBI NO: 14029007 NR Description: Putative myosin heavy chain-like [Oryza sativa]
  misc_feature (1)..(431): Homolog of NCBI NO: 15239100 NR Description: putative protein; protein id: At5g42880.1 thaliana] >gi|9758576|dbj|BAB09189.1|
  misc_feature (2)..(384): Homolog of NCBI NO: 15224495 NR Description: hypothetical protein; protein id: At2g38370.1
  misc_feature (10)..(432): Homolog of NCBI NO: 24431601 NR Description: Hypothetical protein [Oryza sativa (japonica
MSSEAECAAPAAAAPDGAGGGRVEIDTSAPFESVREAVDRFGGSAVWSSDLVRRMFAPSKKHEQSDQAAEAINAEEQAAQLENELAVKERETLDVLKELEATKKIIADLKLKIRKEATETSPEEAADQVSEAGAQQQKPENTNIDVVVDMEGVEENHSGSVPVDLEQAKANLNRATCDLAAVRAAVELLRNSIAKEKVLLERAREKLSSDTSSVSSLEDDLDQTAQKMETLKDLQRRRKDPSDIFVEIKKMTTEVQQLRSMADDSKSEAMVLAAEIEQVKASICTAEVRCIAARKMEDAARAAEALALAEIKALVSSGSSFEGDTASDGGGVTLSMEEYFKLCSRALEADESSRRKVENAMLQVDAADDSESESVKRLEDARVEVEECKKALQEALRRVEAANHGKFAVEEILRRWKSESGHKRRSLGGSPRFKRAAAHRREDSHATDMISDASDRPPKPTLSIGQILSMKLMGPDGYDKSVWDDKTGEIPEISLGQIINRSGVLCREDVAARRRISGKRKKFALTGLSVLLAKQSKNKKKRESF

SEQ ID NO: 15653 - protein, 491 aa, Zea mays subsp. mays
  peptide (1)..(491): Ceres Seq. ID no. 12366697
  misc_feature (82)..(342): Pfam Name: Plant protein of unknown function (DUF827) Pfam Description: Plant protein of unknown function (DUF827)
  misc_feature (1)..(489): Homolog of NCBI NO: 33146426 NR Description: myosin heavy chain-like [Oryza sativa (japonica
  misc_feature (82)..(489): Homolog of NCBI NO: 15224495 NR Description: hypothetical protein; protein id: At2g38370.1
  misc_feature (17)..(409): Homolog of NCBI NO: 15234171 NR Description: putative protein; protein id: At4g33390.1
  misc_feature (9)..(375): Homolog of NCBI NO: 15225334 NR Description: unknown protein; protein id: At2g26570.1
  misc_feature (1)..(152): Homolog of NCBI NO: 4433618 NR Description: putative myosin heavy chain [Dendrobium grex
  misc_feature (1)..(378): Homolog of NCBI NO: 34906758 NR Description: putative paramyosin [Oryza sativa (japonica
  misc_feature (3)..(372): Homolog of NCBI NO: 14029007 NR Description: Putative myosin heavy chain-like [Oryza sativa]
  misc_feature (1)..(377): Homolog of NCBI NO: 15239100 NR Description: putative protein; protein id: At5g42880.1 thaliana] >gi|9758576|dbj|BAB09189.1|
  misc_feature (1)..(330): Homolog of NCBI NO: 15224495 NR Description: hypothetical protein; protein id: At2g38370.1
  misc_feature (1)..(378): Homolog of NCBI NO: 24431601 NR Description: Hypothetical protein [Oryza sativa (japonica
MFAPSKKHEQSDQAAEAINAEEQAAQLENELAVKERETLDVLKELEATKKIIADLKLKIRKEATETSPEEAADQVSEAGAQQQKPENTNIDVVVDMEGVEENHSGSVPVDLEQAKANLNRATCDLAAVRAAVELLRNSIAKEKVLLERAREKLSSDTSSVSSLEDDLDQTAQKMETLKDLQRRRKDPSDIFVEIKKMTTEVQQLRSMADDSKSEAMVLAAEIEQVKASICTAEVRCIAARKMEDAARAAEALALAEIKALVSSGSSFEGDTASDGGGVTLSMEEYFKLCSRALEADESSRRKVENAMLQVDAADDSESESVKRLEDARVEVEECKKALQEALRRVEAANHGKFAVEEILRRWKSESGHKRRSLGGSPRFKRAAAHRREDSHATDMISDASDRPPKPTLSIGQILSMKLMGPDGYDKSVWDDKTGEIPEISLGQIINRSGVLCREDVAARRRISGKRKKFALTGLSVLLAKQSKNKKKRESF

SEQ ID NO: 15654 - protein, 396 aa, Zea mays subsp. mays
  peptide (1)..(396): Ceres Seq. ID no. 12366698
  misc_feature (1)..(247): Pfam Name: Plant protein of unknown function (DUF827) Pfam Description: Plant protein of unknown function (DUF827)
  misc_feature (1)..(394): Homolog of NCBI NO: 33146426 NR Description: myosin heavy chain-like [Oryza sativa (japonica
  misc_feature (1)..(394): Homolog of NCBI NO: 15224495 NR Description: hypothetical protein; protein id: At2g38370.1
  misc_feature (1)..(314): Homolog of NCBI NO: 15234171 NR Description: putative protein; protein id: At4g33390.1
  misc_feature (1)..(280): Homolog of NCBI NO: 15225334 NR Description: unknown protein; protein id: At2g26570.1
  misc_feature (1)..(57): Homolog of NCBI NO: 4433618 NR Description: putative myosin heavy chain [Dendrobium grex
  misc_feature (1)..(283): Homolog of NCBI NO: 34906758 NR Description: putative paramyosin [Oryza sativa (japonica
  misc_feature (1)..(277): Homolog of NCBI NO: 14029007 NR Description: Putative myosin heavy chain-like [Oryza sativa]
  misc_feature (1)..(282): Homolog of NCBI NO: 15239100 NR Description: putative protein; protein id: At5g42880.1 thaliana] >gi|9758576|dbj|BAB09189.1|
  misc_feature (1)..(235): Homolog of NCBI NO: 15224495 NR Description: hypothetical protein; protein id: At2g38370.1
  misc_feature (1)..(283): Homolog of NCBI NO: 24431601 NR Description: Hypothetical protein [Oryza sativa (japonica
MEGVEENHSGSVPVDLEQAKANLNRATCDLAAVRAAVELLRNSIAKEKVLLERAREKLSSDTSSVSSLEDDLDQTAQKMETLKDLQRRRKDPSDIFVEIKKMTTEVQQLRSMADDSKSEAMVLAAEIEQVKASICTAEVRCIAARKMEDAARAAEALALAEIKALVSSGSSFEGDTASDGGGVTLSMEEYFKLCSRALEADESSRRKVENAMLQVDAADDSESESVKRLEDARVEVEECKKALQEALRRVEAANHGKFAVEEILRRWKSESGHKRRSLGGSPRFKRAAAHRREDSHATDMISDASDRPPKPTLSIGQILSMKLMGPDGYDKSVWDDKTGEIPEISLGQIINRSGVLCREDVAARRRISGKRKKFALTGLSVLLAKQSKNKKKRESF

SEQ ID NO: 15655 - DNA, 1601 bp, Zea mays subsp. mays
  misc_feature (1)..(1601): Ceres Seq. ID no. 12373088
  misc_feature: MA Experiment ID: 108544 Result: Up-regulated in Transcription
  misc_feature: MA Experiment ID: 20000478 Result: Up-regulated in Transcription
  misc_feature: MA Experiment 20000478 PARAMETER Experiment Name: Zm_5mM_SA_P Parameter: Age (day) Value: 11
  misc_feature: MA Experiment 20000478 PARAMETER Experiment Name: Zm_5mM_SA_P Parameter: Organism Value: Zea mays
  misc_feature: MA Experiment 20000478 PARAMETER Experiment Name: Zm_5mM_SA_P Parameter: Plant Line Value: 35A19
  misc_feature: MA Experiment 20000478 PARAMETER Experiment Name: Zm_5mM_SA_P Parameter: Timepoint (hr) Value: 72
  misc_feature: MA Experiment 20000478 PARAMETER Experiment Name: Zm_5mM_SA_P Parameter: Tissue Value: Aerial
  misc_feature: MA Experiment 20000478 PARAMETER Experiment Name: Zm_5mM_SA_P Parameter: Treatment Value: 5mM SA vs. No Treatment
  misc_feature: MA Experiment ID: 20000535 Result: Down-regulated in Transcription
  misc_feature: MA Experiment 20000535 PARAMETER Experiment Name: Zm_Hybrid_Seed_Dev_P Parameter: DAP Value: 30 vs. 12
  misc_feature: MA Experiment 20000535 PARAMETER Experiment Name: Zm_Hybrid_Seed_Dev_P Parameter: Organism Value: Zea mays
  misc_feature: MA Experiment 20000535 PARAMETER Experiment Name: Zm_Hybrid_Seed_Dev_P Parameter: Plant Line Value: 35A19
  misc_feature: MA Experiment 20000535 PARAMETER Experiment Name: Zm_Hybrid_Seed_Dev_P Parameter: Tissue Value: Embryo vs. Unfert Floret
  misc_feature: MA Experiment ID: 20000626 Result: Up-regulated in Transcription
  misc_feature: MA Experiment 20000626 PARAMETER Experiment Name: Zm_Herbicide-Treatments_P Parameter: Timepoint (hr) Value: 12
  misc_feature: MA Experiment 20000626 PARAMETER Experiment Name: Zm_Herbicide-Treatments_P Parameter: Tissue Value: Aerial
  misc_feature: MA Experiment 20000626 PARAMETER Experiment Name: Zm_Herbicide-Treatments_P Parameter: Treatment Value: Roundup vs. No Treatment
cacaacacaacacccctccctttccaggattctcctctcctccaaaagatcggtggcgggtcacgggtgagacgagaaggaaagaagctgacaaaggcgagaagggatagagagaggagagaaagggaaggtagaaactggacagaaagtttctccccgctagaagtagctcggcggtgagggagcgagagacctgccgcctacccttgccccaccgtttttttcataccgtctcgccggaatcctgctttattttcccggccagtccaccgccttctcgggctaccacgctgatccggcgtcgtctgcggtccttccgaccaactcttcaatcttgtgaattgcttttcgcccagttagggcagatcaccattccttgcaggagttcgttgccgtctctccaatcctccctggctcgactgctcagtggtgactgatgtggtccactgccctgccctgcacctgcaagttagtttcactcgtgatccgtcagcttgccacccagcaaccgctgattatcagaaatccacttctcaaagcttcaaggagcatccttcgaacaagttcctgattccttcgcctcccgccctccccgtttcttctctggcatccttgtccgttgaccacagagggaagaaatctgttccgggcaggcaggcgcattctccgccacaatggacgatggagctgacctcccctgccagttgctcttctcccacccggagatgcctcacagcttcgacgagttcttcagcagcgccacgaccacgaccacctgcacccacacgcacagctgcgaccctccgggcccctcggccgccatgcatacccacacgtgcctgcacacgcacacccaggtcctgggcagcggcggggaggacgacggctcagcgaagccgcggaggcccctgggaaacagggaagccgtgcgcaagtaccgcgagaagaagaaggcgcgcgcggccttcctggaaggggaggtcaagaagctgcgcgccgccaaccagcagctcgtgcggcggctgcaagaccacgcggctctggaggcggaggtggcgaggctcaggggcctcctgctcgacgtccggggcaggatcgacgccgaggtcggcgtgtccccgtttcagaggccatgcagcgcgggctctgtggagtgcggcgctgatccagctctgcgcttcgatggcagctcggaggtagtaggaggtggtggctgggagaagagctcaagccctcaagttgcggactgcaggatcgatgaagggggaggagggatgtcacgggaacttgatgttctagaagtttcggggcctctgccagcttctttgggctttgctttaaagataaattaaattattcatggatttaggagaatgaggaaccgacagtgagtagaactatcttcgcatcgctgtggtttatgtttcttatgctggtgttcagtgtgtatatatagggtacagaatactttcatatgagcactgaagaaatcgaaattgacaatgtttcatgcgaaattgtactgcgggtatgtaaatgaagtgcgcctgacttctgacttgtagcctgtttgtgcttagctgaaatattattaagctatt

SEQ ID NO: 15656 - protein, 225 aa, Zea mays subsp. mays
  peptide (1)..(225): Ceres Seq. ID no. 12373089
  misc_feature (74)..(136): Pfam Name: bZIP transcription factor Pfam Description: bZIP transcription factor
  misc_feature (1)..(153): Homolog of NCBI NO: 25370607 NR Description: hypothetical protein At2g16770 [imported] - thaliana >gi|4581120|gb|AAD24610.1| hypothetical protein
  misc_feature (1)..(153): Homolog of NCBI NO: 30679757 NR Description: bZIP protein [Arabidopsis thaliana] putative bzip transcription factor atbzip23 [Arabidopsis
  misc_feature (21)..(156): Homolog of NCBI NO: 7486791 NR Description: hypothetical protein M4E13.100 - Arabidopsis >gi|2924515|emb|CAA17769.1| putative protein [Arabidopsis >gi|7270455|emb|CAB80221.1| putative protein [Arabidopsis
  misc_feature (21)..(156): Homolog of NCBI NO: 18418563 NR Description: bZIP protein; protein id: At4g35040.1, supported cDNA: 21838., supported by cDNA: gi_18252902 [Arabidopsis >gi|18252903|gb|AAL62378.1| putative protein [Arabidopsis
  misc_feature (21)..(156): Homolog of NCBI NO: 21554283 NR Description: putative transcription factor [Arabidopsis
  misc_feature (64)..(207): Homolog of NCBI NO: 34908964 NR Description: P0003D09.19 [Oryza sativa (japonica
  misc_feature (16)..(153): Homolog of NCBI NO: 18855044 NR Description: putative transcription factor [Oryza sativa]
  misc_feature (32)..(158): Homolog of NCBI NO: 30693560 NR Description: bZIP family transcription factor [Arabidopsis >gi|26450338|dbj|BAC42285.1| putative bZip transcription factor
  misc_feature (32)..(158): Homolog of NCBI NO: 11357780 NR Description: hypothetical protein F4F15.70 - Arabidopsis >gi|4678925|emb|CAB41316.1| putative protein [Arabidopsis
  misc_feature (32)..(158): Homolog of NCBI NO: 30693563 NR Description: bZIP family transcription factor [Arabidopsis
MDDGADLPCQLLFSHPEMPHSFDEFFSSATTTTTCTHTHSCDPPGPSAAMHTHTCLHTHTQVLGSGGEDDGSAKPRRPLGNREAVRKYREKKKARAAFLEGEVKKLRAANQQLVRRLQDHAALEAEVARLRGLLLDVRGRIDAEVGVSPFQRPCSAGSVECGADPALRFDGSSEVVGGGGWEKSSSPQVADCRIDEGGGGMSRELDVLEVSGPLPASLGFALKIN

SEQ ID NO: 15657 - protein, 208 aa, Zea mays subsp. mays
  peptide (1)..(208): Ceres Seq. ID no. 12373090
  misc_feature (57)..(119): Pfam Name: bZIP transcription factor Pfam Description: bZIP transcription factor
  misc_feature (1)..(136): Homolog of NCBI NO: 25370607 NR Description: hypothetical protein At2g16770 [imported] - thaliana >gi|4581120|gb|AAD24610.1| hypothetical protein
  misc_feature (1)..(136): Homolog of NCBI NO: 30679757 NR Description: bZIP protein [Arabidopsis thaliana] putative bzip transcription factor atbzip23 [Arabidopsis
  misc_feature (4)..(139): Homolog of NCBI NO: 7486791 NR Description: hypothetical protein M4E13.100 - Arabidopsis >gi|2924515|emb|CAA17769.1| putative protein [Arabidopsis >gi|7270455|emb|CAB80221.1| putative protein [Arabidopsis
  misc_feature (4)..(139): Homolog of NCBI NO: 18418563 NR Description: bZIP protein; protein id: At4g35040.1, supported cDNA: 21838., supported by cDNA: gi_18252902 [Arabidopsis >gi|18252903|gb|AAL62378.1| putative protein [Arabidopsis
  misc_feature (4)..(139): Homolog of NCBI NO: 21554283 NR Description: putative transcription factor [Arabidopsis
  misc_feature (47)..(190): Homolog of NCBI NO: 34908964 NR Description: P0003D09.19 [Oryza sativa (japonica
  misc_feature (1)..(136): Homolog of NCBI NO: 18855044 NR Description: putative transcription factor [Oryza sativa]
  misc_feature (15)..(141): Homolog of NCBI NO: 30693560 NR Description: bZIP family transcription factor [Arabidopsis >gi|26450338|dbj|BAC42285.1| putative bZip transcription factor
  misc_feature (15)..(141): Homolog of NCBI NO: 11357780 NR Description: hypothetical protein F4F15.70 - Arabidopsis >gi|4678925|emb|CAB41316.1| putative protein [Arabidopsis
  misc_feature (15)..(141): Homolog of NCBI NO: 30693563 NR Description: bZIP family transcription factor [Arabidopsis
MPHSFDEFFSSATTTTTCTHTHSCDPPGPSAAMHTHTCLHTHTQVLGSGGEDDGSAKPRRPLGNREAVRKYREKKKARAAFLEGEVKKLRAANQQLVRRLQDHAALEAEVARLRGLLLDVRGRIDAEVGVSPFQRPCSAGSVECGADPALRFDGSSEVVGGGGWEKSSSPQVADCRIDEGGGGMSRELDVLEVSGPLPASLGFALKIN

SEQ ID NO: 15658 - protein, 176 aa, Zea mays subsp. mays
  peptide (1)..(176): Ceres Seq. ID no. 12373091
  misc_feature (25)..(87): Pfam Name: bZIP transcription factor Pfam Description: bZIP transcription factor
  misc_feature (1)..(104): Homolog of NCBI NO: 25370607 NR Description: hypothetical protein At2g16770 [imported] - thaliana >gi|4581120|gb|AAD24610.1| hypothetical protein
  misc_feature (1)..(104): Homolog of NCBI NO: 30679757 NR Description: bZIP protein [Arabidopsis thaliana] putative bzip transcription factor atbzip23 [Arabidopsis
  misc_feature (1)..(107): Homolog of NCBI NO: 7486791 NR Description: hypothetical protein M4E13.100 - Arabidopsis >gi|2924515|emb|CAA17769.1| putative protein [Arabidopsis >gi|7270455|emb|CAB80221.1| putative protein [Arabidopsis
  misc_feature (1)..(107): Homolog of NCBI NO: 18418563 NR Description: bZIP protein; protein id: At4g35040.1, supported cDNA: 21838., supported by cDNA: gi_18252902 [Arabidopsis >gi|18252903|gb|AAL62378.1| putative protein [Arabidopsis
  misc_feature (1)..(107): Homolog of NCBI NO: 21554283 NR Description: putative transcription factor [Arabidopsis
  misc_feature (15)..(158): Homolog of NCBI NO: 34908964 NR Description: P0003D09.19 [Oryza sativa (japonica
  misc_feature (1)..(104): Homolog of NCBI NO: 18855044 NR Description: putative transcription factor [Oryza sativa]
  misc_feature (1)..(109): Homolog of NCBI NO: 30693560 NR Description: bZIP family transcription factor [Arabidopsis >gi|26450338|dbj|BAC42285.1| putative bZip transcription factor
  misc_feature (1)..(109): Homolog of NCBI NO: 11357780 NR Description: hypothetical protein F4F15.70 - Arabidopsis >gi|4678925|emb|CAB41316.1| putative protein [Arabidopsis
  misc_feature (1)..(109): Homolog of NCBI NO: 30693563 NR Description: bZIP family transcription factor [Arabidopsis
MHTHTCLHTHTQVLGSGGEDDGSAKPRRPLGNREAVRKYREKKKARAAFLEGEVKKLRAANQQLVRRLQDHAALEAEVARLRGLLLDVRGRIDAEVGVSPFQRPCSAGSVECGADPALRFDGSSEVVGGGGWEKSSSPQVADCRIDEGGGGMSRELDVLEVSGPLPASLGFALKIN

SEQ ID NO: 15659 - DNA, 1418 bp, Zea mays subsp. mays; identical to SEQ ID NO: 5809
  misc_feature (1)..(1418): Ceres Seq. ID no. 13564606
  misc_feature: MA Experiment ID: 108543 Result: Down-regulated in Transcription
  misc_feature: MA Experiment ID: 108689 Result: Up-regulated in Transcription
  misc_feature: MA Experiment 108689 PARAMETER Experiment Name: Zm_Drought_Roots_P Parameter: Age (day) Value: 9
  misc_feature: MA Experiment 108689 PARAMETER Experiment Name: Zm_Drought_Roots_P Parameter: Organism Value: Zea mays
  misc_feature: MA Experiment 108689 PARAMETER Experiment Name: Zm_Drought_Roots_P Parameter: Plant Line Value: 35A19
  misc_feature: MA Experiment 108689 PARAMETER Experiment Name: Zm_Drought_Roots_P Parameter: Timepoint (hr) Value: 24
  misc_feature: MA Experiment 108689 PARAMETER Experiment Name: Zm_Drought_Roots_P Parameter: Tissue Value: Roots
  misc_feature: MA Experiment 108689 PARAMETER Experiment Name: Zm_Drought_Roots_P Parameter: Treatment Value: Drought vs. No Drought

SEQ ID NO: 15660 - protein, 321 aa, Zea mays subsp. mays; identical to SEQ ID NO: 5810
  peptide (1)..(321): Ceres Seq. ID no. 15222577
  misc_feature (160)..(314): Pfam Name: CDP-alcohol phosphatidyltransferase Pfam Description: CDP-alcohol phosphatidyltransferase
  misc_feature (160)..(314): Pfam Name: CDP-alcohol phosphatidyltransferase Pfam Description: CDP-alcohol phosphatidyltransferase
  misc_feature (1)..(321): Homolog of NCBI NO: 24796824 NR Description: putative phosphatidylglycerolphosphate synthase
  misc_feature (119)..(321): Homolog of NCBI NO: 15225064 NR Description: phosphatidylglycerolphosphate synthase (PGS1)
  misc_feature (101)..(321): Homolog of NCBI NO: 15233163 NR Description: phosphatidylglycerolphosphate synthase (PGS1), [Arabidopsis thaliana] >gi|11358616|pir||T47642
  misc_feature (127)..(316): Homolog of NCBI NO: 23061902 NR Description: hypothetical protein [Pseudomonas fluorescens
  misc_feature (127)..(316): Homolog of NCBI NO: 23472904 NR Description: hypothetical protein [Pseudomonas syringae pv.
  misc_feature (119)..(321): Homolog of NCBI NO: 15225064 NR Description: phosphatidylglycerolphosphate synthase (PGS1)
  misc_feature (127)..(316): Homolog of NCBI NO: 23061902 NR Description: hypothetical protein [Pseudomonas fluorescens
  misc_feature (127)..(316): Homolog of NCBI NO: 15597780 NR Description: CDP-diacylglycerol--glycerol-3-phosphate 3-
  misc_feature (127)..(316): Homolog of NCBI NO: 23104171 NR Description: hypothetical protein [Azotobacter vinelandii]
  misc_feature (127)..(316): Homolog of NCBI NO: 26990792 NR Description: CDP-diacylglycerol--glycerol-3-phosphate 3-
  misc_feature (127)..(316): Homolog of NCBI NO: 28870198 NR Description: CDP-diacylglycerol--glycerol-3-phosphate 3-
  misc_feature (127)..(316): Homolog of NCBI NO: 27753591 NR Description: CDP-diacylglycerol-glycerol-3-phosphate
  misc_feature (127)..(316): Homolog of NCBI NO: 23472904 NR Description: hypothetical protein [Pseudomonas syringae pv.
  misc_feature (101)..(321): Homolog of NCBI NO: 15233163 NR Description: phosphatidylglycerolphosphate synthase (PGS1), [Arabidopsis thaliana] >gi|11358616|pir||T47642
  misc_feature (1)..(321): Homolog of NCBI NO: 24796824 NR Description: putative phosphatidylglycerolphosphate synthase
  misc_feature (127)..(316): Homolog of NCBI NO: 27753591 NR Description: CDP-diacylglycerol-glycerol-3-phosphate
  misc_feature (127)..(316): Homolog of NCBI NO: 28870198 NR Description: CDP-diacylglycerol--glycerol-3-phosphate 3-
  misc_feature (127)..(316): Homolog of NCBI NO: 26990792 NR Description: CDP-diacylglycerol--glycerol-3-phosphate 3-
  misc_feature (127)..(316): Homolog of NCBI NO: 23104171 NR Description: hypothetical protein [Azotobacter vinelandii]
  misc_feature (127)..(316): Homolog of NCBI NO: 15597780 NR Description: CDP-diacylglycerol--glycerol-3-phosphate 3-
  misc_feature (23)..(23): Xaa is any aa, unknown or other

SEQ ID NO: 15661 - protein, 239 aa, Zea mays subsp. mays; identical to SEQ ID NO: 5811
  peptide (1)..(239): Ceres Seq. ID no. 15222578
  misc_feature (78)..(232): Pfam Name: CDP-alcohol phosphatidyltransferase Pfam Description: CDP-alcohol phosphatidyltransferase
  misc_feature (78)..(232): Pfam Name: CDP-alcohol phosphatidyltransferase Pfam Description: CDP-alcohol phosphatidyltransferase
  misc_feature (1)..(239): Homolog of NCBI NO: 24796824 NR Description: putative phosphatidylglycerolphosphate synthase
  misc_feature (37)..(239): Homolog of NCBI NO: 15225064 NR Description: phosphatidylglycerolphosphate synthase (PGS1)
  misc_feature (19)..(239): Homolog of NCBI NO: 15233163 NR Description: phosphatidylglycerolphosphate synthase (PGS1), [Arabidopsis thaliana] >gi|11358616|pir||T47642
  misc_feature (45)..(234): Homolog of NCBI NO: 23061902 NR Description: hypothetical protein [Pseudomonas fluorescens
  misc_feature (45)..(234): Homolog of NCBI NO: 23472904 NR Description: hypothetical protein [Pseudomonas syringae pv.
  misc_feature (37)..(239): Homolog of NCBI NO: 15225064 NR Description: phosphatidylglycerolphosphate synthase (PGS1)
  misc_feature (45)..(234): Homolog of NCBI NO: 23061902 NR Description: hypothetical protein [Pseudomonas fluorescens
  misc_feature (45)..(234): Homolog of NCBI NO: 15597780 NR Description: CDP-diacylglycerol--glycerol-3-phosphate 3-
  misc_feature (45)..(234): Homolog of NCBI NO: 23104171 NR Description: hypothetical protein [Azotobacter vinelandii]
  misc_feature (45)..(234): Homolog of NCBI NO: 26990792 NR Description: CDP-diacylglycerol--glycerol-3-phosphate 3-
  misc_feature (45)..(234): Homolog of NCBI NO: 28870198 NR Description: CDP-diacylglycerol--glycerol-3-phosphate 3-
  misc_feature (45)..(234): Homolog of NCBI NO: 27753591 NR Description: CDP-diacylglycerol-glycerol-3-phosphate
  misc_feature (45)..(234): Homolog of NCBI NO: 23472904 NR Description: hypothetical protein [Pseudomonas syringae pv.
  misc_feature (19)..(239): Homolog of NCBI NO: 15233163 NR Description: phosphatidylglycerolphosphate synthase (PGS1), [Arabidopsis thaliana] >gi|11358616|pir||T47642
  misc_feature (1)..(239): Homolog of NCBI NO: 24796824 NR Description: putative phosphatidylglycerolphosphate synthase
  misc_feature (45)..(234): Homolog of NCBI NO: 27753591 NR Description: CDP-diacylglycerol-glycerol-3-phosphate
  misc_feature (45)..(234): Homolog of NCBI NO: 28870198 NR Description: CDP-diacylglycerol--glycerol-3-phosphate 3-
  misc_feature (45)..(234): Homolog of NCBI NO: 26990792 NR Description: CDP-diacylglycerol--glycerol-3-phosphate 3-
  misc_feature (45)..(234): Homolog of NCBI NO: 23104171 NR Description: hypothetical protein [Azotobacter vinelandii]
  misc_feature (45)..(234): Homolog of NCBI NO: 15597780 NR Description: CDP-diacylglycerol--glycerol-3-phosphate 3-

SEQ ID NO: 15662 - protein, 210 aa, Zea mays subsp. mays; identical to SEQ ID NO: 5812
  peptide (1)..(210): Ceres Seq. ID no. 15222579
  misc_feature (49)..(203): Pfam Name: CDP-alcohol phosphatidyltransferase Pfam Description: CDP-alcohol phosphatidyltransferase
  misc_feature (49)..(203): Pfam Name: CDP-alcohol phosphatidyltransferase Pfam Description: CDP-alcohol phosphatidyltransferase
  misc_feature (8)..(210): Homolog of NCBI NO: 15225064 NR Description: phosphatidylglycerolphosphate synthase (PGS1)
  misc_feature (1)..(210): Homolog of NCBI NO: 15233163 NR Description: phosphatidylglycerolphosphate synthase (PGS1), [Arabidopsis thaliana] >gi|11358616|pir||T47642
  misc_feature (16)..(205): Homolog of NCBI NO: 23061902 NR Description: hypothetical protein [Pseudomonas fluorescens
  misc_feature (16)..(205): Homolog of NCBI NO: 23472904 NR Description: hypothetical protein [Pseudomonas syringae pv.
  misc_feature (16)..(205): Homolog of NCBI NO: 27753591 NR Description: CDP-diacylglycerol-glycerol-3-phosphate
  misc_feature (16)..(205): Homolog of NCBI NO: 23061902 NR Description: hypothetical protein [Pseudomonas fluorescens
  misc_feature (16)..(205): Homolog of NCBI NO: 27753591 NR Description: CDP-diacylglycerol-glycerol-3-phosphate
  misc_feature (16)..(205): Homolog of NCBI NO: 26990792 NR Description: CDP-diacylglycerol--glycerol-3-phosphate 3-
  misc_feature (1)..(210): Homolog of NCBI NO: 15233163 NR Description: phosphatidylglycerolphosphate synthase (PGS1), [Arabidopsis thaliana] >gi|11358616|pir||T47642
  misc_feature (8)..(210): Homolog of NCBI NO: 15225064 NR Description: phosphatidylglycerolphosphate synthase (PGS1)
  misc_feature (1)..(210): Homolog of NCBI NO: 24796824 NR Description: putative phosphatidylglycerolphosphate synthase
  misc_feature (16)..(205): Homolog of NCBI NO: 15597780 NR Description: CDP-diacylglycerol--glycerol-3-phosphate 3-
  misc_feature (16)..(205): Homolog of NCBI NO: 23104171 NR Description: hypothetical protein [Azotobacter vinelandii]
  misc_feature (16)..(205): Homolog of NCBI NO: 28870198 NR Description: CDP-diacylglycerol--glycerol-3-phosphate 3-
  misc_feature (16)..(205): Homolog of NCBI NO: 23472904 NR Description: hypothetical protein [Pseudomonas syringae pv.
  misc_feature (1)..(210): Homolog of NCBI NO: 24796824 NR Description: putative phosphatidylglycerolphosphate synthase
  misc_feature (16)..(205): Homolog of NCBI NO: 28870198 NR Description: CDP-diacylglycerol--glycerol-3-phosphate 3-
  misc_feature (16)..(205): Homolog of NCBI NO: 26990792 NR Description: CDP-diacylglycerol--glycerol-3-phosphate 3-
  misc_feature (16)..(205): Homolog of NCBI NO: 23104171 NR Description: hypothetical protein [Azotobacter vinelandii]
  misc_feature (16)..(205): Homolog of NCBI NO: 15597780 NR Description: CDP-diacylglycerol--glycerol-3-phosphate 3-

SEQ ID NO: 15663 - DNA, 1423 bp, Zea mays subsp. mays
  misc_feature (1)..(1423): Ceres Seq. ID no. 12407049
  misc_feature: MA Experiment ID: 108515 Result: Up-regulated in Transcription
  misc_feature: MA Experiment 108515 PARAMETER Experiment Name: Zm_2mM_SA_P Parameter: Age (day) Value: 8
  misc_feature: MA Experiment 108515 PARAMETER Experiment Name: Zm_2mM_SA_P Parameter: Organism Value: Zea mays
  misc_feature: MA Experiment 108515 PARAMETER Experiment Name: Zm_2mM_SA_P Parameter: Plant Line Value: 35A19
  misc_feature: MA Experiment 108515 PARAMETER Experiment Name: Zm_2mM_SA_P Parameter: Timepoint (hr) Value: 12
  misc_feature: MA Experiment 108515 PARAMETER Experiment Name: Zm_2mM_SA_P Parameter: Tissue Value: Aerial
  misc_feature: MA Experiment 108515 PARAMETER Experiment Name: Zm_2mM_SA_P Parameter: Treatment Value: 2mM SA vs. No Treatment
  misc_feature: MA Experiment ID: 108522 Result: Up-regulated in Transcription
  misc_feature: MA Experiment 108522 PARAMETER Experiment Name: Zm_42deg_Heat_P Parameter: Age (day) Value: 8
  misc_feature: MA Experiment 108522 PARAMETER Experiment Name: Zm_42deg_Heat_P Parameter: Organism Value: Zea mays
  misc_feature: MA Experiment 108522 PARAMETER Experiment Name: Zm_42deg_Heat_P Parameter: Plant Line Value: 35A19
  misc_feature: MA Experiment 108522 PARAMETER Experiment Name: Zm_42deg_Heat_P Parameter: Temperature (deg C) Value: 42 vs. 22
  misc_feature: MA Experiment 108522 PARAMETER Experiment Name: Zm_42deg_Heat_P Parameter: Timepoint (hr) Value: 1
  misc_feature: MA Experiment 108522 PARAMETER Experiment Name: Zm_42deg_Heat_P Parameter: Tissue Value: Aerial
  misc_feature: MA Experiment ID: 108523 Result: Up-regulated in Transcription
  misc_feature: MA Experiment 108523 PARAMETER Experiment Name: Zm_42deg_Heat_P Parameter: Age (day) Value: 8
  misc_feature: MA Experiment 108523 PARAMETER Experiment Name: Zm_42deg_Heat_P Parameter: Organism Value: Zea mays
  misc_feature: MA Experiment 108523 PARAMETER Experiment Name: Zm_42deg_Heat_P Parameter: Plant Line Value: 35A19
  misc_feature: MA Experiment 108523 PARAMETER Experiment Name: Zm_42deg_Heat_P Parameter: Temperature (deg C) Value: 42 vs. 22
  misc_feature: MA Experiment 108523 PARAMETER Experiment Name: Zm_42deg_Heat_P Parameter: Timepoint (hr) Value: 6
  misc_feature: MA Experiment 108523 PARAMETER Experiment Name: Zm_42deg_Heat_P Parameter: Tissue Value: Aerial
  misc_feature: MA Experiment ID: 108526 Result: Up-regulated in Transcription
  misc_feature: MA Experiment 108526 PARAMETER Experiment Name: Zm_5mM_NO_P Parameter: Age (day) Value: 8
  misc_feature: MA Experiment 108526 PARAMETER Experiment Name: Zm_5mM_NO_P Parameter: Organism Value: Zea mays
  misc_feature: MA Experiment 108526 PARAMETER Experiment Name: Zm_5mM_NO_P Parameter: Plant Line Value: 35A19
  misc_feature: MA Experiment 108526 PARAMETER Experiment Name: Zm_5mM_NO_P Parameter: Timepoint (hr) Value: 1
  misc_feature: MA Experiment 108526 PARAMETER Experiment Name: Zm_5mM_NO_P Parameter: Tissue Value: Aerial
  misc_feature: MA Experiment 108526 PARAMETER Experiment Name: Zm_5mM_NO_P Parameter: Treatment Value: 5mM NO vs. No Treatment
  misc_feature: MA Experiment ID: 108527 Result: Up-regulated in Transcription
  misc_feature: MA Experiment 108527 PARAMETER Experiment Name: Zm_5mM_NO_P Parameter: Age (day) Value: 8
  misc_feature: MA Experiment 108527 PARAMETER Experiment Name: Zm_5mM_NO_P Parameter: Organism Value: Zea mays
  misc_feature: MA Experiment 108527 PARAMETER Experiment Name: Zm_5mM_NO_P Parameter: Plant Line Value: 35A19
  misc_feature: MA Experiment 108527 PARAMETER Experiment Name: Zm_5mM_NO_P Parameter: Timepoint (hr) Value: 6
  misc_feature: MA Experiment 108527 PARAMETER Experiment Name: Zm_5mM_NO_P Parameter: Tissue Value: Aerial
  misc_feature: MA Experiment 108527 PARAMETER Experiment Name: Zm_5mM_NO_P Parameter: Treatment Value: 5mM NO vs. No Treatment
  misc_feature: MA Experiment ID: 108529 Result: Up-regulated in Transcription
  misc_feature: MA Experiment 108529 PARAMETER Experiment Name: Zm_Imbibed_Seeds_P Parameter: Age (day) Value: 5 vs. 2
  misc_feature: MA Experiment 108529 PARAMETER Experiment Name: Zm_Imbibed_Seeds_P Parameter: Organism Value: Zea mays
  misc_feature: MA Experiment 108529 PARAMETER Experiment Name: Zm_Imbibed_Seeds_P Parameter: Plant Line Value: 35A19
  misc_feature: MA Experiment 108529 PARAMETER Experiment Name: Zm_Imbibed_Seeds_P Parameter: Tissue Value: Roots vs. Embryo
  misc_feature: MA Experiment ID: 108530 Result: Up-regulated in Transcription
  misc_feature: MA Experiment 108530 PARAMETER Experiment Name: Zm_Imbibed_Seeds_P Parameter: Age (day) Value: 6 vs. 2
  misc_feature: MA Experiment 108530 PARAMETER Experiment Name: Zm_Imbibed_Seeds_P Parameter: Organism Value: Zea mays
  misc_feature: MA Experiment 108530 PARAMETER Experiment Name: Zm_Imbibed_Seeds_P Parameter: Plant Line Value: 35A19
  misc_feature: MA Experiment 108530 PARAMETER Experiment Name: Zm_Imbibed_Seeds_P Parameter: Tissue Value: Aerial vs. Embryo
  misc_feature: MA Experiment ID: 108533 Result: Up-regulated in Transcription
  misc_feature: MA Experiment 108533 PARAMETER Experiment Name: Zm_4deg_Cold_P Parameter: Age (hr) Value: 8
  misc_feature: MA Experiment 108533 PARAMETER Experiment Name: Zm_4deg_Cold_P Parameter: Organism Value: Zea mays
  misc_feature: MA Experiment 108533 PARAMETER Experiment Name: Zm_4deg_Cold_P Parameter: Plant Line Value: 35A19
  misc_feature: MA Experiment 108533 PARAMETER Experiment Name: Zm_4deg_Cold_P Parameter: Temperature (deg C) Value: 4 vs. 22
  misc_feature: MA Experiment 108533 PARAMETER Experiment Name: Zm_4deg_Cold_P Parameter: Timepoint (hr) Value: 1
  misc_feature: MA Experiment 108533 PARAMETER Experiment Name: Zm_4deg_Cold_P Parameter: Tissue Value: Aerial
  misc_feature: MA Experiment ID: 108534 Result: Up-regulated in Transcription
  misc_feature: MA Experiment 108534 PARAMETER Experiment Name: Zm_4deg_Cold_P Parameter: Age (hr) Value: 8
  misc_feature: MA Experiment 108534 PARAMETER Experiment Name: Zm_4deg_Cold_P Parameter: Organism Value: Zea mays
  misc_feature: MA Experiment 108534 PARAMETER Experiment Name: Zm_4deg_Cold_P Parameter: Plant Line Value: 35A19
  misc_feature: MA Experiment 108534 PARAMETER Experiment Name: Zm_4deg_Cold_P Parameter: Temperature (deg C) Value: 4 vs. 22
  misc_feature: MA Experiment 108534 PARAMETER Experiment Name: Zm_4deg_Cold_P Parameter: Timepoint (hr) Value: 6
  misc_feature: MA Experiment 108534 PARAMETER Experiment Name: Zm_4deg_Cold_P Parameter: Tissue Value: Aerial
  misc_feature: MA Experiment ID: 108542 Result: Up-regulated in Transcription
  misc_feature: MA Experiment 108542 PARAMETER Experiment Name: Zm_150mM_NaCl_P Parameter: Age (day) Value: 8
  misc_feature: MA Experiment 108542 PARAMETER Experiment Name: Zm_150mM_NaCl_P Parameter: Organism Value: Zea mays
  misc_feature: MA Experiment 108542 PARAMETER Experiment Name: Zm_150mM_NaCl_P Parameter: Plant Line Value: 35A19
  misc_feature: MA Experiment 108542 PARAMETER Experiment Name: Zm_150mM_NaCl_P Parameter: Timepoint (hr) Value: 6
  misc_feature: MA Experiment 108542 PARAMETER Experiment Name: Zm_150mM_NaCl_P Parameter: Tissue Value: Aerial
  misc_feature: MA Experiment 108542 PARAMETER Experiment Name: Zm_150mM_NaCl_P Parameter: Treatment Value: 150mM NaCl vs. No Treatment
  misc_feature: MA Experiment ID: 20000477 Result: Up-regulated in Transcription
  misc_feature: MA Experiment 20000477 PARAMETER Experiment Name: Zm_5mM_SA_P Parameter: Age (day) Value: 10
  misc_feature: MA Experiment 20000477 PARAMETER Experiment Name: Zm_5mM_SA_P Parameter: Organism Value: Zea mays
  misc_feature: MA Experiment 20000477 PARAMETER Experiment Name: Zm_5mM_SA_P Parameter: Plant Line Value: 35A19
  misc_feature: MA Experiment 20000477 PARAMETER Experiment Name: Zm_5mM_SA_P Parameter: Timepoint (hr) Value: 48
  misc_feature: MA Experiment 20000477 PARAMETER Experiment Name: Zm_5mM_SA_P Parameter: Tissue Value: Aerial
  misc_feature: MA Experiment 20000477 PARAMETER Experiment Name: Zm_5mM_SA_P Parameter: Treatment Value: 5mM SA vs. No Treatment
  misc_feature: MA Experiment ID: 20000478 Result: Up-regulated in Transcription
  misc_feature: MA Experiment 20000478 PARAMETER Experiment Name: Zm_5mM_SA_P Parameter: Age (day) Value: 11
  misc_feature: MA Experiment 20000478 PARAMETER Experiment Name: Zm_5mM_SA_P Parameter: Organism Value: Zea mays
  misc_feature: MA Experiment 20000478 PARAMETER Experiment Name: Zm_5mM_SA_P Parameter: Plant Line Value: 35A19
  misc_feature: MA Experiment 20000478 PARAMETER Experiment Name: Zm_5mM_SA_P Parameter: Timepoint (hr) Value: 72
  misc_feature: MA Experiment 20000478 PARAMETER Experiment Name: Zm_5mM_SA_P Parameter: Tissue Value: Aerial
  misc_feature: MA Experiment 20000478 PARAMETER Experiment Name: Zm_5mM_SA_P Parameter: Treatment Value: 5mM SA vs. No Treatment
  misc_feature: MA Experiment ID: 20000480 Result: Down-regulated in Transcription
  misc_feature: MA Experiment 20000480 PARAMETER Experiment Name: Zm_Drought_P Parameter: Age (day) Value: 11
  misc_feature: MA Experiment 20000480 PARAMETER Experiment Name: Zm_Drought_P Parameter: Organism Value: Zea mays
  misc_feature: MA Experiment 20000480 PARAMETER Experiment Name: Zm_Drought_P Parameter: Plant Line Value: 35A19
  misc_feature: MA Experiment 20000480 PARAMETER Experiment Name: Zm_Drought_P Parameter: Timepoint (hr) Value: 72
  misc_feature: MA Experiment 20000480 PARAMETER Experiment Name: Zm_Drought_P Parameter: Tissue Value: Aerial
  misc_feature: MA Experiment 20000480 PARAMETER Experiment Name: Zm_Drought_P Parameter: Treatment Value: Drought vs. No Drought
agaccaagcggcacgcacaagcgcagagccacggtgagcagagaagaaacgcatccacagaagggacaaacgtccggagcggattccacattccagtctcggtctcggtccatgggcgcgggaaagggaggagacggcggcgaggcggcgcccgaggccgcgcaggcgcagcccgtcgtgctgaagatgaacctgcattgcgccggctgcgcgcacaaggtcaagaaggccatcaagcgcgtccccggtgtggactccatcgtcacagacgtcgcggcgaacaaggtcgttgtggcggggacggccgacgcgggcgcgctcaagacgcggctcgaggccaagaccaacaagcccgtggagatcgtctccgccggcggtgcccccaggaagcctcccgccgcggagcccaagcaggacgccggcgacggcgagaagcagggggtcaaaggcgcgagccccaacgaggaggagaaagagaaagagaaggggaagaagcaacaggcggaggagaaagagaaagagaaggggaagaagcagcaggtggagtcggtgctgctcaagatccgcctgcactgcgacggctgcgcctaccgcatcaggcaacgcatcggcaagatcaaaggcgtcaaggatgtggtgctggaggccaatgccaaggacgaggtggaggtcacgggcaccatggacataccgaacatggtctcctacctcaaggagaagctcaaccgcgacgtggaggccgtggtgctgcccgtcaggaaagacggcggcggcggcggcgagggcgagggcgagggcaaggacgacaagaagcacagcggcggcggcggcggcaaggacaaggtcgcggccggggcagccggcgacgacaggatgaacaagggcaaagggatcgaggcgtcggcggccggtccgtcaacggcggccgccgcggcgtacatgtctgcgccggcgggggcgagcacgtaccacgtggctccgccgcacgggtacgtggcgtatgagcaggccccgcctcctgccagctactatccctacccgtactacggctacggcagtggcgatggcatgggccacgccaacccctcctactaccagcagcagccgcagccgcagcccgacgggaaccagcagccgcaggtggcgtacccgccatacccgtaccaattcgacatggcgccggcgccgcagctcttcagcgacgagaaccccaacgcttgctccgtgatgtgacgccgccgccggtgcgtgtccttgttgcgttccgtcggcgagctcactgatccgccgtcagctttaaccttagccatccgggcatccggccgagaaagaactcgacctgtacatatcgtcaatgaggaatcagccttagtccagagccctaggattatattttcctgatgaaattttgcttcatttgttt

SEQ ID NO: 15664 - protein, 410 aa, Zea mays subsp. mays
  peptide (1)..(410): Ceres Seq. ID no. 12407050
  misc_feature (343)..(396): Pfam Name: High molecular weight glutenin subunit Pfam Description: High molecular weight glutenin subunit
  misc_feature (26)..(347): Homolog of NCBI NO: 37534752 NR Description: putative metal-binding protein [Oryza sativa
  misc_feature (47)..(410): Homolog of NCBI NO: 15242741 NR Description: expressed protein; protein id: At5g03380.1, by cDNA: gi_16604512 [Arabidopsis thaliana]
  misc_feature (107)..(304): Homolog of NCBI NO: 27529838 NR Description: hypothetical protein [Nicotiana tabacum]
  misc_feature (366)..(410): Homolog of NCBI NO: 27529838 NR Description: hypothetical protein [Nicotiana tabacum]
  misc_feature (153)..(345): Homolog of NCBI NO: 9758294 NR Description: contains similarity to ATFP3~gene_id:MLE2.16
  misc_feature (23)..(149): Homolog of NCBI NO: 9758294 NR Description: contains similarity to ATFP3~gene_id:MLE2.16
  misc_feature (377)..(410): Homolog of NCBI NO: 9758294 NR Description: contains similarity to ATFP3~gene_id:MLE2.16
  misc_feature (153)..(345): Homolog of NCBI NO: 18424719 NR Description: copper chaperone (CCH)-related; protein id: supported by cDNA: gi_13430829, supported by cDNA: gi_15810596 thaliana] >gi|13430830|gb|AAK26037.1|AF360327_1 unknown protein
  misc_feature (23)..(149): Homolog of NCBI NO: 18424719 NR Description: copper chaperone (CCH)-related; protein id: supported by cDNA: gi_13430829, supported by cDNA: gi_15810596 thaliana] >gi|13430830|gb|AAK26037.1|AF360327_1 unknown protein
  misc_feature (377)..(410): Homolog of NCBI NO: 18424719 NR Description: copper chaperone (CCH)-related; protein id: supported by cDNA: gi_13430829, supported by cDNA: gi_15810596 thaliana] >gi|13430830|gb|AAK26037.1|AF360327_1 unknown protein
RPSGTHKRRATVSREETHPQKGQTSGADSTFQSRSRSMGAGKGGDGGEAAPEAAQAQPVVLKMNLHCAGCAHKVKKAIKRVPGVDSIVTDVAANKVVVAGTADAGALKTRLEAKTNKPVEIVSAGGAPRKPPAAEPKQDAGDGEKQGVKGASPNEEEKEKEKGKKQQAEEKEKEKGKKQQVESVLLKIRLHCDGCAYRIRQRIGKIKGVKDVVLEANAKDEVEVTGTMDIPNMVSYLKEKLNRDVEAVVLPVRKDGGGGGEGEGEGKDDKKHSGGGGGKDKVAAGAAGDDRMNKGKGIEASAAGPSTAAAAAYMSAPAGASTYHVAPPHGYVAYEQAPPPASYYPYPYYGYGSGDGMGHANPSYYQQQPQPQPDGNQQPQVAYPPYPYQFDMAPAPQLFSDENPNACSVM

SEQ ID NO: 15665 - protein, 373 aa, Zea mays subsp. mays
  peptide (1)..(373): Ceres Seq. ID no. 12407051
  misc_feature (306)..(359): Pfam Name: High molecular weight glutenin subunit Pfam Description: High molecular weight glutenin subunit
  misc_feature (1)..(310): Homolog of NCBI NO: 37534752 NR Description: putative metal-binding protein [Oryza sativa
  misc_feature (10)..(373): Homolog of NCBI NO: 15242741 NR Description: expressed protein; protein id: At5g03380.1, by cDNA: gi_16604512 [Arabidopsis thaliana]
  misc_feature (70)..(267): Homolog of NCBI NO: 27529838 NR Description: hypothetical protein [Nicotiana tabacum]
  misc_feature (329)..(373): Homolog of NCBI NO: 27529838 NR Description: hypothetical protein [Nicotiana tabacum]
  misc_feature (116)..(308): Homolog of NCBI NO: 9758294 NR Description: contains similarity to ATFP3~gene_id:MLE2.16
  misc_feature (1)..(112): Homolog of NCBI NO: 9758294 NR Description: contains similarity to ATFP3~gene_id:MLE2.16
  misc_feature (340)..(373): Homolog of NCBI NO: 9758294 NR Description: contains similarity to ATFP3~gene_id:MLE2.16
  misc_feature (116)..(308): Homolog of NCBI NO: 18424719 NR Description: copper chaperone (CCH)-related; protein id: supported by cDNA: gi_13430829, supported by cDNA: gi_15810596 thaliana] >gi|13430830|gb|AAK26037.1|AF360327_1 unknown protein
  misc_feature (1)..(112): Homolog of NCBI NO: 18424719 NR Description: copper chaperone (CCH)-related; protein id: supported by cDNA: gi_13430829, supported by cDNA: gi_15810596 thaliana] >gi|13430830|gb|AAK26037.1|AF360327_1 unknown protein
  misc_feature (340)..(373): Homolog of NCBI NO: 18424719 NR Description: copper chaperone (CCH)-related; protein id: supported by cDNA: gi_13430829, supported by cDNA: gi_15810596 thaliana] >gi|13430830|gb|AAK26037.1|AF360327_1 unknown protein
MGAGKGGDGGEAAPEAAQAQPVVLKMNLHCAGCAHKVKKAIKRVPGVDSIVTDVAANKVVVAGTADAGALKTRLEAKTNKPVEIVSAGGAPRKPPAAEPKQDAGDGEKQGVKGASPNEEEKEKEKGKKQQAEEKEKEKGKKQQVESVLLKIRLHCDGCAYRIRQRIGKIKGVKDVVLEANAKDEVEVTGTMDIPNMVSYLKEKLNRDVEAVVLPVRKDGGGGGEGEGEGKDDKKHSGGGGGKDKVAAGAAGDDRMNKGKGIEASAAGPSTAAAAAYMSAPAGASTYHVAPPHGYVAYEQAPPPASYYPYPYYGYGSGDGMGHANPSYYQQQPQPQPDGNQQPQVAYPPYPYQFDMAPAPQLFSDENPNACSVM

SEQ ID NO: 15666 - protein, 348 aa, Zea mays subsp. mays
  peptide (1)..(348): Ceres Seq. ID no. 12407052
  misc_feature (281)..(334): Pfam Name: High molecular weight glutenin subunit Pfam Description: High molecular weight glutenin subunit
  misc_feature (1)..(285): Homolog of NCBI NO: 37534752 NR Description: putative metal-binding protein [Oryza sativa
  misc_feature (1)..(348): Homolog of NCBI NO: 15242741 NR Description: expressed protein; protein id: At5g03380.1, by cDNA: gi_16604512 [Arabidopsis thaliana]
  misc_feature (45)..(242): Homolog of NCBI NO: 27529838 NR Description: hypothetical protein [Nicotiana tabacum]
  misc_feature (304)..(348): Homolog of NCBI NO: 27529838 NR Description: hypothetical protein [Nicotiana tabacum]
  misc_feature (91)..(283): Homolog of NCBI NO: 9758294 NR Description: contains similarity to ATFP3~gene_id:MLE2.16
  misc_feature (1)..(87): Homolog of NCBI NO: 9758294 NR Description: contains similarity to ATFP3~gene_id:MLE2.16
  misc_feature (315)..(348): Homolog of NCBI NO: 9758294 NR Description: contains similarity to ATFP3~gene_id:MLE2.16
  misc_feature (91)..(283): Homolog of NCBI NO: 18424719 NR Description: copper chaperone (CCH)-related; protein id: supported by cDNA: gi_13430829, supported by cDNA: gi_15810596 thaliana] >gi|13430830|gb|AAK26037.1|AF360327_1 unknown protein
  misc_feature (1)..(87): Homolog of NCBI NO: 18424719 NR Description: copper chaperone (CCH)-related; protein id: supported by cDNA: gi_13430829, supported by cDNA: gi_15810596 thaliana] >gi|13430830|gb|AAK26037.1|AF360327_1 unknown protein
  misc_feature (315)..(348): Homolog of NCBI NO: 18424719 NR Description: copper chaperone (CCH)-related; protein id: supported by cDNA: gi_13430829, supported by cDNA: gi_15810596 thaliana] >gi|13430830|gb|AAK26037.1|AF360327_1 unknown protein
MNLHCAGCAHKVKKAIKRVPGVDSIVTDVAANKVVVAGTADAGALKTRLEAKTNKPVEIVSAGGAPRKPPAAEPKQDAGDGEKQGVKGASPNEEEKEKEKGKKQQAEEKEKEKGKKQQVESVLLKIRLHCDGCAYRIRQRIGKIKGVKDVVLEANAKDEVEVTGTMDIPNMVSYLKEKLNRDVEAVVLPVRKDGGGGGEGEGEGKDDKKHSGGGGGKDKVAAGAAGDDRMNKGKGIEASAAGPSTAAAAAYMSAPAGASTYHVAPPHGYVAYEQAPPPASYYPYPYYGYGSGDGMGHANPSYYQQQPQPQPDGNQQPQVAYPPYPYQFDMAPAPQLFSDENPNACSVM

SEQ ID NO: 15667 - DNA, 1517 bp, Zea mays subsp. mays
  misc_feature (1)..(1517): Ceres Seq. ID no. 12350177
  misc_feature: MA Experiment ID: 108527 Result: Up-regulated in Transcription
  misc_feature: MA Experiment 108527 PARAMETER Experiment Name: Zm_5mM_NO_P Parameter: Age (day) Value: 8
  misc_feature: MA Experiment 108527 PARAMETER Experiment Name: Zm_5mM_NO_P Parameter: Organism Value: Zea mays
  misc_feature: MA Experiment 108527 PARAMETER Experiment Name: Zm_5mM_NO_P Parameter: Plant Line Value: 35A19
  misc_feature: MA Experiment 108527 PARAMETER Experiment Name: Zm_5mM_NO_P Parameter: Timepoint (hr) Value: 6
  misc_feature: MA Experiment 108527 PARAMETER Experiment Name: Zm_5mM_NO_P Parameter: Tissue Value: Aerial
  misc_feature: MA Experiment 108527 PARAMETER Experiment Name: Zm_5mM_NO_P Parameter: Treatment Value: 5mM NO vs. No Treatment
  misc_feature: MA Experiment ID: 108533 Result: Up-regulated in Transcription
  misc_feature: MA Experiment 108533 PARAMETER Experiment Name: Zm_4deg_Cold_P Parameter: Age (hr) Value: 8
  misc_feature: MA Experiment 108533 PARAMETER Experiment Name: Zm_4deg_Cold_P Parameter: Organism Value: Zea mays
  misc_feature: MA Experiment 108533 PARAMETER Experiment Name: Zm_4deg_Cold_P Parameter: Plant Line Value: 35A19
  misc_feature: MA Experiment 108533 PARAMETER Experiment Name: Zm_4deg_Cold_P Parameter: Temperature (deg C) Value: 4 vs. 22
  misc_feature: MA Experiment 108533 PARAMETER Experiment Name: Zm_4deg_Cold_P Parameter: Timepoint (hr) Value: 1
  misc_feature: MA Experiment 108533 PARAMETER Experiment Name: Zm_4deg_Cold_P Parameter: Tissue Value: Aerial
  misc_feature: MA Experiment ID: 108534 Result: Up-regulated in Transcription
  misc_feature: MA Experiment 108534 PARAMETER Experiment Name: Zm_4deg_Cold_P Parameter: Age (hr) Value: 8
  misc_feature: MA Experiment 108534 PARAMETER Experiment Name: Zm_4deg_Cold_P Parameter: Organism Value: Zea mays
  misc_feature: MA Experiment 108534 PARAMETER Experiment Name: Zm_4deg_Cold_P Parameter: Plant Line Value: 35A19
  misc_feature: MA Experiment 108534 PARAMETER Experiment Name: Zm_4deg_Cold_P Parameter: Temperature (deg C) Value: 4 vs. 22
  misc_feature: MA Experiment 108534 PARAMETER Experiment Name: Zm_4deg_Cold_P Parameter: Timepoint (hr) Value: 6
  misc_feature: MA Experiment 108534 PARAMETER Experiment Name: Zm_4deg_Cold_P Parameter: Tissue Value: Aerial
  misc_feature: MA Experiment ID: 108559 Result: Up-regulated in Transcription
  misc_feature: MA Experiment 108559 PARAMETER Experiment Name: Zm_5mM_NO_P Parameter: Age (day) Value: 8
  misc_feature: MA Experiment 108559 PARAMETER Experiment Name: Zm_5mM_NO_P Parameter: Organism Value: Zea mays
  misc_feature: MA Experiment 108559 PARAMETER Experiment Name: Zm_5mM_NO_P Parameter: Plant Line Value: 35A19
  misc_feature: MA Experiment 108559 PARAMETER Experiment Name: Zm_5mM_NO_P Parameter: Timepoint (hr) Value: 12
  misc_feature: MA Experiment 108559 PARAMETER Experiment Name: Zm_5mM_NO_P Parameter: Tissue Value: Aerial
  misc_feature: MA Experiment 108559 PARAMETER Experiment Name: Zm_5mM_NO_P Parameter: Treatment Value: 5mM NO vs. No Treatment
  misc_feature: MA Experiment ID: 20000492 Result: Down-regulated in Transcription
  misc_feature: MA Experiment 20000492 PARAMETER Experiment Name: Zm_Hybrid_Seed_Dev_P Parameter: DAP Value: 12
  misc_feature: MA Experiment 20000492 PARAMETER Experiment Name: Zm_Hybrid_Seed_Dev_P Parameter: Organism Value: Zea mays
  misc_feature: MA Experiment 20000492 PARAMETER Experiment Name: Zm_Hybrid_Seed_Dev_P Parameter: Plant Line Value: 35A19
  misc_feature: MA Experiment 20000492 PARAMETER Experiment Name: Zm_Hybrid_Seed_Dev_P Parameter: Tissue Value: Fert Kernel vs. Unfert Floret
  misc_feature: MA Experiment ID: 20000629 Result: Down-regulated in Transcription
  misc_feature: MA Experiment 20000629 PARAMETER Experiment Name: Zm_Herbicide-Treatments_P Parameter: Timepoint (hr) Value: 12
  misc_feature: MA Experiment 20000629 PARAMETER Experiment Name: Zm_Herbicide-Treatments_P Parameter: Tissue Value: Aerial
  misc_feature: MA Experiment 20000629 PARAMETER Experiment Name: Zm_Herbicide-Treatments_P Parameter: Treatment Value: Trimec vs. No Treatment
attcgttcactctctcgtacgcatcctcattctatattgtggatgggcgtcgtcgaaccgtgccgcatcgcacgatcgccctcccgtcaagctacaccatgccccatcccgccacattgtcccatcggcctcctgtcccgctgcccacgacactagtctcttgtctcgtcgtgctgcctcctcaacgctttgttaacattagagattgaaaggtagcatcgtagcaaaatgaaggcaccatcactactggttcagtgtttccctggcttgcttcccagcaaggccactagttgcgtgccaattgtatctgagaaggatctgcagctaccatcaccagctgttgaaataatcccctcaaagagtgttcatccatacaaatatgctggagagaaggttgatgtgcaaggtcttaatattttcaagggtaaagtcagtgtagcagatatgatagttatctcaccttctgaagtagcatcatcaaaatatgatggaactccgaaatactgggagagttccattacccttgtcgacattcttaaaaatgagatccgtgatggccagttgagcttcaggggcaagcgggttctagagcttggatgtggatatggcctctctgggatttttgcctgcttgaagggtgcatccacagttcactttcaggacataaatgcagaaacgatacggtgcagaacaatacccaatgttcttgcaaatcttgagcaggctcaggaccgacagaacagaccatcagagagccctgttacaccatctaggcagctcttggctcctaatgtacatttctatgctggagagtgggatgaactcccaacaattctctcagttgtgcagccacctgcagcaccaacaaacctcagcttctctgaggatgattttatggatggctgcagtagccatgatggaagcagtgtagttggtcatgactactgccccaggagatctaggaagctttctggtagccgtgcatgggagagagctagtgagaccgaccaggcagatagtggctatgatgtgatcttgatttctgatgtcccctacgcagctaactctctgaagaagctctatgcgcttatttcaaagtgcctacgtcctccttatggagtcctgtacgtcgcttccaagaagaacttggttggttccaatggtggcgccaggcagcttcgagctctcatggaagaggaaggtgtccttggtggccacttcttgactgaggtgtgtgacagggagatatggaagttctttttcaagtgagcaaatataggaagtgggaagagaaggaaatgagttctgacgttgaaacccagtttttatggtttctatatgcagcgatgtacataccgcgaggcatagttccattaattctttggtagtaggttgaaacttcaagaaatatctgcagttgagcttgcacaagtgttggaatcctttaccgctttgtagatctgctatgtgctaatgtcgctctattaagtacagaaagcaaattgtggtaacgtttt

SEQ ID NO: 15668 - protein, 346 aa, Zea mays subsp. mays
  peptide (1)..(346): Ceres Seq. ID no. 12350178
  misc_feature (1)..(346): Homolog of NCBI NO: 38346224 NR Description: OJ990528_30.4 [Oryza sativa (japonica
  misc_feature (1)..(346): Homolog of NCBI NO: 18406207 NR Description: expressed protein; protein id: At2g43320.1, by cDNA: gi_14517475, supported by cDNA: gi_16226902 [Arabidopsis >gi|14517476|gb|AAK62628.1| At2g43320/T1O24.6 [Arabidopsis
  misc_feature (1)..(346): Homolog of NCBI NO: 16226903 NR Description: At2g43320/T1O24.6 [Arabidopsis thaliana]
  misc_feature (1)..(294): Homolog of NCBI NO: 25408858 NR Description: hypothetical protein At2g43320 [imported] -
  misc_feature (290)..(346): Homolog of NCBI NO: 25408858 NR Description: hypothetical protein At2g43320 [imported] -
  misc_feature (28)..(206): Homolog of NCBI NO: 21554662 NR Description: unknown [Arabidopsis thaliana]
  misc_feature (258)..(346): Homolog of NCBI NO: 21554662 NR Description: unknown [Arabidopsis thaliana]
  misc_feature (27)..(206): Homolog of NCBI NO: 18414120 NR Description: expressed protein; protein id: At4g14000.1, by cDNA: 25991., supported by cDNA: gi_18252964 [Arabidopsis >gi|18252965|gb|AAL62409.1| unknown protein [Arabidopsis
  misc_feature (258)..(346): Homolog of NCBI NO: 18414120 NR Description: expressed protein; protein id: At4g14000.1, by cDNA: 25991., supported by cDNA: gi_18252964 [Arabidopsis >gi|18252965|gb|AAL62409.1| unknown protein [Arabidopsis
  misc_feature (27)..(150): Homolog of NCBI NO: 7485012 NR Description: hypothetical protein - Arabidopsis thaliana hypothetical protein [Arabidopsis thaliana]
MKAPSLLVQCFPGLLPSKATSCVPIVSEKDLQLPSPAVEIIPSKSVHPYKYAGEKVDVQGLNIFKGKVSVADMIVISPSEVASSKYDGTPKYWESSITLVDILKNEIRDGQLSFRGKRVLELGCGYGLSGIFACLKGASTVHFQDINAETIRCRTIPNVLANLEQAQDRQNRPSESPVTPSRQLLAPNVHFYAGEWDELPTILSVVQPPAAPTNLSFSEDDFMDGCSSHDGSSVVGHDYCPRRSRKLSGSRAWERASETDQADSGYDVILISDVPYAANSLKKLYALISKCLRPPYGVLYVASKKNLVGSNGGARQLRALMEEEGVLGGHFLTEVCDREIWKFFFK

SEQ ID NO: 15669 - protein, 274 aa, Zea mays subsp. mays
  peptide (1)..(274): Ceres Seq. ID no. 12350179
  misc_feature (1)..(274): Homolog of NCBI NO: 38346224 NR Description: OJ990528_30.4 [Oryza sativa (japonica
  misc_feature (1)..(274): Homolog of NCBI NO: 18406207 NR Description: expressed protein; protein id: At2g43320.1, by cDNA: gi_14517475, supported by cDNA: gi_16226902 [Arabidopsis >gi|14517476|gb|AAK62628.1| At2g43320/T1O24.6 [Arabidopsis
  misc_feature (1)..(274): Homolog of NCBI NO: 16226903 NR Description: At2g43320/T1O24.6 [Arabidopsis thaliana]
  misc_feature (1)..(222): Homolog of NCBI NO: 25408858 NR Description: hypothetical protein At2g43320 [imported] -
  misc_feature (218)..(274): Homolog of NCBI NO: 25408858 NR Description: hypothetical protein At2g43320 [imported] -
  misc_feature (1)..(134): Homolog of NCBI NO: 21554662 NR Description: unknown [Arabidopsis thaliana]
  misc_feature (186)..(274): Homolog of NCBI NO: 21554662 NR Description: unknown [Arabidopsis thaliana]
  misc_feature (1)..(134): Homolog of NCBI NO: 18414120 NR Description: expressed protein; protein id: At4g14000.1, by cDNA: 25991., supported by cDNA: gi_18252964 [Arabidopsis >gi|18252965|gb|AAL62409.1| unknown protein [Arabidopsis
  misc_feature (186)..(274): Homolog of NCBI NO: 18414120 NR Description: expressed protein; protein id: At4g14000.1, by cDNA: 25991., supported by cDNA: gi_18252964 [Arabidopsis >gi|18252965|gb|AAL62409.1| unknown protein [Arabidopsis
  misc_feature (1)..(78): Homolog of NCBI NO: 7485012 NR Description: hypothetical protein - Arabidopsis thaliana hypothetical protein [Arabidopsis thaliana]
MIVISPSEVASSKYDGTPKYWESSITLVDILKNEIRDGQLSFRGKRVLELGCGYGLSGIFACLKGASTVHFQDINAETIRCRTIPNVLANLEQAQDRQNRPSESPVTPSRQLLAPNVHFYAGEWDELPTILSVVQPPAAPTNLSFSEDDFMDGCSSHDGSSVVGHDYCPRRSRKLSGSRAWERASETDQADSGYDVILISDVPYAANSLKKLYALISKCLRPPYGVLYVASKKNLVGSNGGARQLRALMEEEGVLGGHFLTEVCDREIWKFFFK

SEQ ID NO: 15670 - DNA, 1874 bp, Zea mays subsp. mays
  misc_feature (1)..(1874): Ceres Seq. ID no. 12360030
  misc_feature: MA Experiment ID: 108534 Result: Down-regulated in Transcription
  misc_feature: MA Experiment 108534 PARAMETER Experiment Name: Zm_4deg_Cold_P Parameter: Age (hr) Value: 8
  misc_feature: MA Experiment 108534 PARAMETER Experiment Name: Zm_4deg_Cold_P Parameter: Organism Value: Zea mays
  misc_feature: MA Experiment 108534 PARAMETER Experiment Name: Zm_4deg_Cold_P Parameter: Plant Line Value: 35A19
  misc_feature: MA Experiment 108534 PARAMETER Experiment Name: Zm_4deg_Cold_P Parameter: Temperature (deg C) Value: 4 vs. 22
  misc_feature: MA Experiment 108534 PARAMETER Experiment Name: Zm_4deg_Cold_P Parameter: Timepoint (hr) Value: 6
  misc_feature: MA Experiment 108534 PARAMETER Experiment Name: Zm_4deg_Cold_P Parameter: Tissue Value: Aerial
aaccccaccagaccttcaaccgctacatttccgtcactaccggagccgccactccgacgaacgcgggcggcggagcggaagcgaaccagagcaccggtaaaaagaaaaggatgaggcttgggagtataaacggcttgcggttcacgcagcttaaacttgtcatccttgcgttcttcatgttgtttgttctctggaaatgggagaagggctcgtcatactacgattccgaaatcctccagccagatccgttggttctgactcatccagctaactcgaagtttgtagaccagcatacatccccagaagaagactttccaagtgcagatcgatcacaccggtcagtaggtaaagtagaaaagccggttactagtgcgctgccaccattgtctacgataggctattctgttgatgttgcagatgggaatgaagtgccacctcctgagaagaaagaatgcgagtacaggaatgggaagtgggtttctgacaatcgtagaccactatactcagggtttggttgtaagcaatggctttcagagagttggtcctgcagactaacccagcgaaaagatttcgcgtatgaaaaattcagatggcagcctgaagcttgtgagatgccagagtttgaggcctcccacttcttgagaagaatgcaggataaaaccatcgcttacgtgggcgattctctagggaggcagatgtttcagtcgatgatgtgtatggtcactggtggaaaggagaggctggatgtagaagatattggcgcagagtatggctttgtgttagcgccgggtgcaaaaaggccagacggctgggcctaccggttcccgagcaccaacacaacaattctataccactggtcatcaacgctctgtgatttggagcccctgaacccatcagaccgagcgaccagttattccatgcacctggaccgcccgcctgcttttctgaagagcaacctccacaggctccatgtcctggtcctcaacaccggccaccactggaaccgggggaagctgagggcgaacaggtgggagatgtatctcggcggagcgccgaacaacgacaggaacaccgccgtcatttggaaggccaagaacttcaccgtccacaacgtcgtcaggtgggtggacgcgcagctcccccgccaccccaagctgaaggcgttctacaggtcgatatcgccccggcacttcttcaacggtgactgggacaccggaggcagctgcgacaacaccagccctctggccaagggagggagcggcgtccacctcgaccgttcggaggacgccgacgccgagggcgccgtgaggggcaccggggtcaggctcctggacgtcactgccctatcgcggctgagggacgaagggcatatttcgcggtacagcatcaaggccacttctggcgttcaggattgcctgcactggtgccttcccggcgtgcctgacacctggaacgagatccttgcggcccagctatagcctgtagctgaatttgaagatgccaagggctacatcgaattgtttatgggtgaagctcgtatatacagtaactaccacggagtactacgtcgttgccggagacccaatgctgctggtagtgaaacactgagctgcagtacattctttagggaccgtgcttaactgtagaaaatacagggcctttttttgtgtaagtacatgttgtgtttgcctactattacctatgtacgccagttgttaattggagaactggattgatagatagtttggaagtgttgcctgagaggtagggcaacgtatcttgcagcatccagtcctttgagaactcatctgttatgtaccaaacacgaacagagagcatcatgcattgctgatccatgtgatgtggttgttggt

SEQ ID NO: 15671 - protein, 491 aa, Zea mays subsp. mays
  peptide (1)..(491): Ceres Seq. ID no. 12360031
  misc_feature (333)..(491): Pfam Name: Arabidopsis proteins of unknown function Pfam Description: Arabidopsis proteins of unknown function
  misc_feature (98)..(491): Homolog of NCBI NO: 15810385 NR Description: unknown protein [Arabidopsis thaliana]
  misc_feature (98)..(491): Homolog of NCBI NO: 18420285 NR Description: putative protein; protein id: At5g20680.1,
  misc_feature (147)..(491): Homolog of NCBI NO: 8777315 NR Description: gene_id:MBM17.12~pir||T02538~strong similarity to
  misc_feature (151)..(491): Homolog of NCBI NO: 30697938 NR Description: expressed protein [Arabidopsis thaliana]
  misc_feature (147)..(491): Homolog of NCBI NO: 15224349 NR Description: unknown protein; protein id: At2g37720.1
  misc_feature (149)..(491): Homolog of NCBI NO: 9759321 NR Description: gb|AAF00670.1~gene_id:MBL20.11~strong similarity
  misc_feature (149)..(491): Homolog of NCBI NO: 18415139 NR Description: putative protein; protein id: At5g06230.1, by cDNA: gi_13605530 [Arabidopsis thaliana] AT5g06230/MBL20_11 [Arabidopsis thaliana]
  misc_feature (151)..(489): Homolog of NCBI NO: 6862912 NR Description: unknown protein [Arabidopsis thaliana]
  misc_feature (151)..(491): Homolog of NCBI NO: 15229797 NR Description: hypothetical protein; protein id: At3g11570.1
  misc_feature (151)..(489): Homolog of NCBI NO: 15239660 NR Description: putative protein; protein id: At5g19160.1
PHQTFNRYISVTTGAATPTNAGGGAEANQSTGKKKRMRLGSINGLRFTQLKLVILAFFMLFVLWKWEKGSSYYDSEILQPDPLVLTHPANSKFVDQHTSPEEDFPSADRSHRSVGKVEKPVTSALPPLSTIGYSVDVADGNEVPPPEKKECEYRNGKWVSDNRRPLYSGFGCKQWLSESWSCRLTQRKDFAYEKFRWQPEACEMPEFEASHFLRRMQDKTIAYVGDSLGRQMFQSMMCMVTGGKERLDVEDIGAEYGFVLAPGAKRPDGWAYRFPSTNTTILYHWSSTLCDLEPLNPSDRATSYSMHLDRPPAFLKSNLHRLHVLVLNTGHHWNRGKLRANRWEMYLGGAPNNDRNTAVIWKAKNFTVHNVVRWVDAQLPRHPKLKAFYRSISPRHFFNGDWDTGGSCDNTSPLAKGGSGVHLDRSEDADAEGAVRGTGVRLLDVTALSRLRDEGHISRYSIKATSGVQDCLHWCLPGVPDTWNEILAAQL

SEQ ID NO: 15672 - protein, 455 aa, Zea mays subsp. mays
  peptide (1)..(455): Ceres Seq. ID no. 12360032
  misc_feature (297)..(455): Pfam Name: Arabidopsis proteins of unknown function Pfam Description: Arabidopsis proteins of unknown function
  misc_feature (62)..(455): Homolog of NCBI NO: 15810385 NR Description: unknown protein [Arabidopsis thaliana]
  misc_feature (62)..(455): Homolog of NCBI NO: 18420285 NR Description: putative protein; protein id: At5g20680.1,
  misc_feature (111)..(455): Homolog of NCBI NO: 8777315 NR Description: gene_id:MBM17.12~pir||T02538~strong similarity to
  misc_feature (115)..(455): Homolog of NCBI NO: 30697938 NR Description: expressed protein [Arabidopsis thaliana]
  misc_feature (111)..(455): Homolog of NCBI NO: 15224349 NR Description: unknown protein; protein id: At2g37720.1
  misc_feature (113)..(455): Homolog of NCBI NO: 9759321 NR Description: gb|AAF00670.1~gene_id:MBL20.11~strong similarity
  misc_feature (113)..(455): Homolog of NCBI NO: 18415139 NR Description: putative protein; protein id: At5g06230.1, by cDNA: gi_13605530 [Arabidopsis thaliana] AT5g06230/MBL20_11 [Arabidopsis thaliana]
  misc_feature (115)..(453): Homolog of NCBI NO: 6862912 NR Description: unknown protein [Arabidopsis thaliana]
  misc_feature (115)..(455): Homolog of NCBI NO: 15229797 NR Description: hypothetical protein; protein id: At3g11570.1
  misc_feature (115)..(453): Homolog of NCBI NO: 15239660 NR Description: putative protein; protein id: At5g19160.1
MRLGSINGLRFTQLKLVILAFFMLFVLWKWEKGSSYYDSEILQPDPLVLTHPANSKFVDQHTSPEEDFPSADRSHRSVGKVEKPVTSALPPLSTIGYSVDVADGNEVPPPEKKECEYRNGKWVSDNRRPLYSGFGCKQWLSESWSCRLTQRKDFAYEKFRWQPEACEMPEFEASHFLRRMQDKTIAYVGDSLGRQMFQSMMCMVTGGKERLDVEDIGAEYGFVLAPGAKRPDGWAYRFPSTNTTILYHWSSTLCDLEPLNPSDRATSYSMHLDRPPAFLKSNLHRLHVLVLNTGHHWNRGKLRANRWEMYLGGAPNNDRNTAVIWKAKNFTVHNVVRWVDAQLPRHPKLKAFYRSISPRHFFNGDWDTGGSCDNTSPLAKGGSGVHLDRSEDADAEGAVRGTGVRLLDVTALSRLRDEGHISRYSIKATSGVQDCLHWCLPGVPDTWNEILAAQL

SEQ ID NO: 15673 - protein, 433 aa, Zea mays subsp. mays
  peptide (1)..(433): Ceres Seq. ID no. 12360033
  misc_feature (275)..(433): Pfam Name: Arabidopsis proteins of unknown function Pfam Description: Arabidopsis proteins of unknown function
  misc_feature (40)..(433): Homolog of NCBI NO: 15810385 NR Description: unknown protein [Arabidopsis thaliana]
  misc_feature (40)..(433): Homolog of NCBI NO: 18420285 NR Description: putative protein; protein id: At5g20680.1,
  misc_feature (89)..(433): Homolog of NCBI NO: 8777315 NR Description: gene_id:MBM17.12~pir||T02538~strong similarity to
  misc_feature (93)..(433): Homolog of NCBI NO: 30697938 NR Description: expressed protein [Arabidopsis thaliana]
  misc_feature (89)..(433): Homolog of NCBI NO: 15224349 NR Description: unknown protein; protein id: At2g37720.1
  misc_feature (91)..(433): Homolog of NCBI NO: 9759321 NR Description: gb|AAF00670.1~gene_id:MBL20.11~strong similarity
  misc_feature (91)..(433): Homolog of NCBI NO: 18415139 NR Description: putative protein; protein id: At5g06230.1, by cDNA: gi_13605530 [Arabidopsis thaliana] AT5g06230/MBL20_11 [Arabidopsis thaliana]
  misc_feature (93)..(431): Homolog of NCBI NO: 6862912 NR Description: unknown protein [Arabidopsis thaliana]
  misc_feature (93)..(433): Homolog of NCBI NO: 15229797 NR Description: hypothetical protein; protein id: At3g11570.1
  misc_feature (93)..(431): Homolog of NCBI NO: 15239660 NR Description: putative protein; protein id: At5g19160.1
MLFVLWKWEKGSSYYDSEILQPDPLVLTHPANSKFVDQHTSPEEDFPSADRSHRSVGKVEKPVTSALPPLSTIGYSVDVADGNEVPPPEKKECEYRNGKWVSDNRRPLYSGFGCKQWLSESWSCRLTQRKDFAYEKFRWQPEACEMPEFEASHFLRRMQDKTIAYVGDSLGRQMFQSMMCMVTGGKERLDVEDIGAEYGFVLAPGAKRPDGWAYRFPSTNTTILYHWSSTLCDLEPLNPSDRATSYSMHLDRPPAFLKSNLHRLHVLVLNTGHHWNRGKLRANRWEMYLGGAPNNDRNTAVIWKAKNFTVHNVVRWVDAQLPRHPKLKAFYRSISPRHFFNGDWDTGGSCDNTSPLAKGGSGVHLDRSEDADAEGAVRGTGVRLLDVTALSRLRDEGHISRYSIKATSGVQDCLHWCLPGVPDTWNEILAAQL

SEQ ID NO: 15674 - DNA, 1326 bp, Zea mays subsp. mays
  misc_feature (1)..(1326): Ceres Seq. ID no. 12359521
  misc_feature: MA Experiment ID: 108527 Result: Down-regulated in Transcription
  misc_feature: MA Experiment 108527 PARAMETER Experiment Name: Zm_5mM_NO_P Parameter: Age (day) Value: 8
  misc_feature: MA Experiment 108527 PARAMETER Experiment Name: Zm_5mM_NO_P Parameter: Organism Value: Zea mays
  misc_feature: MA Experiment 108527 PARAMETER Experiment Name: Zm_5mM_NO_P Parameter: Plant Line Value: 35A19
  misc_feature: MA Experiment 108527 PARAMETER Experiment Name: Zm_5mM_NO_P Parameter: Timepoint (hr) Value: 6
  misc_feature: MA Experiment 108527 PARAMETER Experiment Name: Zm_5mM_NO_P Parameter: Tissue Value: Aerial
  misc_feature: MA Experiment 108527 PARAMETER Experiment Name: Zm_5mM_NO_P Parameter: Treatment Value: 5mM NO vs. No Treatment
  misc_feature: MA Experiment ID: 108529 Result: Up-regulated in Transcription
  misc_feature: MA Experiment 108529 PARAMETER Experiment Name: Zm_Imbibed_Seeds_P Parameter: Age (day) Value: 5 vs. 2
  misc_feature: MA Experiment 108529 PARAMETER Experiment Name: Zm_Imbibed_Seeds_P Parameter: Organism Value: Zea mays
  misc_feature: MA Experiment 108529 PARAMETER Experiment Name: Zm_Imbibed_Seeds_P Parameter: Plant Line Value: 35A19
  misc_feature: MA Experiment 108529 PARAMETER Experiment Name: Zm_Imbibed_Seeds_P Parameter: Tissue Value: Roots vs. Embryo
  misc_feature: MA Experiment ID: 108535 Result: Down-regulated in Transcription
  misc_feature: MA Experiment 108535 PARAMETER Experiment Name: Zm_Meristem_P Parameter: Age (day) Value: 8
  misc_feature: MA Experiment 108535 PARAMETER Experiment Name: Zm_Meristem_P Parameter: Organism Value: Zea mays
  misc_feature: MA Experiment 108535 PARAMETER Experiment Name: Zm_Meristem_P Parameter: Plant Line Value: 35A19
  misc_feature: MA Experiment 108535 PARAMETER Experiment Name: Zm_Meristem_P Parameter: Tissue Value: Root Meristem vs. Above Root Meristem
  misc_feature: MA Experiment ID: 108543 Result: Up-regulated in Transcription
  misc_feature: MA Experiment ID: 108544 Result: Down-regulated in Transcription
  misc_feature: MA Experiment ID: 108545 Result: Down-regulated in Transcription
  misc_feature: MA Experiment 108545 PARAMETER Experiment Name: Zm_Imbibed_Seeds_P Parameter: Age (day) Value: 3 vs. 2
  misc_feature: MA Experiment 108545 PARAMETER Experiment Name: Zm_Imbibed_Seeds_P Parameter: Organism Value: Zea mays
  misc_feature: MA Experiment 108545 PARAMETER Experiment Name: Zm_Imbibed_Seeds_P Parameter: Plant Line Value: 35A19
  misc_feature: MA Experiment 108545 PARAMETER Experiment Name: Zm_Imbibed_Seeds_P Parameter: Tissue Value: Aerial vs. Embryo
  misc_feature: MA Experiment ID: 108546 Result: Up-regulated in Transcription
  misc_feature: MA Experiment 108546 PARAMETER Experiment Name: Zm_Imbibed_Seeds_P Parameter: Age (day) Value: 3 vs. 2
  misc_feature: MA Experiment 108546 PARAMETER Experiment Name: Zm_Imbibed_Seeds_P Parameter: Organism Value: Zea mays
  misc_feature: MA Experiment 108546 PARAMETER Experiment Name: Zm_Imbibed_Seeds_P Parameter: Plant Line Value: 35A19
  misc_feature: MA Experiment 108546 PARAMETER Experiment Name: Zm_Imbibed_Seeds_P Parameter: Tissue Value: Roots vs. Embryo
  misc_feature: MA Experiment ID: 108556 Result: Down-regulated in Transcription
  misc_feature: MA Experiment 108556 PARAMETER Experiment Name: Zm_Drought_P Parameter: Age (day) Value: 9
  misc_feature: MA Experiment 108556 PARAMETER Experiment Name: Zm_Drought_P Parameter: Organism Value: Zea mays
  misc_feature: MA Experiment 108556 PARAMETER Experiment Name: Zm_Drought_P Parameter: Plant Line Value: 35A19
  misc_feature: MA Experiment 108556 PARAMETER Experiment Name: Zm_Drought_P Parameter: Timepoint (hr) Value: 24
  misc_feature: MA Experiment 108556 PARAMETER Experiment Name: Zm_Drought_P Parameter: Tissue Value: Aerial
  misc_feature: MA Experiment 108556 PARAMETER Experiment Name: Zm_Drought_P Parameter: Treatment Value: Drought vs. No Drought
  misc_feature: MA Experiment ID: 108559 Result: Down-regulated in Transcription
  misc_feature: MA Experiment 108559 PARAMETER Experiment Name: Zm_5mM_NO_P Parameter: Age (day) Value: 8
  misc_feature: MA Experiment 108559 PARAMETER Experiment Name: Zm_5mM_NO_P Parameter: Organism Value: Zea mays
  misc_feature: MA Experiment 108559 PARAMETER Experiment Name: Zm_5mM_NO_P Parameter: Plant Line Value: 35A19
  misc_feature: MA Experiment 108559 PARAMETER Experiment Name: Zm_5mM_NO_P Parameter: Timepoint (hr) Value: 12
  misc_feature: MA Experiment 108559 PARAMETER Experiment Name: Zm_5mM_NO_P Parameter: Tissue Value: Aerial
  misc_feature: MA Experiment 108559 PARAMETER Experiment Name: Zm_5mM_NO_P Parameter: Treatment Value: 5mM NO vs. No Treatment
  misc_feature: MA Experiment ID: 20000477 Result: Down-regulated in Transcription
  misc_feature: MA Experiment 20000477 PARAMETER Experiment Name: Zm_5mM_SA_P Parameter: Age (day) Value: 10
  misc_feature: MA Experiment 20000477 PARAMETER Experiment Name: Zm_5mM_SA_P Parameter: Organism Value: Zea mays
  misc_feature: MA Experiment 20000477 PARAMETER Experiment Name: Zm_5mM_SA_P Parameter: Plant Line Value: 35A19
  misc_feature: MA Experiment 20000477 PARAMETER Experiment Name: Zm_5mM_SA_P Parameter: Timepoint (hr) Value: 48
  misc_feature: MA Experiment 20000477 PARAMETER Experiment Name: Zm_5mM_SA_P Parameter: Tissue Value: Aerial
  misc_feature: MA Experiment 20000477 PARAMETER Experiment Name: Zm_5mM_SA_P Parameter: Treatment Value: 5mM SA vs. No Treatment
  misc_feature: MA Experiment ID: 20000478 Result: Down-regulated in Transcription
  misc_feature: MA Experiment 20000478 PARAMETER Experiment Name: Zm_5mM_SA_P Parameter: Age (day) Value: 11
  misc_feature: MA Experiment 20000478 PARAMETER Experiment Name: Zm_5mM_SA_P Parameter: Organism Value: Zea mays
  misc_feature: MA Experiment 20000478 PARAMETER Experiment Name: Zm_5mM_SA_P Parameter: Plant Line Value: 35A19
  misc_feature: MA Experiment 20000478 PARAMETER Experiment Name: Zm_5mM_SA_P Parameter: Timepoint (hr) Value: 72
  misc_feature: MA Experiment 20000478 PARAMETER Experiment Name: Zm_5mM_SA_P Parameter: Tissue Value: Aerial
  misc_feature: MA Experiment 20000478 PARAMETER Experiment Name: Zm_5mM_SA_P Parameter: Treatment Value: 5mM SA vs. No Treatment
  misc_feature: MA Experiment ID: 20000479 Result: Down-regulated in Transcription
  misc_feature: MA Experiment 20000479 PARAMETER Experiment Name: Zm_Drought_P Parameter: Age (day) Value: 10
  misc_feature: MA Experiment 20000479 PARAMETER Experiment Name: Zm_Drought_P Parameter: Organism Value: Zea mays
  misc_feature: MA Experiment 20000479 PARAMETER Experiment Name: Zm_Drought_P Parameter: Plant Line Value: 35A19
  misc_feature: MA Experiment 20000479 PARAMETER Experiment Name: Zm_Drought_P Parameter: Timepoint (hr) Value: 48
  misc_feature: MA Experiment 20000479 PARAMETER Experiment Name: Zm_Drought_P Parameter: Tissue Value: Aerial
  misc_feature: MA Experiment 20000479 PARAMETER Experiment Name: Zm_Drought_P Parameter: Treatment Value: Drought vs. No Drought
  misc_feature: MA Experiment ID: 20000480 Result: Down-regulated in Transcription
  misc_feature: MA Experiment 20000480 PARAMETER Experiment Name: Zm_Drought_P Parameter: Age (day) Value: 11
  misc_feature: MA Experiment 20000480 PARAMETER Experiment Name: Zm_Drought_P Parameter: Organism Value: Zea mays
  misc_feature: MA Experiment 20000480 PARAMETER Experiment Name: Zm_Drought_P Parameter: Plant Line Value: 35A19
  misc_feature: MA Experiment 20000480 PARAMETER Experiment Name: Zm_Drought_P Parameter: Timepoint (hr) Value: 72
  misc_feature: MA Experiment 20000480 PARAMETER Experiment Name: Zm_Drought_P Parameter: Tissue Value: Aerial
  misc_feature: MA Experiment 20000480 PARAMETER Experiment Name: Zm_Drought_P Parameter: Treatment Value: Drought vs. No Drought
  misc_feature: MA Experiment ID: 20000532 Result: Down-regulated in Transcription
  misc_feature: MA Experiment 20000532 PARAMETER Experiment Name: Zm_0.001percent_MeJA_P Parameter: Age (day) Value: 10
  misc_feature: MA Experiment 20000532 PARAMETER Experiment Name: Zm_0.001percent_MeJA_P Parameter: Organism Value: Zea mays
  misc_feature: MA Experiment 20000532 PARAMETER Experiment Name: Zm_0.001percent_MeJA_P Parameter: Plant Line Value: 35A19
  misc_feature: MA Experiment 20000532 PARAMETER Experiment Name: Zm_0.001percent_MeJA_P Parameter: Timepoint (hr) Value: 48
  misc_feature: MA Experiment 20000532 PARAMETER Experiment Name: Zm_0.001percent_MeJA_P Parameter: Tissue Value: Aerial
  misc_feature: MA Experiment 20000532 PARAMETER Experiment Name: Zm_0.001percent_MeJA_P Parameter: Treatment Value: 0.001percent MeJA vs. No Treatment
  misc_feature: MA Experiment ID: 20000533 Result: Down-regulated in Transcription
  misc_feature: MA Experiment 20000533 PARAMETER Experiment Name: Zm_0.001percent_MeJA_P Parameter: Age (day) Value: 11
  misc_feature: MA Experiment 20000533 PARAMETER Experiment Name: Zm_0.001percent_MeJA_P Parameter: Organism Value: Zea mays
  misc_feature: MA Experiment 20000533 PARAMETER Experiment Name: Zm_0.001percent_MeJA_P Parameter: Plant Line Value: 35A19
  misc_feature: MA Experiment 20000533 PARAMETER Experiment Name: Zm_0.001percent_MeJA_P Parameter: Timepoint (hr) Value: 72
  misc_feature: MA Experiment 20000533 PARAMETER Experiment Name: Zm_0.001percent_MeJA_P Parameter: Tissue Value: Aerial
  misc_feature: MA Experiment 20000533 PARAMETER Experiment Name: Zm_0.001percent_MeJA_P Parameter: Treatment Value: 0.001percent MeJA vs. No Treatment
  misc_feature: MA Experiment ID: 20000535 Result: Down-regulated in Transcription
  misc_feature: MA Experiment 20000535 PARAMETER Experiment Name: Zm_Hybrid_Seed_Dev_P Parameter: DAP Value: 30 vs. 12
  misc_feature: MA Experiment 20000535 PARAMETER Experiment Name: Zm_Hybrid_Seed_Dev_P Parameter: Organism Value: Zea mays
  misc_feature: MA Experiment 20000535 PARAMETER Experiment Name: Zm_Hybrid_Seed_Dev_P Parameter: Plant Line Value: 35A19
  misc_feature: MA Experiment 20000535 PARAMETER Experiment Name: Zm_Hybrid_Seed_Dev_P Parameter: Tissue Value: Embryo vs. Unfert Floret
  misc_feature: MA Experiment ID: 20001614 Result: Down-regulated in Transcription
  misc_feature: MA Experiment 20001614 PARAMETER Experiment Name: Zm_50ppm_KNO3_L-to-H_P Parameter: Age (day) Value: 21
  misc_feature: MA Experiment 20001614 PARAMETER Experiment Name: Zm_50ppm_KNO3_L-to-H_P Parameter: Organism Value: Zea mays
  misc_feature: MA Experiment 20001614 PARAMETER Experiment Name: Zm_50ppm_KNO3_L-to-H_P Parameter: Plant Line Value: 35A19
  misc_feature: MA Experiment 20001614 PARAMETER Experiment Name: Zm_50ppm_KNO3_L-to-H_P Parameter: Timepoint (hr) Value: 48
  misc_feature: MA Experiment 20001614 PARAMETER Experiment Name: Zm_50ppm_KNO3_L-to-H_P Parameter: Tissue Value: Roots
  misc_feature: MA Experiment 20001614 PARAMETER Experiment Name: Zm_50ppm_KNO3_L-to-H_P Parameter: Treatment Value: 50ppm KNO3 vs. 50ppm KCl
gtcagtccctcccaacctccattccttcctcctttgccaatgcagctctgatctctcctacctgagaatgtcagtgtgagtggccattccatctgcacaacatcctcctccacgcacgcacgcaaaacatacaaaaaggcagaagcggaggagatgaaggcaatggccgggccaaagctgctcgtcgtccacgcgtcgtcgaacaaggccctgaacgggatggcgcccacgtcgccgccgtcgcccggctggtcccggtgcctgtggctggtggtgttcctggccttgttcacctgcgtgtccctcctgaccgtgctctccacggcgcgcgcctcggccggggcgccggcgtgccaggcggcgtcgctcacggccagcgctgccggcgccacggaggccggcctgccgcggcacgtgttcgacgcgctggtgcagtacgcggcggcggcagggaacttgtcgtcgagcatgccggagccggacgtgcgcgcgatcgcgtcggtgctccggcggcgcgcgccgtgcaacctgctggtgttcgggctgggcgcggagacgccgctgtggcgcgcgctcaaccacggcgggcgcacggtgttcctggacgagaacccgtactacgtggcccacctggagggcaagcacccggggctggaggcctacgacgtggcctacgccacggcggtgcgcgagctccccgacctcctcgacgccgcccgtgccgcgcgcgccgccgagtgccgccccgtccagaacctgctcttctccgagtgccgcctcgccatcaacgacctccccaaccagctctacgacgtcgcctgggacgtcatcctcgtcgacggcccgcgcgggttcatggaggggtcgccggggaggatgtcggcgatctactcggctgcggtgatggcgcggaccaagggcgcggagacggaggtgatggtgcacgactacgagcgggaggtggagcgcgcgtgcggccgggagttcctgtgcgacgagaaccgggtcacggcgaccagcacgccgtcgctcggccacgtcgtcgtgcgcgacggcnccgccgccaaccgggaagccttctgcgggccgcccgccggcgccgctcagaaatcgaaaccgagctaagcgagtcgtagtcgttacttctccttcaaacaaatcatgtaattaactcaaggaagtataggtcagtggttcctcgtatttttttcgaacaaatcctgtgggtggtggtggtccaatgatttctcccttcaaacatactgtaatgcctgacgtgccaacacatttgacacgtttaagagaaattttgcatttacaactctt

SEQ ID NO: 15675 - protein, 323 aa, Zea mays subsp. mays
  peptide (1)..(323): Ceres Seq. ID no. 12359522
  misc_feature (75)..(310): Pfam Name: Protein of unknown function (DUF579) Pfam Description: Protein of unknown function (DUF579)
  misc_feature (39)..(320): Homolog of NCBI NO: 10241434 NR Description: putative protein [Oryza sativa (indica
  misc_feature (37)..(310): Homolog of NCBI NO: 15229700 NR Description: putative protein; protein id: At3g50220.1, by cDNA: 35440. [Arabidopsis thaliana] >gi|11282604|pir||T45568
  misc_feature (37)..(323): Homolog of NCBI NO: 15240242 NR Description: putative protein; protein id: At5g67210.1 thaliana] >gi|10177608|dbj|BAB10955.1| to unknown protein [Arabidopsis thaliana]
  misc_feature (37)..(310): Homolog of NCBI NO: 21593034 NR Description: unknown [Arabidopsis thaliana]
  misc_feature (1)..(309): Homolog of NCBI NO: 18397819 NR Description: expressed protein; protein id: At2g15440.1, by cDNA: 32729. [Arabidopsis thaliana] >gi|25354650|pir||A84529
  misc_feature (39)..(310): Homolog of NCBI NO: 15217566 NR Description: unknown protein; protein id: At1g09610.1
  misc_feature (84)..(280): Homolog of NCBI NO: 18409879 NR Description: hypothetical protein; protein id: At1g71690.1
  misc_feature (84)..(280): Homolog of NCBI NO: 25354648 NR Description: hypothetical protein F14O23.3 [imported] - thaliana >gi|7239492|gb|AAF43218.1|AC012654_2 EST gb|AI999169
  misc_feature (84)..(280): Homolog of NCBI NO: 18398986 NR Description: expressed protein; protein id: At1g33800.1, by cDNA: 114466., supported by cDNA: gi_17979548, supported by gi_20453344 [Arabidopsis thaliana] >gi|25354651|pir||E86461
  misc_feature (84)..(310): Homolog of NCBI NO: 25402555 NR Description: hypothetical protein [imported] - Arabidopsis >gi|3482933|gb|AAC33218.1| Similar to cdc2 protein kinases
  misc_feature (302)..(302): Xaa is any aa, unknown or other
MKAMAGPKLLVVHASSNKALNGMAPTSPPSPGWSRCLWLVVFLALFTCVSLLTVLSTARASAGAPACQAASLTASAAGATEAGLPRHVFDALVQYAAAAGNLSSSMPEPDVRAIASVLRRRAPCNLLVFGLGAETPLWRALNHGGRTVFLDENPYYVAHLEGKHPGLEAYDVAYATAVRELPDLLDAARAARAAECRPVQNLLFSECRLAINDLPNQLYDVAWDVILVDGPRGFMEGSPGRMSAIYSAAVMARTKGAETEVMVHDYEREVERACGREFLCDENRVTATSTPSLGHVVVRDGXAANREAFCGPPAGAAQKSKPS

SEQ ID NO: 15676 - protein, 320 aa, Zea mays subsp. mays
  peptide (1)..(320): Ceres Seq. ID no. 12359523
  misc_feature (72)..(307): Pfam Name: Protein of unknown function (DUF579) Pfam Description: Protein of unknown function (DUF579)
  misc_feature (36)..(317): Homolog of NCBI NO: 10241434 NR Description: putative protein [Oryza sativa (indica
  misc_feature (34)..(307): Homolog of NCBI NO: 15229700 NR Description: putative protein; protein id: At3g50220.1, by cDNA: 35440. [Arabidopsis thaliana] >gi|11282604|pir||T45568
  misc_feature (34)..(320): Homolog of NCBI NO: 15240242 NR Description: putative protein; protein id: At5g67210.1 thaliana] >gi|10177608|dbj|BAB10955.1| to unknown protein [Arabidopsis thaliana]
  misc_feature (34)..(307): Homolog of NCBI NO: 21593034 NR Description: unknown [Arabidopsis thaliana]
  misc_feature (1)..(306): Homolog of NCBI NO: 18397819 NR Description: expressed protein; protein id: At2g15440.1, by cDNA: 32729. [Arabidopsis thaliana] >gi|25354650|pir||A84529
  misc_feature (36)..(307): Homolog of NCBI NO: 15217566 NR Description: unknown protein; protein id: At1g09610.1
  misc_feature (81)..(277): Homolog of NCBI NO: 18409879 NR Description: hypothetical protein; protein id: At1g71690.1
  misc_feature (81)..(277): Homolog of NCBI NO: 25354648 NR Description: hypothetical protein F14O23.3 [imported] - thaliana >gi|7239492|gb|AAF43218.1|AC012654_2 EST gb|AI999169
  misc_feature (81)..(277): Homolog of NCBI NO: 18398986 NR Description: expressed protein; protein id: At1g33800.1, by cDNA: 114466., supported by cDNA: gi_17979548, supported by gi_20453344 [Arabidopsis thaliana] >gi|25354651|pir||E86461
  misc_feature (81)..(307): Homolog of NCBI NO: 25402555 NR Description: hypothetical protein [imported] - Arabidopsis >gi|3482933|gb|AAC33218.1| Similar to cdc2 protein kinases
  misc_feature (299)..(299): Xaa is any aa, unknown or other
MAGPKLLVVHASSNKALNGMAPTSPPSPGWSRCLWLVVFLALFTCVSLLTVLSTARASAGAPACQAASLTASAAGATEAGLPRHVFDALVQYAAAAGNLSSSMPEPDVRAIASVLRRRAPCNLLVFGLGAETPLWRALNHGGRTVFLDENPYYVAHLEGKHPGLEAYDVAYATAVRELPDLLDAARAARAAECRPVQNLLFSECRLAINDLPNQLYDVAWDVILVDGPRGFMEGSPGRMSAIYSAAVMARTKGAETEVMVHDYEREVERACGREFLCDENRVTATSTPSLGHVVVRDGXAANREAFCGPPAGAAQKSKPS

SEQ ID NO: 15677 - protein, 301 aa, Zea mays subsp. mays
  peptide (1)..(301): Ceres Seq. ID no. 12359524
  misc_feature (53)..(288): Pfam Name: Protein of unknown function (DUF579) Pfam Description: Protein of unknown function (DUF579)
  misc_feature (17)..(298): Homolog of NCBI NO: 10241434 NR Description: putative protein [Oryza sativa (indica
  misc_feature (15)..(288): Homolog of NCBI NO: 15229700 NR Description: putative protein; protein id: At3g50220.1, by cDNA: 35440. [Arabidopsis thaliana] >gi|11282604|pir||T45568
  misc_feature (15)..(301): Homolog of NCBI NO: 15240242 NR Description: putative protein; protein id: At5g67210.1 thaliana] >gi|10177608|dbj|BAB10955.1| to unknown protein [Arabidopsis thaliana]
  misc_feature (15)..(288): Homolog of NCBI NO: 21593034 NR Description: unknown [Arabidopsis thaliana]
  misc_feature (1)..(287): Homolog of NCBI NO: 18397819 NR Description: expressed protein; protein id: At2g15440.1, by cDNA: 32729. [Arabidopsis thaliana] >gi|25354650|pir||A84529
  misc_feature (17)..(288): Homolog of NCBI NO: 15217566 NR Description: unknown protein; protein id: At1g09610.1
  misc_feature (62)..(258): Homolog of NCBI NO: 18409879 NR Description: hypothetical protein; protein id: At1g71690.1
  misc_feature (62)..(258): Homolog of NCBI NO: 25354648 NR Description: hypothetical protein F14O23.3 [imported] - thaliana >gi|7239492|gb|AAF43218.1|AC012654_2 EST gb|AI999169
  misc_feature (62)..(258): Homolog of NCBI NO: 18398986 NR Description: expressed protein; protein id: At1g33800.1, by cDNA: 114466., supported by cDNA: gi_17979548, supported by gi_20453344 [Arabidopsis thaliana] >gi|25354651|pir||E86461
  misc_feature (62)..(288): Homolog of NCBI NO: 25402555 NR Description: hypothetical protein [imported] - Arabidopsis >gi|3482933|gb|AAC33218.1| Similar to cdc2 protein kinases
  misc_feature (280)..(280): Xaa is any aa, unknown or other
MAPTSPPSPGWSRCLWLVVFLALFTCVSLLTVLSTARASAGAPACQAASLTASAAGATEAGLPRHVFDALVQYAAAAGNLSSSMPEPDVRAIASVLRRRAPCNLLVFGLGAETPLWRALNHGGRTVFLDENPYYVAHLEGKHPGLEAYDVAYATAVRELPDLLDAARAARAAECRPVQNLLFSECRLAINDLPNQLYDVAWDVILVDGPRGFMEGSPGRMSAIYSAAVMARTKGAETEVMVHDYEREVERACGREFLCDENRVTATSTPSLGHVVVRDGXAANREAFCGPPAGAAQKSKPS

SEQ ID NO: 15678 - DNA, 1268 bp, Zea mays subsp. mays
  misc_feature (1)..(1268): Ceres Seq. ID no. 12364236
  misc_feature: MA Experiment ID: 108528 Result: Down-regulated in Transcription
  misc_feature: MA Experiment 108528 PARAMETER Experiment Name: Zm_Imbibed_Seeds_P Parameter: Age (day) Value: 5 vs. 2
  misc_feature: MA Experiment 108528 PARAMETER Experiment Name: Zm_Imbibed_Seeds_P Parameter: Organism Value: Zea mays
  misc_feature: MA Experiment 108528 PARAMETER Experiment Name: Zm_Imbibed_Seeds_P Parameter: Plant Line Value: 35A19
  misc_feature: MA Experiment 108528 PARAMETER Experiment Name: Zm_Imbibed_Seeds_P Parameter: Tissue Value: Aerial vs. Embryo
  misc_feature: MA Experiment ID: 108530 Result: Down-regulated in Transcription
  misc_feature: MA Experiment 108530 PARAMETER Experiment Name: Zm_Imbibed_Seeds_P Parameter: Age (day) Value: 6 vs. 2
  misc_feature: MA Experiment 108530 PARAMETER Experiment Name: Zm_Imbibed_Seeds_P Parameter: Organism Value: Zea mays
  misc_feature: MA Experiment 108530 PARAMETER Experiment Name: Zm_Imbibed_Seeds_P Parameter: Plant Line Value: 35A19
  misc_feature: MA Experiment 108530 PARAMETER Experiment Name: Zm_Imbibed_Seeds_P Parameter: Tissue Value: Aerial vs. Embryo
  misc_feature: MA Experiment ID: 108535 Result: Down-regulated in Transcription
  misc_feature: MA Experiment 108535 PARAMETER Experiment Name: Zm_Meristem_P Parameter: Age (day) Value: 8
  misc_feature: MA Experiment 108535 PARAMETER Experiment Name: Zm_Meristem_P Parameter: Organism Value: Zea mays
  misc_feature: MA Experiment 108535 PARAMETER Experiment Name: Zm_Meristem_P Parameter: Plant Line Value: 35A19
  misc_feature: MA Experiment 108535 PARAMETER Experiment Name: Zm_Meristem_P Parameter: Tissue Value: Root Meristem vs. Above Root Meristem
  misc_feature: MA Experiment ID: 108543 Result: Up-regulated in Transcription
  misc_feature: MA Experiment ID: 108544 Result: Down-regulated in Transcription
  misc_feature: MA Experiment ID: 108545 Result: Down-regulated in Transcription
  misc_feature: MA Experiment 108545 PARAMETER Experiment Name: Zm_Imbibed_Seeds_P Parameter: Age (day) Value: 3 vs. 2
  misc_feature: MA Experiment 108545 PARAMETER Experiment Name: Zm_Imbibed_Seeds_P Parameter: Organism Value: Zea mays
  misc_feature: MA Experiment 108545 PARAMETER Experiment Name: Zm_Imbibed_Seeds_P Parameter: Plant Line Value: 35A19
  misc_feature: MA Experiment 108545 PARAMETER Experiment Name: Zm_Imbibed_Seeds_P Parameter: Tissue Value: Aerial vs. Embryo
  misc_feature: MA Experiment ID: 108547 Result: Down-regulated in Transcription
  misc_feature: MA Experiment 108547 PARAMETER Experiment Name: Zm_Imbibed_Seeds_P Parameter: Age (day) Value: 4 vs. 2
  misc_feature: MA Experiment 108547 PARAMETER Experiment Name: Zm_Imbibed_Seeds_P Parameter: Organism Value: Zea mays
  misc_feature: MA Experiment 108547 PARAMETER Experiment Name: Zm_Imbibed_Seeds_P Parameter: Plant Line Value: 35A19
  misc_feature: MA Experiment 108547 PARAMETER Experiment Name: Zm_Imbibed_Seeds_P Parameter: Tissue Value: Aerial vs. Embryo
  misc_feature: MA Experiment ID: 108689 Result: Up-regulated in Transcription
  misc_feature: MA Experiment 108689 PARAMETER Experiment Name: Zm_Drought_Roots_P Parameter: Age (day) Value: 9
  misc_feature: MA Experiment 108689 PARAMETER Experiment Name: Zm_Drought_Roots_P Parameter: Organism Value: Zea mays
  misc_feature: MA Experiment 108689 PARAMETER Experiment Name: Zm_Drought_Roots_P Parameter: Plant Line Value: 35A19
  misc_feature: MA Experiment 108689 PARAMETER Experiment Name: Zm_Drought_Roots_P Parameter: Timepoint (hr) Value: 24
  misc_feature: MA Experiment 108689 PARAMETER Experiment Name: Zm_Drought_Roots_P Parameter: Tissue Value: Roots
  misc_feature: MA Experiment 108689 PARAMETER Experiment Name: Zm_Drought_Roots_P Parameter: Treatment Value: Drought vs. No Drought
gcacgagaccattacctagaacatcctaatcgaaaaatcagagataggagagacgaacaagaaaagacgagatcatatataccgtacgttatagagtaggaaaatagaaatacgaatgatgatcacgggacggcagcgaaaccctgcaaggctgcaggtgtcgtcgtccttcctgcttgcccttgttttcgcatcatcggtgctcgtcggcatcgtggccggcggcagcttctacgaggagtgcgacgcgacttgggagccccagaactgctgggcctacgacgatggcaacaggctctccctcgcgctcgtcagcagttcctcaggttccatgatccggtcgaagcggcagttcgtgtacgggaccgtgtccaccatgatccagcttgtccccggcgactccgccggcaccgtcaccacctactatacgtcgtcgctgggcgacaaccacgacgagatcgacttcgagttcttgggcaacgtgagcgggcagccctacaccatccacaccaacgtgtacgctgccggcgtgggcaacaaggagatgcagttcaagccatggttcgaccccaccgccgactaccacaactacaccatctcctggactccctgcatgatcgcgtggtacgtcgacggcgtccccatccgcgtgttccgcaactacgcggcgagccacggcgtggcgttcccgacgagccagcccatgtacgcctactctagcatctgggcggcggaggactgggccacgcagggcggccgcgtcaaggccgactggtccaaggcgcccttcgtcgccagctaccacggcatcgacctcggcgtctgcgagtgctacggcgggggcgcctgcgtctccagctgcgccgcggcgttcgccgccagccactgcagcctgagcgacgcgcaggtgggggagatgcgctgggtgcagggcagctacaggatctacgactactgcgtcgaccccaagcgcttggtcaacggccagaggccggtcgagtgcgacctgccgcagtactgaacggatcggagctccgatcaggtccttgttgcgtatgaatgaggaagcaataatcatacgtatttactcaatcaacagtgcaaggggccggccgggaattccaacaagccgacatatacccaccaggttgggtcgagtcacgacgatcaaagaggccgcccgtctcactcgtctattttcatggataatgcaattggttttgtgctcattttactcttttaccgatatataactatgagtttttgag

SEQ ID NO: 15679 - protein, 301 aa, Zea mays subsp. mays
  peptide (1)..(301): Ceres Seq. ID no. 12364237
  misc_feature (39)..(221): Pfam Name: Glycosyl hydrolases family 16 Pfam Description: Glycosyl hydrolases family 16
  misc_feature (17)..(301): Homolog of NCBI NO: 14330336 NR Description: Xet3 protein [Festuca pratensis]
  misc_feature (23)..(298): Homolog of NCBI NO: 15242778 NR Description: xyloglucan endotransglycosylase, putative; id: At5g57530.1, supported by cDNA: gi_16323042 [Arabidopsis >gi|9758314|dbj|BAB08788.1| xyloglucan endotransglycosylase
  misc_feature (22)..(299): Homolog of NCBI NO: 7447403 NR Description: xyloglucan endo-1,4-beta-D-glucanase (EC 3.2.1.-)
  misc_feature (24)..(298): Homolog of NCBI NO: 7447413 NR Description: xyloglucan endo-1,4-beta-D-glucanase (EC 3.2.1.-) barley >gi|1890577|emb|CAA63663.1| xyloglucan
  misc_feature (22)..(298): Homolog of NCBI NO: 15242779 NR Description: xyloglucan endotransglycosylase, putative; id: At5g57540.1 [Arabidopsis thaliana]
  misc_feature (17)..(298): Homolog of NCBI NO: 8886867 NR Description: xyloglucan endotransglycosylase XET2 [Asparagus
  misc_feature (18)..(299): Homolog of NCBI NO: 29691676 NR Description: putative xyloglucan endotransglycosylase [Cucumis
  misc_feature (20)..(298): Homolog of NCBI NO: 15235998 NR Description: xyloglucan endotransglycosylase XTR9; protein id: supported by cDNA: gi_20260567, supported by cDNA: gi_4218962 thaliana] >gi|7447404|pir||T04236 xyloglucan [Arabidopsis
  misc_feature (16)..(299): Homolog of NCBI NO: 29500891 NR Description: putative xyloglucan endotransglycosylase [Cucumis >gi|29500899|emb|CAD87533.1| putative xyloglucan
  misc_feature (19)..(296): Homolog of NCBI NO: 22947852 NR Description: xyloglucan endotransglycosylase [Malus x
MMITGRQRNPARLQVSSSFLLALVFASSVLVGIVAGGSFYEECDATWEPQNCWAYDDGNRLSLALVSSSSGSMIRSKRQFVYGTVSTMIQLVPGDSAGTVTTYYTSSLGDNHDEIDFEFLGNVSGQPYTIHTNVYAAGVGNKEMQFKPWFDPTADYHNYTISWTPCMIAWYVDGVPIRVFRNYAASHGVAFPTSQPMYAYSSIWAAEDWATQGGRVKADWSKAPFVASYHGIDLGVCECYGGGACVSSCAAAFAASHCSLSDAQVGEMRWVQGSYRIYDYCVDPKRLVNGQRPVECDLPQY

SEQ ID NO: 15680 - protein, 300 aa, Zea mays subsp. mays
  peptide (1)..(300): Ceres Seq. ID no. 12364238
  misc_feature (38)..(220): Pfam Name: Glycosyl hydrolases family 16 Pfam Description: Glycosyl hydrolases family 16
  misc_feature (16)..(300): Homolog of NCBI NO: 14330336 NR Description: Xet3 protein [Festuca pratensis]
  misc_feature (22)..(297): Homolog of NCBI NO: 15242778 NR Description: xyloglucan endotransglycosylase, putative; id: At5g57530.1, supported by cDNA: gi_16323042 [Arabidopsis >gi|9758314|dbj|BAB08788.1| xyloglucan endotransglycosylase
  misc_feature (21)..(298): Homolog of NCBI NO: 7447403 NR Description: xyloglucan endo-1,4-beta-D-glucanase (EC 3.2.1.-)
  misc_feature (23)..(297): Homolog of NCBI NO: 7447413 NR Description: xyloglucan endo-1,4-beta-D-glucanase (EC 3.2.1.-) barley >gi|1890577|emb|CAA63663.1| xyloglucan
  misc_feature (21)..(297): Homolog of NCBI NO: 15242779 NR Description: xyloglucan endotransglycosylase, putative; id: At5g57540.1 [Arabidopsis thaliana]
  misc_feature (16)..(297): Homolog of NCBI NO: 8886867 NR Description: xyloglucan endotransglycosylase XET2 [Asparagus
  misc_feature (17)..(298): Homolog of NCBI NO: 29691676 NR Description: putative xyloglucan endotransglycosylase [Cucumis
  misc_feature (19)..(297): Homolog of NCBI NO: 15235998 NR Description: xyloglucan endotransglycosylase XTR9; protein id: supported by cDNA: gi_20260567, supported by cDNA: gi_4218962 thaliana] >gi|7447404|pir||T04236 xyloglucan [Arabidopsis
  misc_feature (15)..(298): Homolog of NCBI NO: 29500891 NR Description: putative xyloglucan endotransglycosylase [Cucumis >gi|29500899|emb|CAD87533.1| putative xyloglucan
  misc_feature (18)..(295): Homolog of NCBI NO: 22947852 NR Description: xyloglucan endotransglycosylase [Malus x
MITGRQRNPARLQVSSSFLLALVFASSVLVGIVAGGSFYEECDATWEPQNCWAYDDGNRLSLALVSSSSGSMIRSKRQFVYGTVSTMIQLVPGDSAGTVTTYYTSSLGDNHDEIDFEFLGNVSGQPYTIHTNVYAAGVGNKEMQFKPWFDPTADYHNYTISWTPCMIAWYVDGVPIRVFRNYAASHGVAFPTSQPMYAYSSIWAAEDWATQGGRVKADWSKAPFVASYHGIDLGVCECYGGGACVSSCAAAFAASHCSLSDAQVGEMRWVQGSYRIYDYCVDPKRLVNGQRPVECDLPQY

SEQ ID NO: 15681 - protein, 229 aa, Zea mays subsp. mays
  peptide (1)..(229): Ceres Seq. ID no. 12364239
  misc_feature (1)..(149): Pfam Name: Glycosyl hydrolases family 16 Pfam Description: Glycosyl hydrolases family 16
  misc_feature (1)..(229): Homolog of NCBI NO: 14330336 NR Description: Xet3 protein [Festuca pratensis]
  misc_feature (1)..(226): Homolog of NCBI NO: 15242778 NR Description: xyloglucan endotransglycosylase, putative; id: At5g57530.1, supported by cDNA: gi_16323042 [Arabidopsis >gi|9758314|dbj|BAB08788.1| xyloglucan endotransglycosylase
  misc_feature (1)..(227): Homolog of NCBI NO: 7447403 NR Description: xyloglucan endo-1,4-beta-D-glucanase (EC 3.2.1.-)
  misc_feature (1)..(226): Homolog of NCBI NO: 7447413 NR Description: xyloglucan endo-1,4-beta-D-glucanase (EC 3.2.1.-) barley >gi|1890577|emb|CAA63663.1| xyloglucan
  misc_feature (1)..(226): Homolog of NCBI NO: 15242779 NR Description: xyloglucan endotransglycosylase, putative; id: At5g57540.1 [Arabidopsis thaliana]
  misc_feature (1)..(226): Homolog of NCBI NO: 8886867 NR Description: xyloglucan endotransglycosylase XET2 [Asparagus
  misc_feature (1)..(227): Homolog of NCBI NO: 29691676 NR Description: putative xyloglucan endotransglycosylase [Cucumis
  misc_feature (1)..(226): Homolog of NCBI NO: 15235998 NR Description: xyloglucan endotransglycosylase XTR9; protein id: supported by cDNA: gi_20260567, supported by cDNA: gi_4218962 thaliana] >gi|7447404|pir||T04236 xyloglucan [Arabidopsis
  misc_feature (1)..(227): Homolog of NCBI NO: 29500891 NR Description: putative xyloglucan endotransglycosylase [Cucumis >gi|29500899|emb|CAD87533.1| putative xyloglucan
  misc_feature (1)..(224): Homolog of NCBI NO: 22947852 NR Description: xyloglucan endotransglycosylase [Malus x
MIRSKRQFVYGTVSTMIQLVPGDSAGTVTTYYTSSLGDNHDEIDFEFLGNVSGQPYTIHTNVYAAGVGNKEMQFKPWFDPTADYHNYTISWTPCMIAWYVDGVPIRVFRNYAASHGVAFPTSQPMYAYSSIWAAEDWATQGGRVKADWSKAPFVASYHGIDLGVCECYGGGACVSSCAAAFAASHCSLSDAQVGEMRWVQGSYRIYDYCVDPKRLVNGQRPVECDLPQY

SEQ ID NO: 15682 - DNA, 1052 bp, Zea mays subsp. mays
  misc_feature (1)..(1052): Ceres Seq. ID no. 12381283
  misc_feature: MA Experiment ID: 108523 Result: Up-regulated in Transcription
  misc_feature: MA Experiment 108523 PARAMETER Experiment Name: Zm_42deg_Heat_P Parameter: Age (day) Value: 8
  misc_feature: MA Experiment 108523 PARAMETER Experiment Name: Zm_42deg_Heat_P Parameter: Organism Value: Zea mays
  misc_feature: MA Experiment 108523 PARAMETER Experiment Name: Zm_42deg_Heat_P Parameter: Plant Line Value: 35A19
  misc_feature: MA Experiment 108523 PARAMETER Experiment Name: Zm_42deg_Heat_P Parameter: Temperature (deg C) Value: 42 vs. 22
  misc_feature: MA Experiment 108523 PARAMETER Experiment Name: Zm_42deg_Heat_P Parameter: Timepoint (hr) Value: 6
  misc_feature: MA Experiment 108523 PARAMETER Experiment Name: Zm_42deg_Heat_P Parameter: Tissue Value: Aerial
  misc_feature: MA Experiment ID: 108533 Result: Down-regulated in Transcription
  misc_feature: MA Experiment 108533 PARAMETER Experiment Name: Zm_4deg_Cold_P Parameter: Age (hr) Value: 8
  misc_feature: MA Experiment 108533 PARAMETER Experiment Name: Zm_4deg_Cold_P Parameter: Organism Value: Zea mays
  misc_feature: MA Experiment 108533 PARAMETER Experiment Name: Zm_4deg_Cold_P Parameter: Plant Line Value: 35A19
  misc_feature: MA Experiment 108533 PARAMETER Experiment Name: Zm_4deg_Cold_P Parameter: Temperature (deg C) Value: 4 vs. 22
  misc_feature: MA Experiment 108533 PARAMETER Experiment Name: Zm_4deg_Cold_P Parameter: Timepoint (hr) Value: 1
  misc_feature: MA Experiment 108533 PARAMETER Experiment Name: Zm_4deg_Cold_P Parameter: Tissue Value: Aerial
  misc_feature: MA Experiment ID: 108543 Result: Up-regulated in Transcription
  misc_feature: MA Experiment ID: 20000477 Result: Down-regulated in Transcription
  misc_feature: MA Experiment 20000477 PARAMETER Experiment Name: Zm_5mM_SA_P Parameter: Age (day) Value: 10
  misc_feature: MA Experiment 20000477 PARAMETER Experiment Name: Zm_5mM_SA_P Parameter: Organism Value: Zea mays
  misc_feature: MA Experiment 20000477 PARAMETER Experiment Name: Zm_5mM_SA_P Parameter: Plant Line Value: 35A19
  misc_feature: MA Experiment 20000477 PARAMETER Experiment Name: Zm_5mM_SA_P Parameter: Timepoint (hr) Value: 48
  misc_feature: MA Experiment 20000477 PARAMETER Experiment Name: Zm_5mM_SA_P Parameter: Tissue Value: Aerial
  misc_feature: MA Experiment 20000477 PARAMETER Experiment Name: Zm_5mM_SA_P Parameter: Treatment Value: 5mM SA vs. No Treatment
  misc_feature: MA Experiment ID: 20000534 Result: Down-regulated in Transcription
  misc_feature: MA Experiment 20000534 PARAMETER Experiment Name: Zm_Hybrid_Pollen_P Parameter: Age (day) Value: 8
  misc_feature: MA Experiment 20000534 PARAMETER Experiment Name: Zm_Hybrid_Pollen_P Parameter: Organism Value: Zea mays
  misc_feature: MA Experiment 20000534 PARAMETER Experiment Name: Zm_Hybrid_Pollen_P Parameter: Plant Line Value: 35A19
  misc_feature: MA Experiment 20000534 PARAMETER Experiment Name: Zm_Hybrid_Pollen_P Parameter: Tissue Value: Pollen vs. Aerial
aaatagccattcaatcattcaagcgaagcagccaccactctctccactgtgactccgtgacctgcctgccctgctgcgacaagcacagcacacacaccccgcacaccgcaccagctcagctcagctcaccaagacaatcaatcatggctcgtccgcgcagtgtcgctgccgctgcccccctcctcctgctgctcgccgccgccgcagcggggctcgtgtccgccgcgtcgccggcagccagcgacttcgtccgcaagtcgtgccgcacgacgcagtacccttcggtgtgcgagcagagcctggcgtcgtacggcgggtcgccgccgccacggagcccgcgggagctggcgcgcgccgcgctgtcggtgagcgcggaccgcgcgcgcgccgcgtcggcgtacgtgggccgcctgtgcggcgccagcaacggcaaaggcgcgaagaaggggtcgggatcggcgtcggcgtcggcaggtcccgtgcgcgactgcctggacaatctggcggacagcgtgggccacctccgcgacgcggcgcaggagatgggcggcgccgggatgggccgcgcggggacgccggcgttcaggtggcacctcagcaacgtgcagacctggtgcagcgccgcgctcaccgacgaggacacctgcctcgacggcctctcgtcccgcgccgtcgacgccggcacgcgcgccgccatccggggcaaggtcgtcgaggtcgcgcaggtcaccagcaacgcgctcgcgctcgtcaataaggtcgggcctgggtactaacacgggaaggggacccaagatccaggcccaggcccaggcccaggcccagcccagataccacacccgctactagtatagtactaggcgcctccacctccacggcgttgggtgtttctcgtccgttaatagctcggtttgctttgcttgtgtttgtgtaagatatacattagttaagggcaataagcttgtactattatgagtggcggccgaggagtacagtacgttctcctctgtccgatcatgccaccatattaatgtgggagatatcttttgtcc

SEQ ID NO: 15683 - protein, 257 aa, Zea mays subsp. mays
  peptide (1)..(257): Ceres Seq. ID no. 12381284
  misc_feature (59)..(255): Homolog of NCBI NO: 32489696 NR Description: OSJNBb0004G23.9 [Oryza sativa (japonica
  misc_feature (48)..(252): Homolog of NCBI NO: 7406663 NR Description: putative ripening-related protein [Vitis vinifera]
  misc_feature (60)..(257): Homolog of NCBI NO: 15241799 NR Description: ripening-related protein - like; protein id: supported by cDNA: 9669., supported by cDNA: gi_14423453,
  misc_feature (60)..(257): Homolog of NCBI NO: 21618088 NR Description: ripening-related protein-like [Arabidopsis
  misc_feature (81)..(251): Homolog of NCBI NO: 18394174 NR Description: expressed protein; protein id: At1g14890.1, by cDNA: 33355., supported by cDNA: gi_17529115 [Arabidopsis
  misc_feature (48)..(257): Homolog of NCBI NO: 112717 NR Description: 21 KD PROTEIN PRECURSOR (1.2 PROTEIN)
  misc_feature (61)..(252): Homolog of NCBI NO: 18407657 NR Description: expressed protein; protein id: At1g62770.1, by cDNA: 93927. [Arabidopsis thaliana]
  misc_feature (61)..(252): Homolog of NCBI NO: 21618013 NR Description: putative ripening-related protein [Arabidopsis
  misc_feature (60)..(252): Homolog of NCBI NO: 15234547 NR Description: putative protein; protein id: At4g12390.1, by cDNA: 27615., supported by cDNA: gi_15450853, supported by
  misc_feature (71)..(252): Homolog of NCBI NO: 7488727 NR Description: 21K protein precursor - alfalfa
IAIQSFKRSSHHSLHCDSVTCLPCCDKHSTHTPHTAPAQLSSPRQSIMARPRSVAAAAPLLLLLAAAAAGLVSAASPAASDFVRKSCRTTQYPSVCEQSLASYGGSPPPRSPRELARAALSVSADRARAASAYVGRLCGASNGKGAKKGSGSASASAGPVRDCLDNLADSVGHLRDAAQEMGGAGMGRAGTPAFRWHLSNVQTWCSAALTDEDTCLDGLSSRAVDAGTRAAIRGKVVEVAQVTSNALALVNKVGPGY

SEQ ID NO: 15684 - protein, 210 aa, Zea mays subsp. mays
  peptide (1)..(210): Ceres Seq. ID no. 12381285
  misc_feature (12)..(208): Homolog of NCBI NO: 32489696 NR Description: OSJNBb0004G23.9 [Oryza sativa (japonica
  misc_feature (1)..(205): Homolog of NCBI NO: 7406663 NR Description: putative ripening-related protein [Vitis vinifera]
  misc_feature (13)..(210): Homolog of NCBI NO: 15241799 NR Description: ripening-related protein - like; protein id: supported by cDNA: 9669., supported by cDNA: gi_14423453,
  misc_feature (13)..(210): Homolog of NCBI NO: 21618088 NR Description: ripening-related protein-like [Arabidopsis
  misc_feature (34)..(204): Homolog of NCBI NO: 18394174 NR Description: expressed protein; protein id: At1g14890.1, by cDNA: 33355., supported by cDNA: gi_17529115 [Arabidopsis
  misc_feature (1)..(210): Homolog of NCBI NO: 112717 NR Description: 21 KD PROTEIN PRECURSOR (1.2 PROTEIN)
  misc_feature (14)..(205): Homolog of NCBI NO: 18407657 NR Description: expressed protein; protein id: At1g62770.1, by cDNA: 93927. [Arabidopsis thaliana]
  misc_feature (14)..(205): Homolog of NCBI NO: 21618013 NR Description: putative ripening-related protein [Arabidopsis
  misc_feature (13)..(205): Homolog of NCBI NO: 15234547 NR Description: putative protein; protein id: At4g12390.1, by cDNA: 27615., supported by cDNA: gi_15450853, supported by
  misc_feature (24)..(205): Homolog of NCBI NO: 7488727 NR Description: 21K protein precursor - alfalfa
MARPRSVAAAAPLLLLLAAAAAGLVSAASPAASDFVRKSCRTTQYPSVCEQSLASYGGSPPPRSPRELARAALSVSADRARAASAYVGRLCGASNGKGAKKGSGSASASAGPVRDCLDNLADSVGHLRDAAQEMGGAGMGRAGTPAFRWHLSNVQTWCSAALTDEDTCLDGLSSRAVDAGTRAAIRGKVVEVAQVTSNALALVNKVGPGY

SEQ ID NO: 15685 - DNA, 1543 bp, Zea mays subsp. mays
  misc_feature (1)..(1543): Ceres Seq. ID no. 12406084
  misc_feature: MA Experiment ID: 108529 Result: Up-regulated in Transcription
  misc_feature: MA Experiment 108529 PARAMETER Experiment Name: Zm_Imbibed_Seeds_P Parameter: Age (day) Value: 5 vs. 2
  misc_feature: MA Experiment 108529 PARAMETER Experiment Name: Zm_Imbibed_Seeds_P Parameter: Organism Value: Zea mays
  misc_feature: MA Experiment 108529 PARAMETER Experiment Name: Zm_Imbibed_Seeds_P Parameter: Plant Line Value: 35A19
  misc_feature: MA Experiment 108529 PARAMETER Experiment Name: Zm_Imbibed_Seeds_P Parameter: Tissue Value: Roots vs. Embryo
  misc_feature: MA Experiment ID: 108535 Result: Down-regulated in Transcription
  misc_feature: MA Experiment 108535 PARAMETER Experiment Name: Zm_Meristem_P Parameter: Age (day) Value: 8
  misc_feature: MA Experiment 108535 PARAMETER Experiment Name: Zm_Meristem_P Parameter: Organism Value: Zea mays
  misc_feature: MA Experiment 108535 PARAMETER Experiment Name: Zm_Meristem_P Parameter: Plant Line Value: 35A19
  misc_feature: MA Experiment 108535 PARAMETER Experiment Name: Zm_Meristem_P Parameter: Tissue Value: Root Meristem vs. Above Root Meristem
  misc_feature: MA Experiment ID: 108689 Result: Up-regulated in Transcription
  misc_feature: MA Experiment 108689 PARAMETER Experiment Name: Zm_Drought_Roots_P Parameter: Age (day) Value: 9
  misc_feature: MA Experiment 108689 PARAMETER Experiment Name: Zm_Drought_Roots_P Parameter: Organism Value: Zea mays
  misc_feature: MA Experiment 108689 PARAMETER Experiment Name: Zm_Drought_Roots_P Parameter: Plant Line Value: 35A19
  misc_feature: MA Experiment 108689 PARAMETER Experiment Name: Zm_Drought_Roots_P Parameter: Timepoint (hr) Value: 24
  misc_feature: MA Experiment 108689 PARAMETER Experiment Name: Zm_Drought_Roots_P Parameter: Tissue Value: Roots
  misc_feature: MA Experiment 108689 PARAMETER Experiment Name: Zm_Drought_Roots_P Parameter: Treatment Value: Drought vs. No Drought
  misc_feature: MA Experiment ID: 20000534 Result: Up-regulated in Transcription
  misc_feature: MA Experiment 20000534 PARAMETER Experiment Name: Zm_Hybrid_Pollen_P Parameter: Age (day) Value: 8
  misc_feature: MA Experiment 20000534 PARAMETER Experiment Name: Zm_Hybrid_Pollen_P Parameter: Organism Value: Zea mays
  misc_feature: MA Experiment 20000534 PARAMETER Experiment Name: Zm_Hybrid_Pollen_P Parameter: Plant Line Value: 35A19
  misc_feature: MA Experiment 20000534 PARAMETER Experiment Name: Zm_Hybrid_Pollen_P Parameter: Tissue Value: Pollen vs. Aerial
gcacgagaccattacctagaacatcctaatcgaaaaaaatacagggggaaaagcaagacgcgtgagcacttccttatcgtctcttcctttcaccccctcgaccccgatcgaatcgctcgaacaattccctgtgcatcgatcgatctaggcttgcgcgaggatccaattccatccggctctcctttgagctcgtgatcctcggagttggaggagttcttcgcgagtctctttttgccccgatttctttttggcttatttgtgcgagctttctcaggagcagaagggaagaggcagtttgcaattccgatgcacccaggcctcaagattcaactctgaggccttatccgaggcatccgcatcgatctccgcaagaggatgggtaacgtgggaagcaacggtggaggcgccgccactggtcaccgccgtcggagctccggccacggccatcaccagcaggcgccgccgcctccccagccgcaggagactgcgcccaaccgctacgtgttcgcggccgccacgccgtacccgccccagtaccctaaccccaatccgccgcagtactacccgcagtacgggaactactacccgccgccaccatcatccgtgccggtgccccttccggcgccgtacgaccaccaccacaggccacccaccgccgcccctggcgagttcccgcccccaccccccgtccacccccacaactaccccggctgggccgggcggtatccctcctacggaccgcatctgtctatgccgacgccttacgttgagcaccagaaggccgtcactatccgcaacgacatcaaccttaagaaggagacgcttcggatcgagcctgatgaagaacgccctggccgcttcctcgtcgccttcacctttgacgccacggtcgctggcagcatgactgtttacttctttgcaaaggaagagctcaactgcaatctaacaacagtgaaagaagacctaattaagcccattactgttagcttcaaagagggtcttggtcaaaaattcaggcaaccttcaggaacaggaattgacttttcagtgtttgaagaatcagatttattaaagcagggggacatggatgtatatccacttgcagttaaagctgaaacaacattgtctgttgatcacccaccagaaggggatgaccaaaagatgataactcctaactcacagatcacccaggccgtttttgaaaagaaagaaaatggggattatcaagtaagagttgtttgccagatcctctgggtcaatggaactaggtatgaactgcaagaaatatatggcatagggaactccatggaaggtgatgctgatgcaaatgatccagggaaagaatgtgttatttgcctctcagaaccaagggatactactgtcctgccatgtaggcatatgtgcatgtgcagtgagtgcgccaaggtcctgaggtaccaaaccactcggtgccccatctgcaggcagcctgtggagcgtctcctggagatcaaagtgaacaacaaatctgaagatcagcagcagacgccccaatcgccaccgc

SEQ ID NO: 15686 - protein, 389 aa, Zea mays subsp. mays
  peptide (1)..(389): Ceres Seq. ID no. 12406085
  misc_feature (324)..(362): Pfam Name: Zinc finger, C3HC4 type (RING finger) Pfam Description: Zinc finger, C3HC4 type (RING finger)
  misc_feature (1)..(388): Homolog of NCBI NO: 37532246 NR Description: putative hydroxyproline-rich glycoprotein [Oryza
  misc_feature (1)..(386): Homolog of NCBI NO: 18398633 NR Description: expressed protein; protein id: At3g09770.1, by cDNA: 38757., supported by cDNA: gi_18377643 [Arabidopsis >gi|6681341|gb|AAF23258.1|AC015985_16 putative RING zinc finger
  misc_feature (1)..(342): Homolog of NCBI NO: 30681003 NR Description: putative RING zinc finger protein [Arabidopsis
  misc_feature (88)..(380): Homolog of NCBI NO: 15231808 NR Description: putative protein; protein id: At3g53410.1, by cDNA: 110247. [Arabidopsis thaliana] >gi|11357789|pir||T45881
  misc_feature (23)..(375): Homolog of NCBI NO: 21618140 NR Description: putative RING zinc finger protein [Arabidopsis
  misc_feature (23)..(375): Homolog of NCBI NO: 15242675 NR Description: expressed protein; protein id: At5g03200.1, by cDNA: 98672. [Arabidopsis thaliana] >gi|11357455|pir||T48341
  misc_feature (23)..(375): Homolog of NCBI NO: 26449588 NR Description: unknown protein [Arabidopsis thaliana]
  misc_feature (10)..(382): Homolog of NCBI NO: 15239642 NR Description: unknown protein; protein id: At5g19080.1
  misc_feature (12)..(379): Homolog of NCBI NO: 6862918 NR Description: putative RING zinc finger protein [Arabidopsis
  misc_feature (12)..(379): Homolog of NCBI NO: 18397483 NR Description: putative RING zinc finger protein; protein id: supported by cDNA: 40787. [Arabidopsis thaliana]
MGNVGSNGGGAATGHRRRSSGHGHHQQAPPPPQPQETAPNRYVFAAATPYPPQYPNPNPPQYYPQYGNYYPPPPSSVPVPLPAPYDHHHRPPTAAPGEFPPPPPVHPHNYPGWAGRYPSYGPHLSMPTPYVEHQKAVTIRNDINLKKETLRIEPDEERPGRFLVAFTFDATVAGSMTVYFFAKEELNCNLTTVKEDLIKPITVSFKEGLGQKFRQPSGTGIDFSVFEESDLLKQGDMDVYPLAVKAETTLSVDHPPEGDDQKMITPNSQITQAVFEKKENGDYQVRVVCQILWVNGTRYELQEIYGIGNSMEGDADANDPGKECVICLSEPRDTTVLPCRHMCMCSECAKVLRYQTTRCPICRQPVERLLEIKVNNKSEDQQQTPQSPP

SEQ ID NO: 15687 - protein, 264 aa, Zea mays subsp. mays
  peptide (1)..(264): Ceres Seq. ID no. 12406086
  misc_feature (199)..(237): Pfam Name: Zinc finger, C3HC4 type (RING finger) Pfam Description: Zinc finger, C3HC4 type (RING finger)
  misc_feature (1)..(263): Homolog of NCBI NO: 37532246 NR Description: putative hydroxyproline-rich glycoprotein [Oryza
  misc_feature (1)..(261): Homolog of NCBI NO: 18398633 NR Description: expressed protein; protein id: At3g09770.1, by cDNA: 38757., supported by cDNA: gi_18377643 [Arabidopsis >gi|6681341|gb|AAF23258.1|AC015985_16 putative RING zinc finger
  misc_feature (1)..(217): Homolog of NCBI NO: 30681003 NR Description: putative RING zinc finger protein [Arabidopsis
  misc_feature (1)..(255): Homolog of NCBI NO: 15231808 NR Description: putative protein; protein id: At3g53410.1, by cDNA: 110247. [Arabidopsis thaliana] >gi|11357789|pir||T45881
  misc_feature (1)..(250): Homolog of NCBI NO: 21618140 NR Description: putative RING zinc finger protein [Arabidopsis
  misc_feature (1)..(250): Homolog of NCBI NO: 15242675 NR Description: expressed protein; protein id: At5g03200.1, by cDNA: 98672. [Arabidopsis thaliana] >gi|11357455|pir||T48341
  misc_feature (1)..(250): Homolog of NCBI NO: 26449588 NR Description: unknown protein [Arabidopsis thaliana]
  misc_feature (1)..(257): Homolog of NCBI NO: 15239642 NR Description: unknown protein; protein id: At5g19080.1
  misc_feature (1)..(254): Homolog of NCBI NO: 6862918 NR Description: putative RING zinc finger protein [Arabidopsis
  misc_feature (1)..(254): Homolog of NCBI NO: 18397483 NR Description: putative RING zinc finger protein; protein id: supported by cDNA: 40787. [Arabidopsis thaliana]
MPTPYVEHQKAVTIRNDINLKKETLRIEPDEERPGRFLVAFTFDATVAGSMTVYFFAKEELNCNLTTVKEDLIKPITVSFKEGLGQKFRQPSGTGIDFSVFEESDLLKQGDMDVYPLAVKAETTLSVDHPPEGDDQKMITPNSQITQAVFEKKENGDYQVRVVCQILWVNGTRYELQEIYGIGNSMEGDADANDPGKECVICLSEPRDTTVLPCRHMCMCSECAKVLRYQTTRCPICRQPVERLLEIKVNNKSEDQQQTPQSPP

SEQ ID NO: 15688 - protein, 214 aa, Zea mays subsp. mays
  peptide (1)..(214): Ceres Seq. ID no. 12406087
  misc_feature (149)..(187): Pfam Name: Zinc finger, C3HC4 type (RING finger) Pfam Description: Zinc finger, C3HC4 type (RING finger)
  misc_feature (1)..(205): Homolog of NCBI NO: 15231808 NR Description: putative protein; protein id: At3g53410.1, by cDNA: 110247. [Arabidopsis thaliana] >gi|11357789|pir||T45881
  misc_feature (1)..(200): Homolog of NCBI NO: 21618140 NR Description: putative RING zinc finger protein [Arabidopsis
  misc_feature (1)..(200): Homolog of NCBI NO: 15242675 NR Description: expressed protein; protein id: At5g03200.1, by cDNA: 98672. [Arabidopsis thaliana] >gi|11357455|pir||T48341
  misc_feature (1)..(200): Homolog of NCBI NO: 26449588 NR Description: unknown protein [Arabidopsis thaliana]
  misc_feature (1)..(211): Homolog of NCBI NO: 18398633 NR Description: expressed protein; protein id: At3g09770.1, by cDNA: 38757., supported by cDNA: gi_18377643 [Arabidopsis >gi|6681341|gb|AAF23258.1|AC015985_16 putative RING zinc finger
  misc_feature (1)..(167): Homolog of NCBI NO: 30681003 NR Description: putative RING zinc finger protein [Arabidopsis
  misc_feature (1)..(213): Homolog of NCBI NO: 37532246 NR Description: putative hydroxyproline-rich glycoprotein [Oryza
  misc_feature (1)..(207): Homolog of NCBI NO: 15239642 NR Description: unknown protein; protein id: At5g19080.1
  misc_feature (1)..(204): Homolog of NCBI NO: 6862918 NR Description: putative RING zinc finger protein [Arabidopsis
  misc_feature (1)..(204): Homolog of NCBI NO: 18397483 NR Description: putative RING zinc finger protein; protein id: supported by cDNA: 40787. [Arabidopsis thaliana]
MTVYFFAKEELNCNLTTVKEDLIKPITVSFKEGLGQKFRQPSGTGIDFSVFEESDLLKQGDMDVYPLAVKAETTLSVDHPPEGDDQKMITPNSQITQAVFEKKENGDYQVRVVCQILWVNGTRYELQEIYGIGNSMEGDADANDPGKECVICLSEPRDTTVLPCRHMCMCSECAKVLRYQTTRCPICRQPVERLLEIKVNNKSEDQQQTPQSPP

SEQ ID NO: 15689 - DNA, 1113 bp, Zea mays subsp. mays
  misc_feature (1)..(1113): Ceres Seq. ID no. 12353094
  misc_feature: MA Experiment ID: 108523 Result: Down-regulated in Transcription
  misc_feature: MA Experiment 108523 PARAMETER Experiment Name: Zm_42deg_Heat_P Parameter: Age (day) Value: 8
  misc_feature: MA Experiment 108523 PARAMETER Experiment Name: Zm_42deg_Heat_P Parameter: Organism Value: Zea mays
  misc_feature: MA Experiment 108523 PARAMETER Experiment Name: Zm_42deg_Heat_P Parameter: Plant Line Value: 35A19
  misc_feature: MA Experiment 108523 PARAMETER Experiment Name: Zm_42deg_Heat_P Parameter: Temperature (deg C) Value: 42 vs. 22
  misc_feature: MA Experiment 108523 PARAMETER Experiment Name: Zm_42deg_Heat_P Parameter: Timepoint (hr) Value: 6
  misc_feature: MA Experiment 108523 PARAMETER Experiment Name: Zm_42deg_Heat_P Parameter: Tissue Value: Aerial
  misc_feature: MA Experiment ID: 108535 Result: Up-regulated in Transcription
  misc_feature: MA Experiment 108535 PARAMETER Experiment Name: Zm_Meristem_P Parameter: Age (day) Value: 8
  misc_feature: MA Experiment 108535 PARAMETER Experiment Name: Zm_Meristem_P Parameter: Organism Value: Zea mays
  misc_feature: MA Experiment 108535 PARAMETER Experiment Name: Zm_Meristem_P Parameter: Plant Line Value: 35A19
  misc_feature: MA Experiment 108535 PARAMETER Experiment Name: Zm_Meristem_P Parameter: Tissue Value: Root Meristem vs. Above Root Meristem
  misc_feature: MA Experiment ID: 108544 Result: Down-regulated in Transcription
  misc_feature: MA Experiment ID: 108556 Result: Down-regulated in Transcription
  misc_feature: MA Experiment 108556 PARAMETER Experiment Name: Zm_Drought_P Parameter: Age (day) Value: 9
  misc_feature: MA Experiment 108556 PARAMETER Experiment Name: Zm_Drought_P Parameter: Organism Value: Zea mays
  misc_feature: MA Experiment 108556 PARAMETER Experiment Name: Zm_Drought_P Parameter: Plant Line Value: 35A19
  misc_feature: MA Experiment 108556 PARAMETER Experiment Name: Zm_Drought_P Parameter: Timepoint (hr) Value: 24
  misc_feature: MA Experiment 108556 PARAMETER Experiment Name: Zm_Drought_P Parameter: Tissue Value: Aerial
  misc_feature: MA Experiment 108556 PARAMETER Experiment Name: Zm_Drought_P Parameter: Treatment Value: Drought vs. No Drought
  misc_feature: MA Experiment ID: 20000478 Result: Down-regulated in Transcription
  misc_feature: MA Experiment 20000478 PARAMETER Experiment Name: Zm_5mM_SA_P Parameter: Age (day) Value: 11
  misc_feature: MA Experiment 20000478 PARAMETER Experiment Name: Zm_5mM_SA_P Parameter: Organism Value: Zea mays
  misc_feature: MA Experiment 20000478 PARAMETER Experiment Name: Zm_5mM_SA_P Parameter: Plant Line Value: 35A19
  misc_feature: MA Experiment 20000478 PARAMETER Experiment Name: Zm_5mM_SA_P Parameter: Timepoint (hr) Value: 72
  misc_feature: MA Experiment 20000478 PARAMETER Experiment Name: Zm_5mM_SA_P Parameter: Tissue Value: Aerial
  misc_feature: MA Experiment 20000478 PARAMETER Experiment Name: Zm_5mM_SA_P Parameter: Treatment Value: 5mM SA vs. No Treatment
  misc_feature: MA Experiment ID: 20000479 Result: Down-regulated in Transcription
  misc_feature: MA Experiment 20000479 PARAMETER Experiment Name: Zm_Drought_P Parameter: Age (day) Value: 10
  misc_feature: MA Experiment 20000479 PARAMETER Experiment Name: Zm_Drought_P Parameter: Organism Value: Zea mays
  misc_feature: MA Experiment 20000479 PARAMETER Experiment Name: Zm_Drought_P Parameter: Plant Line Value: 35A19
  misc_feature: MA Experiment 20000479 PARAMETER Experiment Name: Zm_Drought_P Parameter: Timepoint (hr) Value: 48
  misc_feature: MA Experiment 20000479 PARAMETER Experiment Name: Zm_Drought_P Parameter: Tissue Value: Aerial
  misc_feature: MA Experiment 20000479 PARAMETER Experiment Name: Zm_Drought_P Parameter: Treatment Value: Drought vs. No Drought
  misc_feature: MA Experiment ID: 20000480 Result: Down-regulated in Transcription
  misc_feature: MA Experiment 20000480 PARAMETER Experiment Name: Zm_Drought_P Parameter: Age (day) Value: 11
  misc_feature: MA Experiment 20000480 PARAMETER Experiment Name: Zm_Drought_P Parameter: Organism Value: Zea mays
  misc_feature: MA Experiment 20000480 PARAMETER Experiment Name: Zm_Drought_P Parameter: Plant Line Value: 35A19
  misc_feature: MA Experiment 20000480 PARAMETER Experiment Name: Zm_Drought_P Parameter: Timepoint (hr) Value: 72
  misc_feature: MA Experiment 20000480 PARAMETER Experiment Name: Zm_Drought_P Parameter: Tissue Value: Aerial
  misc_feature: MA Experiment 20000480 PARAMETER Experiment Name: Zm_Drought_P Parameter: Treatment Value: Drought vs. No Drought
  misc_feature: MA Experiment ID: 20000626 Result: Down-regulated in Transcription
  misc_feature: MA Experiment 20000626 PARAMETER Experiment Name: Zm_Herbicide-Treatments_P Parameter: Timepoint (hr) Value: 12
  misc_feature: MA Experiment 20000626 PARAMETER Experiment Name: Zm_Herbicide-Treatments_P Parameter: Tissue Value: Aerial
  misc_feature: MA Experiment 20000626 PARAMETER Experiment Name: Zm_Herbicide-Treatments_P Parameter: Treatment Value: Roundup vs. No Treatment
aaatagagcccgagcgccgagggaggagggcaaaccgggagagagagagagagacacctcctccttttcccccctttgcattgggttgccgcaacactacagacacaaacacagtctaggaggcttcttccgctcgctcaggtaggtgtactgtactgtagtaggttggttctccattcatcattcagctcacaggtccctccgcctccgccgtatcggagggagaggaagcggaaggcttggaaggagaagagaatggcggggcggcgcgcggaggaggagtacgactacctgttcaaggtggtgctgatcggggactcgggcgtcggcaagtccaacctcctctcccgcttcacccgcaacgagttctgcctcgagtccaagtccaccatcggcgtcgagttcgccacacggacactccatgttgagggcaagatcatcaaggcgcagatctgggacacggcaggccaggagcgggtaccgggcgatcaccagcgcctactatcgcggggcgctgggcgcggtcctggtctacgacgtgagcaagcccaccaccttcgagaacatcagccggtggctcaaggagctacgcgaccacgccgactccaacaccaggatcatgctcgtcggcaacaagaccgacctgaggcacctccgggccgtcgccaccgacgacgctcggagcttcgctgaggcagaaggcctgtcctacatcgagacgtccgcgctggaggccaccaacgtggaggaggcgttccagctcatcctgggcgacatttaccgggccgtcagcaagaagcctgtggcgtccgacgaggttggcgccggccagggaggcgtcaaggaaggtaagaccatcgatgtggcgactggtgctgatgccgccgctcacaagaagcagtgctgctcggcttagaagttagaagaacccatgctggtggtctctcgttcagtggcgtatgtgttgttgtgatggttgtcgttgttgttttttttctcttcttccagtccaaaagtttgttgattcgttttgccagatagtacctttgttggagggataatcatgctcacatatatattctctaaagcaagcagttatatatgattataccg

SEQ ID NO: 15690 - protein, 164 aa, Zea mays subsp. mays
  peptide (1)..(164): Ceres Seq. ID no. 12353095
  misc_feature (20)..(121): Pfam Name: Ras family Pfam Description: Ras family
  misc_feature (20)..(164): Homolog of NCBI NO: 15217568 NR Description: GTP-binding protein, putative; protein id: supported by cDNA: 17081., supported by cDNA: gi_15010637,
  misc_feature (20)..(164): Homolog of NCBI NO: 15232652 NR Description: GTP-binding protein, putative; protein id: supported by cDNA: 35596., supported by cDNA: gi_20465470
  misc_feature (20)..(163): Homolog of NCBI NO: 3024501 NR Description: RAS-RELATED PROTEIN RAB11C
  misc_feature (20)..(163): Homolog of NCBI NO: 15222396 NR Description: GTP-binding protein, putative; protein id:
  misc_feature (20)..(164): Homolog of NCBI NO: 34897394 NR Description: Ras-related GTP-binding protein [Oryza sativa
  misc_feature (20)..(163): Homolog of NCBI NO: 3024528 NR Description: RAS-RELATED PROTEIN RAB2BV
  misc_feature (20)..(163): Homolog of NCBI NO: 15237828 NR Description: Ras-related GTP-binding protein, putative; id: At5g59150.1, supported by cDNA: gi_13877728 [Arabidopsis
  misc_feature (20)..(163): Homolog of NCBI NO: 15239462 NR Description: GTP-binding protein, putative; protein id:
  misc_feature (20)..(163): Homolog of NCBI NO: 13195452 NR Description: GTP-binding protein [Oryza sativa]
  misc_feature (20)..(163): Homolog of NCBI NO: 25294121 NR Description: protein F22G5.24 [imported] - Arabidopsis >gi|8778562|gb|AAF79570.1|AC022464_28 F22G5.24 [Arabidopsis
MLRARSSRRRSGTRQARSGYRAITSAYYRGALGAVLVYDVSKPTTFENISRWLKELRDHADSNTRIMLVGNKTDLRHLRAVATDDARSFAEAEGLSYIETSALEATNVEEAFQLILGDIYRAVSKKPVASDEVGAGQGGVKEGKTIDVATGADAAAHKKQCCSA

SEQ ID NO: 15691 - protein, 145 aa, Zea mays subsp. mays
  peptide (1)..(145): Ceres Seq. ID no. 12353096
  misc_feature (15)..(74): Pfam Name: Ras family Pfam Description: Ras family
  misc_feature (4)..(74): Homolog of NCBI NO: 15217568 NR Description: GTP-binding protein, putative; protein id: supported by cDNA: 17081., supported by cDNA: gi_15010637,
  misc_feature (5)..(74): Homolog of NCBI NO: 15232652 NR Description: GTP-binding protein, putative; protein id: supported by cDNA: 35596., supported by cDNA: gi_20465470
  misc_feature (5)..(74): Homolog of NCBI NO: 3024501 NR Description: RAS-RELATED PROTEIN RAB11C
  misc_feature (5)..(74): Homolog of NCBI NO: 15222396 NR Description: GTP-binding protein, putative; protein id:
  misc_feature (5)..(74): Homolog of NCBI NO: 34897394 NR Description: Ras-related GTP-binding protein [Oryza sativa
  misc_feature (5)..(74): Homolog of NCBI NO: 3024528 NR Description: RAS-RELATED PROTEIN RAB2BV
  misc_feature (5)..(74): Homolog of NCBI NO: 15237828 NR Description: Ras-related GTP-binding protein, putative; id: At5g59150.1, supported by cDNA: gi_13877728 [Arabidopsis
  misc_feature (1)..(74): Homolog of NCBI NO: 15239462 NR Description: GTP-binding protein, putative; protein id:
  misc_feature (2)..(74): Homolog of NCBI NO: 13195452 NR Description: GTP-binding protein [Oryza sativa]
  misc_feature (5)..(57): Homolog of NCBI NO: 25294121 NR Description: protein F22G5.24 [imported] - Arabidopsis >gi|8778562|gb|AAF79570.1|AC022464_28 F22G5.24 [Arabidopsis
MAGRRAEEEYDYLFKVVLIGDSGVGKSNLLSRFTRNEFCLESKSTIGVEFATRTLHVEGKIIKAQIWDTAGQERVPGDHQRLLSRGAGRGPGLRREQAHHLREHQPVAQGATRPRRLQHQDHARRQQDRPEAPPGRRHRRRSELR

SEQ ID NO: 15692 - protein, 98 aa, Zea mays subsp. mays
  peptide (1)..(98): Ceres Seq. ID no. 12353097
  misc_feature (1)..(55): Pfam Name: Ras family Pfam Description: Ras family
  misc_feature (1)..(98): Homolog of NCBI NO: 15217568 NR Description: GTP-binding protein, putative; protein id: supported by cDNA: 17081., supported by cDNA: gi_15010637,
  misc_feature (1)..(98): Homolog of NCBI NO: 15232652 NR Description: GTP-binding protein, putative; protein id: supported by cDNA: 35596., supported by cDNA: gi_20465470
  misc_feature (1)..(97): Homolog of NCBI NO: 3024501 NR Description: RAS-RELATED PROTEIN RAB11C
  misc_feature (1)..(97): Homolog of NCBI NO: 15222396 NR Description: GTP-binding protein, putative; protein id:
  misc_feature (1)..(98): Homolog of NCBI NO: 34897394 NR Description: Ras-related GTP-binding protein [Oryza sativa
  misc_feature (1)..(97): Homolog of NCBI NO: 3024528 NR Description: RAS-RELATED PROTEIN RAB2BV
  misc_feature (1)..(97): Homolog of NCBI NO: 15237828 NR Description: Ras-related GTP-binding protein, putative; id: At5g59150.1, supported by cDNA: gi_13877728 [Arabidopsis
  misc_feature (1)..(97): Homolog of NCBI NO: 15239462 NR Description: GTP-binding protein, putative; protein id:
  misc_feature (1)..(97): Homolog of NCBI NO: 13195452 NR Description: GTP-binding protein [Oryza sativa]
  misc_feature (1)..(97): Homolog of NCBI NO: 25294121 NR Description: protein F22G5.24 [imported] - Arabidopsis >gi|8778562|gb|AAF79570.1|AC022464_28 F22G5.24 [Arabidopsis
MLVGNKTDLRHLRAVATDDARSFAEAEGLSYIETSALEATNVEEAFQLILGDIYRAVSKKPVASDEVGAGQGGVKEGKTIDVATGADAAAHKKQCCSA

SEQ ID NO: 15693 - DNA, 1442 bp, Zea mays subsp. mays
  misc_feature (1)..(1442): Ceres Seq. ID no. 12361081
  misc_feature: MA Experiment ID: 108535 Result: Up-regulated in Transcription
  misc_feature: MA Experiment 108535 PARAMETER Experiment Name: Zm_Meristem_P Parameter: Age (day) Value: 8
  misc_feature: MA Experiment 108535 PARAMETER Experiment Name: Zm_Meristem_P Parameter: Organism Value: Zea mays
  misc_feature: MA Experiment 108535 PARAMETER Experiment Name: Zm_Meristem_P Parameter: Plant Line Value: 35A19
  misc_feature: MA Experiment 108535 PARAMETER Experiment Name: Zm_Meristem_P Parameter: Tissue Value: Root Meristem vs. Above Root Meristem
  misc_feature: MA Experiment ID: 108597 Result: Up-regulated in Transcription
  misc_feature: MA Experiment 108597 PARAMETER Experiment Name: Zm_100uM_ABA_P Parameter: Age (day) Value: 9
  misc_feature: MA Experiment 108597 PARAMETER Experiment Name: Zm_100uM_ABA_P Parameter: Organism Value: Zea mays
  misc_feature: MA Experiment 108597 PARAMETER Experiment Name: Zm_100uM_ABA_P Parameter: Plant Line Value: 35A19
  misc_feature: MA Experiment 108597 PARAMETER Experiment Name: Zm_100uM_ABA_P Parameter: Timepoint (hr) Value: 24
  misc_feature: MA Experiment 108597 PARAMETER Experiment Name: Zm_100uM_ABA_P Parameter: Tissue Value: Aerial
  misc_feature: MA Experiment 108597 PARAMETER Experiment Name: Zm_100uM_ABA_P Parameter: Treatment Value: 100uM ABA vs. No Treatment
  misc_feature: MA Experiment ID: 20000535 Result: Up-regulated in Transcription
  misc_feature: MA Experiment 20000535 PARAMETER Experiment Name: Zm_Hybrid_Seed_Dev_P Parameter: DAP Value: 30 vs. 12
  misc_feature: MA Experiment 20000535 PARAMETER Experiment Name: Zm_Hybrid_Seed_Dev_P Parameter: Organism Value: Zea mays
  misc_feature: MA Experiment 20000535 PARAMETER Experiment Name: Zm_Hybrid_Seed_Dev_P Parameter: Plant Line Value: 35A19
  misc_feature: MA Experiment 20000535 PARAMETER Experiment Name: Zm_Hybrid_Seed_Dev_P Parameter: Tissue Value: Embryo vs. Unfert Floret
gcacgagaccattacctagaacatcctaatcgaaaaactagccacagtaccacctcagcccaggtcccttcgcctccgctcaactgccgccgcagggcccgctgcaggcttccatgtgtggtagggcccggtgtaccctcagcccggccgaggttgccagggccttcggcttccccaccacctccgccaacgcgggcggcggtggtgacggccccgctgtgccgacgctccatcttaaccggttccggccgtcgtacaatgtgttgcctggggcgtacctgcctgtgggcgccatgcgggcactaccaggttgcgcccacggaggaggaggttcggatggggaggggccggtgatccagtgcatgaagtgggggctggtgcccagcttcaccggcaaggccgagaaacccgaccatttcaggatgttcaatgccagatcagagtccgtaaaagaaaaggtttcattccgtcgactaattcaaaaaaataggtgccttgttgcagtagaagggttttatgagtggaaaaagaatggatcaaaaaaacagccatactacatacatttccaagatcataggcctcttgtctttgcagccttgtatgatgcatggacaaattcagaaggagagatcacccatacattcactattttgactacacatgcctcaacttctctaaattggcttcatgatagaatgcctgttatcttaggcagtaaggactatgttgatgcttggttaaatgatgtttctgtaaaacttgaagaaattactgcaccttacgaaggagctgatctggtttggtatccagtgacatccgcattgggtaaagcatcatttgatggacctgagtgcatcaaagaggtacatatcggagctactgataagcctatttcaaaattcttcaccaagaaatcgactgcctacgatctatcagggaagtatgagaatatgtcacgggagcttgctcatgcttacaaagcagcgaaagtggaatgcgatggatcagtagaaaatcaaggaggggacggcaaccaacaccagtcccgagagaagcaaactactaattgtactataaaggatgaacctgtcaccttggaaccacaagttttcgagacaccgtggagcatcgagcatgaagatactatgactctggctggtgccactttggaaacacaacgtgatttgggattcaagagaaagatcgaggacactcaagtcgaagctagcatgaagccctctcagcttaccaggaaggaaaaagctgtaaaagcagcttcggatgggcaggcatcgttgctttcatatttcgcaaggaagcagggtcgctcgatgaagtagtttgcggtagccgtgccatgtattcctgtgtaactcaaactttaccagtacctgtcctccgtgttcgggacaaactatttcggttttaattttgttttggct

SEQ ID NO: 15694 - protein, 408 aa, Zea mays subsp. mays
  peptide (1)..(408): Ceres Seq. ID no. 12361082
  misc_feature (36)..(246): Pfam Name: Uncharacterised ACR, COG2135 Pfam Description: Uncharacterised ACR, COG2135
  misc_feature (36)..(283): Homolog of NCBI NO: 30683129 NR Description: expressed protein [Arabidopsis thaliana] unknown protein [Arabidopsis thaliana]
  misc_feature (1)..(283): Homolog of NCBI NO: 7487880 NR Description: hypothetical protein At2g26470 [imported] - thaliana >gi|2739372|gb|AAC14496.1| hypothetical protein
  misc_feature (43)..(252): Homolog of NCBI NO: 39995151 NR Description: conserved hypothetical protein [Geobacter PCA] >gi|39981913|gb|AAR33375.1| conserved hypothetical protein
  misc_feature (134)..(315): Homolog of NCBI NO: 38494381 NR Description: Unknown (protein for MGC:75607) [Silurana
  misc_feature (1)..(151): Homolog of NCBI NO: 38494381 NR Description: Unknown (protein for MGC:75607) [Silurana
  misc_feature (82)..(248): Homolog of NCBI NO: 17230686 NR Description: hypothetical protein [Nostoc sp. PCC 7120]
  misc_feature (75)..(248): Homolog of NCBI NO: 23124313 NR Description: hypothetical protein [Nostoc punctiforme]
  misc_feature (46)..(251): Homolog of NCBI NO: 37522067 NR Description: hypothetical protein gll2498 [Gloeobacter
  misc_feature (84)..(259): Homolog of NCBI NO: 22963055 NR Description: hypothetical protein [Rhodopseudomonas palustris]
  misc_feature (44)..(249): Homolog of NCBI NO: 23134918 NR Description: hypothetical protein [Cytophaga hutchinsonii]
MCGRARCTLSPAEVARAFGFPTTSANAGGGGDGPAVPTLHLNRFRPSYNVLPGAYLPVGAMRALPGCAHGGGGSDGEGPVIQCMKWGLVPSFTGKAEKPDHFRMFNARSESVKEKVSFRRLIQKNRCLVAVEGFYEWKKNGSKKQPYYIHFQDHRPLVFAALYDAWTNSEGEITHTFTILTTHASTSLNWLHDRMPVILGSKDYVDAWLNDVSVKLEEITAPYEGADLVWYPVTSALGKASFDGPECIKEVHIGATDKPISKFFTKKSTAYDLSGKYENMSRELAHAYKAAKVECDGSVENQGGDGNQHQSREKQTTNCTIKDEPVTLEPQVFETPWSIEHEDTMTLAGATLETQRDLGFKRKIEDTQVEASMKPSQLTRKEKAVKAASDGQASLLSYFARKQGRSMK

SEQ ID NO: 15695 - protein, 348 aa, Zea mays subsp. mays
  peptide (1)..(348): Ceres Seq. ID no. 12361083
  misc_feature (1)..(186): Pfam Name: Uncharacterised ACR, COG2135 Pfam Description: Uncharacterised ACR, COG2135
  misc_feature (1)..(223): Homolog of NCBI NO: 30683129 NR Description: expressed protein [Arabidopsis thaliana] unknown protein [Arabidopsis thaliana]
  misc_feature (1)..(223): Homolog of NCBI NO: 7487880 NR Description: hypothetical protein At2g26470 [imported] - thaliana >gi|2739372|gb|AAC14496.1| hypothetical protein
  misc_feature (1)..(192): Homolog of NCBI NO: 39995151 NR Description: conserved hypothetical protein [Geobacter PCA] >gi|39981913|gb|AAR33375.1| conserved hypothetical protein
  misc_feature (74)..(255): Homolog of NCBI NO: 38494381 NR Description: Unknown (protein for MGC:75607) [Silurana
  misc_feature (1)..(91): Homolog of NCBI NO: 38494381 NR Description: Unknown (protein for MGC:75607) [Silurana
  misc_feature (22)..(188): Homolog of NCBI NO: 17230686 NR Description: hypothetical protein [Nostoc sp. PCC 7120]
  misc_feature (15)..(188): Homolog of NCBI NO: 23124313 NR Description: hypothetical protein [Nostoc punctiforme]
  misc_feature (1)..(191): Homolog of NCBI NO: 37522067 NR Description: hypothetical protein gll2498 [Gloeobacter
  misc_feature (24)..(199): Homolog of NCBI NO: 22963055 NR Description: hypothetical protein [Rhodopseudomonas palustris]
  misc_feature (1)..(189): Homolog of NCBI NO: 23134918 NR Description: hypothetical protein [Cytophaga hutchinsonii]
MRALPGCAHGGGGSDGEGPVIQCMKWGLVPSFTGKAEKPDHFRMFNARSESVKEKVSFRRLIQKNRCLVAVEGFYEWKKNGSKKQPYYIHFQDHRPLVFAALYDAWTNSEGEITHTFTILTTHASTSLNWLHDRMPVILGSKDYVDAWLNDVSVKLEEITAPYEGADLVWYPVTSALGKASFDGPECIKEVHIGATDKPISKFFTKKSTAYDLSGKYENMSRELAHAYKAAKVECDGSVENQGGDGNQHQSREKQTTNCTIKDEPVTLEPQVFETPWSIEHEDTMTLAGATLETQRDLGFKRKIEDTQVEASMKPSQLTRKEKAVKAASDGQASLLSYFARKQGRSMK

SEQ ID NO: 15696 - protein, 325 aa, Zea mays subsp. mays
  peptide (1)..(325): Ceres Seq. ID no. 12361084
  misc_feature (1)..(163): Pfam Name: Uncharacterised ACR, COG2135 Pfam Description: Uncharacterised ACR, COG2135
  misc_feature (1)..(200): Homolog of NCBI NO: 30683129 NR Description: expressed protein [Arabidopsis thaliana] unknown protein [Arabidopsis thaliana]
  misc_feature (1)..(200): Homolog of NCBI NO: 7487880 NR Description: hypothetical protein At2g26470 [imported] - thaliana >gi|2739372|gb|AAC14496.1| hypothetical protein
  misc_feature (1)..(169): Homolog of NCBI NO: 39995151 NR Description: conserved hypothetical protein [Geobacter PCA] >gi|39981913|gb|AAR33375.1| conserved hypothetical protein
  misc_feature (51)..(232): Homolog of NCBI NO: 38494381 NR Description: Unknown (protein for MGC:75607) [Silurana
  misc_feature (1)..(68): Homolog of NCBI NO: 38494381 NR Description: Unknown (protein for MGC:75607) [Silurana
  misc_feature (1)..(165): Homolog of NCBI NO: 17230686 NR Description: hypothetical protein [Nostoc sp. PCC 7120]
  misc_feature (1)..(165): Homolog of NCBI NO: 23124313 NR Description: hypothetical protein [Nostoc punctiforme]
  misc_feature (1)..(168): Homolog of NCBI NO: 37522067 NR Description: hypothetical protein gll2498 [Gloeobacter
  misc_feature (1)..(176): Homolog of NCBI NO: 22963055 NR Description: hypothetical protein [Rhodopseudomonas palustris]
  misc_feature (1)..(166): Homolog of NCBI NO: 23134918 NR Description: hypothetical protein [Cytophaga hutchinsonii]
MKWGLVPSFTGKAEKPDHFRMFNARSESVKEKVSFRRLIQKNRCLVAVEGFYEWKKNGSKKQPYYIHFQDHRPLVFAALYDAWTNSEGEITHTFTILTTHASTSLNWLHDRMPVILGSKDYVDAWLNDVSVKLEEITAPYEGADLVWYPVTSALGKASFDGPECIKEVHIGATDKPISKFFTKKSTAYDLSGKYENMSRELAHAYKAAKVECDGSVENQGGDGNQHQSREKQTTNCTIKDEPVTLEPQVFETPWSIEHEDTMTLAGATLETQRDLGFKRKIEDTQVEASMKPSQLTRKEKAVKAASDGQASLLSYFARKQGRSMK

SEQ ID NO: 15697 - DNA, 1352 bp, Zea mays subsp. mays
  misc_feature (1)..(1352): Ceres Seq. ID no. 12383204
  misc_feature: MA Experiment ID: 108504 Result: Down-regulated in Transcription
  misc_feature: MA Experiment 108504 PARAMETER Experiment Name: Zm_Drought_P Parameter: Age (day) Value: 8
  misc_feature: MA Experiment 108504 PARAMETER Experiment Name: Zm_Drought_P Parameter: Organism Value: Zea mays
  misc_feature: MA Experiment 108504 PARAMETER Experiment Name: Zm_Drought_P Parameter: Plant Line Value: 35A19
  misc_feature: MA Experiment 108504 PARAMETER Experiment Name: Zm_Drought_P Parameter: Timepoint (hr) Value: 12
  misc_feature: MA Experiment 108504 PARAMETER Experiment Name: Zm_Drought_P Parameter: Tissue Value: Aerial
  misc_feature: MA Experiment 108504 PARAMETER Experiment Name: Zm_Drought_P Parameter: Treatment Value: Drought vs. No Drought
  misc_feature: MA Experiment ID: 108529 Result: Down-regulated in Transcription
  misc_feature: MA Experiment 108529 PARAMETER Experiment Name: Zm_Imbibed_Seeds_P Parameter: Age (day) Value: 5 vs. 2
  misc_feature: MA Experiment 108529 PARAMETER Experiment Name: Zm_Imbibed_Seeds_P Parameter: Organism Value: Zea mays
  misc_feature: MA Experiment 108529 PARAMETER Experiment Name: Zm_Imbibed_Seeds_P Parameter: Plant Line Value: 35A19
  misc_feature: MA Experiment 108529 PARAMETER Experiment Name: Zm_Imbibed_Seeds_P Parameter: Tissue Value: Roots vs. Embryo
  misc_feature: MA Experiment ID: 108536 Result: Down-regulated in Transcription
  misc_feature: MA Experiment 108536 PARAMETER Experiment Name: Zm_Meristem_P Parameter: Age (day) Value: 8
  misc_feature: MA Experiment 108536 PARAMETER Experiment Name: Zm_Meristem_P Parameter: Organism Value: Zea mays
  misc_feature: MA Experiment 108536 PARAMETER Experiment Name: Zm_Meristem_P Parameter: Plant Line Value: 35A19
  misc_feature: MA Experiment 108536 PARAMETER Experiment Name: Zm_Meristem_P Parameter: Tissue Value: Shoot Meristem vs. Above Shoot Meristem
  misc_feature: MA Experiment ID: 108543 Result: Up-regulated in Transcription
  misc_feature: MA Experiment ID: 108546 Result: Down-regulated in Transcription
  misc_feature: MA Experiment 108546 PARAMETER Experiment Name: Zm_Imbibed_Seeds_P Parameter: Age (day) Value: 3 vs. 2
  misc_feature: MA Experiment 108546 PARAMETER Experiment Name: Zm_Imbibed_Seeds_P Parameter: Organism Value: Zea mays
  misc_feature: MA Experiment 108546 PARAMETER Experiment Name: Zm_Imbibed_Seeds_P Parameter: Plant Line Value: 35A19
  misc_feature: MA Experiment 108546 PARAMETER Experiment Name: Zm_Imbibed_Seeds_P Parameter: Tissue Value: Roots vs. Embryo
  misc_feature: MA Experiment ID: 108556 Result: Down-regulated in Transcription
  misc_feature: MA Experiment 108556 PARAMETER Experiment Name: Zm_Drought_P Parameter: Age (day) Value: 9
  misc_feature: MA Experiment 108556 PARAMETER Experiment Name: Zm_Drought_P Parameter: Organism Value: Zea mays
  misc_feature: MA Experiment 108556 PARAMETER Experiment Name: Zm_Drought_P Parameter: Plant Line Value: 35A19
  misc_feature: MA Experiment 108556 PARAMETER Experiment Name: Zm_Drought_P Parameter: Timepoint (hr) Value: 24
  misc_feature: MA Experiment 108556 PARAMETER Experiment Name: Zm_Drought_P Parameter: Tissue Value: Aerial
  misc_feature: MA Experiment 108556 PARAMETER Experiment Name: Zm_Drought_P Parameter: Treatment Value: Drought vs. No Drought
  misc_feature: MA Experiment ID: 108597 Result: Down-regulated in Transcription
  misc_feature: MA Experiment 108597 PARAMETER Experiment Name: Zm_100uM_ABA_P Parameter: Age (day) Value: 9
  misc_feature: MA Experiment 108597 PARAMETER Experiment Name: Zm_100uM_ABA_P Parameter: Organism Value: Zea mays
  misc_feature: MA Experiment 108597 PARAMETER Experiment Name: Zm_100uM_ABA_P Parameter: Plant Line Value: 35A19
  misc_feature: MA Experiment 108597 PARAMETER Experiment Name: Zm_100uM_ABA_P Parameter: Timepoint (hr) Value: 24
  misc_feature: MA Experiment 108597 PARAMETER Experiment Name: Zm_100uM_ABA_P Parameter: Tissue Value: Aerial
  misc_feature: MA Experiment 108597 PARAMETER Experiment Name: Zm_100uM_ABA_P Parameter: Treatment Value: 100uM ABA vs. No Treatment
  misc_feature: MA Experiment ID: 20000477 Result: Down-regulated in Transcription
  misc_feature: MA Experiment 20000477 PARAMETER Experiment Name: Zm_5mM_SA_P Parameter: Age (day) Value: 10
  misc_feature: MA Experiment 20000477 PARAMETER Experiment Name: Zm_5mM_SA_P Parameter: Organism Value: Zea mays
  misc_feature: MA Experiment 20000477 PARAMETER Experiment Name: Zm_5mM_SA_P Parameter: Plant Line Value: 35A19
  misc_feature: MA Experiment 20000477 PARAMETER Experiment Name: Zm_5mM_SA_P Parameter: Timepoint (hr) Value: 48
  misc_feature: MA Experiment 20000477 PARAMETER Experiment Name: Zm_5mM_SA_P Parameter: Tissue Value: Aerial
  misc_feature: MA Experiment 20000477 PARAMETER Experiment Name: Zm_5mM_SA_P Parameter: Treatment Value: 5mM SA vs. No Treatment
  misc_feature: MA Experiment ID: 20000478 Result: Down-regulated in Transcription
  misc_feature: MA Experiment 20000478 PARAMETER Experiment Name: Zm_5mM_SA_P Parameter: Age (day) Value: 11
  misc_feature: MA Experiment 20000478 PARAMETER Experiment Name: Zm_5mM_SA_P Parameter: Organism Value: Zea mays
  misc_feature: MA Experiment 20000478 PARAMETER Experiment Name: Zm_5mM_SA_P Parameter: Plant Line Value: 35A19
  misc_feature: MA Experiment 20000478 PARAMETER Experiment Name: Zm_5mM_SA_P Parameter: Timepoint (hr) Value: 72
  misc_feature: MA Experiment 20000478 PARAMETER Experiment Name: Zm_5mM_SA_P Parameter: Tissue Value: Aerial
  misc_feature: MA Experiment 20000478 PARAMETER Experiment Name: Zm_5mM_SA_P Parameter: Treatment Value: 5mM SA vs. No Treatment
  misc_feature: MA Experiment ID: 20000479 Result: Down-regulated in Transcription
  misc_feature: MA Experiment 20000479 PARAMETER Experiment Name: Zm_Drought_P Parameter: Age (day) Value: 10
  misc_feature: MA Experiment 20000479 PARAMETER Experiment Name: Zm_Drought_P Parameter: Organism Value: Zea mays
  misc_feature: MA Experiment 20000479 PARAMETER Experiment Name: Zm_Drought_P Parameter: Plant Line Value: 35A19
  misc_feature: MA Experiment 20000479 PARAMETER Experiment Name: Zm_Drought_P Parameter: Timepoint (hr) Value: 48
  misc_feature: MA Experiment 20000479 PARAMETER Experiment Name: Zm_Drought_P Parameter: Tissue Value: Aerial
  misc_feature: MA Experiment 20000479 PARAMETER Experiment Name: Zm_Drought_P Parameter: Treatment Value: Drought vs. No Drought
  misc_feature: MA Experiment ID: 20000480 Result: Down-regulated in Transcription
  misc_feature: MA Experiment 20000480 PARAMETER Experiment Name: Zm_Drought_P Parameter: Age (day) Value: 11
  misc_feature: MA Experiment 20000480 PARAMETER Experiment Name: Zm_Drought_P Parameter: Organism Value: Zea mays
  misc_feature: MA Experiment 20000480 PARAMETER Experiment Name: Zm_Drought_P Parameter: Plant Line Value: 35A19
  misc_feature: MA Experiment 20000480 PARAMETER Experiment Name: Zm_Drought_P Parameter: Timepoint (hr) Value: 72
  misc_feature: MA Experiment 20000480 PARAMETER Experiment Name: Zm_Drought_P Parameter: Tissue Value: Aerial
  misc_feature: MA Experiment 20000480 PARAMETER Experiment Name: Zm_Drought_P Parameter: Treatment Value: Drought vs. No Drought
  misc_feature: MA Experiment ID: 20000488 Result: Down-regulated in Transcription
  misc_feature: MA Experiment 20000488 PARAMETER Experiment Name: Zm_50mM_NH4NO3_L_to_H_P Parameter: Organism Value: Zea mays
  misc_feature: MA Experiment 20000488 PARAMETER Experiment Name: Zm_50mM_NH4NO3_L_to_H_P Parameter: Timepoint (hr) Value: 8
  misc_feature: MA Experiment 20000488 PARAMETER Experiment Name: Zm_50mM_NH4NO3_L_to_H_P Parameter: Tissue Value: Leaves
  misc_feature: MA Experiment 20000488 PARAMETER Experiment Name: Zm_50mM_NH4NO3_L_to_H_P Parameter: Treatment Value: 50mM NH4NO3 vs. 100mM Mannitol
  misc_feature: MA Experiment ID: 20000535 Result: Down-regulated in Transcription
  misc_feature: MA Experiment 20000535 PARAMETER Experiment Name: Zm_Hybrid_Seed_Dev_P Parameter: DAP Value: 30 vs. 12
  misc_feature: MA Experiment 20000535 PARAMETER Experiment Name: Zm_Hybrid_Seed_Dev_P Parameter: Organism Value: Zea mays
  misc_feature: MA Experiment 20000535 PARAMETER Experiment Name: Zm_Hybrid_Seed_Dev_P Parameter: Plant Line Value: 35A19
  misc_feature: MA Experiment 20000535 PARAMETER Experiment Name: Zm_Hybrid_Seed_Dev_P Parameter: Tissue Value: Embryo vs. Unfert Floret
  misc_feature: MA Experiment ID: 20000626 Result: Down-regulated in Transcription
  misc_feature: MA Experiment 20000626 PARAMETER Experiment Name: Zm_Herbicide-Treatments_P Parameter: Timepoint (hr) Value: 12
  misc_feature: MA Experiment 20000626 PARAMETER Experiment Name: Zm_Herbicide-Treatments_P Parameter: Tissue Value: Aerial
  misc_feature: MA Experiment 20000626 PARAMETER Experiment Name: Zm_Herbicide-Treatments_P Parameter: Treatment Value: Roundup vs. No Treatment
agcacagagtggtaagcatggcgagcaccacagacaaccgtggcctcctcgtcgtggccgccgccaccgtcgtcctcgccgtggccgcggccccggcgcatacaccggggggcaatactgctacccctccgccgccgttccggacggtgtacgcgttcggcgactcgttcacggacacggggaacacgcggtcgacgacggggccctactcgttcggctacgtgtccagcccgccctacggcgccaccttcttccaccgctcgaccaaccgctactccgacggccgcctggtggtggacttcctggccgaggcgctggcgctgccgtcctacctcccgccctacctcgccgtgtccgtctccaacgccaacgccacggcggccggagccggcgtcaacttcgcggtggccggcgccacggccatcgagcacgacttcttcgcgcggaacaacctcagcatcgacgtcacgccgcagtccatcatgacgcagtctgggctggttcgacgcgcacctgctccgctcctcctcctccgccgccgccgccgccgacgcgctcttctgggtgggcgagatcggcgccaacgactacgcctacacagtggtcgcccgcgacaccatccctcccaagctcgtccgcaccatggccgtccagagggtcaccgccttcgtcgagggcctgctggagcgaggcgccaagtacgtgatcgtgcaggggctgccgctgacggggtgcctgccgctggccatgacgctggcgcgcgccgacgaccgcgacgccgtgggctgcgccgcctccgtcaaccgccagagctacgcgcacaaccgccgcctcctggcggccctccgcgcgctgcgccgccgccacccgggcgccgtcgttgcgtacgccgattactacgccgcgcacctcgccgtgatgcggagccccgcgcgccacggcttcgccgagcccttccgcacctgctgcggctccggcggcggcgcctacaacttcgacctcttcgccacctgcggctcgccgcaggtcaccacggcctgcgcgcgccccgccgagtacgtcaactgggacggcgtccacatgacggaggccatgtacaaggtcgtcgccggcatgttcttcagtggcgacggctactgccgcccagcgttcaaggacctgctggccatgaaagcccgccaggggaagccgtgattttgagacaatcagaatgcacgttccaattacaataagtagagctgcatgcgtgacgaatccatgtcatcttcatcgtgaacccttaaccatttatcaggcatttataattggatccacatacgtatgatgatgatgagcacaaaggatttaacttc

SEQ ID NO: 15698 - protein, 409 aa, Zea mays subsp. mays
  peptide (1)..(409): Ceres Seq. ID no. 12383205
  misc_feature (49)..(163): Pfam Name: GDSL-like Lipase/Acylhydrolase Pfam Description: GDSL-like Lipase/Acylhydrolase
  misc_feature (45)..(163): Homolog of NCBI NO: 15228381 NR Description: lipase - like protein; protein id: At3g48460.1, by cDNA: 13870. [Arabidopsis thaliana] >gi|7487944|pir||T06696
  misc_feature (17)..(164): Homolog of NCBI NO: 37533980 NR Description: putative lipase [Oryza sativa (japonica >gi|15451640|gb|AAK98764.1| Putative lipase [Oryza sativa]
  misc_feature (37)..(157): Homolog of NCBI NO: 34903986 NR Description: unnamed protein product [Oryza sativa (japonica group)] >gi|7523496|dbj|BAA94224.1| unnamed protein product
  misc_feature (30)..(184): Homolog of NCBI NO: 37533968 NR Description: putative lipase [Oryza sativa (japonica >gi|15451635|gb|AAK98759.1| Putative lipase [Oryza sativa]
  misc_feature (38)..(151): Homolog of NCBI NO: 15218731 NR Description: lipase, putative; protein id: At1g28600.1, by cDNA: 37307., supported by cDNA: gi_14326569 [Arabidopsis >gi|14326570|gb|AAK60329.1|AF385739_1 At1g28600/F1K23_6
  misc_feature (19)..(140): Homolog of NCBI NO: 34894838 NR Description: putative lipase homolog [Oryza sativa (japonica group)] >gi|13365800|dbj|BAB39238.1| putative lipase homolog
  misc_feature (2)..(139): Homolog of NCBI NO: 33147015 NR Description: putative early nodulin 8 precursor [Oryza sativa
  misc_feature (15)..(145): Homolog of NCBI NO: 15220995 NR Description: lipase, putative; protein id: At1g53940.1
  misc_feature (46)..(188): Homolog of NCBI NO: 26449492 NR Description: unknown protein [Arabidopsis thaliana]
  misc_feature (17)..(138): Homolog of NCBI NO: 7485419 NR Description: hypothetical protein F13C5.140 - Arabidopsis >gi|2832625|emb|CAA16754.1| putative protein [Arabidopsis >gi|7268691|emb|CAB78899.1| putative protein [Arabidopsis
HRVVSMASTTDNRGLLVVAAATVVLAVAAAPAHTPGGNTATPPPPFRTVYAFGDSFTDTGNTRSTTGPYSFGYVSSPPYGATFFHRSTNRYSDGRLVVDFLAEALALPSYLPPYLAVSVSNANATAAGAGVNFAVAGATAIEHDFFARNNLSIDVTPQSIMTQSGLVRRAPAPLLLLRRRRRRRALLGGRDRRQRLRLHSGRPRHHPSQARPHHGRPEGHRLRRGPAGARRQVRDRAGAAADGVPAAGHDAGARRRPRRRGLRRLRQPPELRAQPPPPGGPPRAAPPPPGRRRCVRRLLRRAPRRDAEPRAPRLRRALPHLLRLRRRRLQLRPLRHLRLAAGHHGLRAPRRVRQLGRRPHDGGHVQGRRRHVLQWRRLLPPSVQGPAGHESPPGEAVILRQSECTFQLQ

SEQ ID NO: 15699 - protein, 404 aa, Zea mays subsp. mays
  peptide (1)..(404): Ceres Seq. ID no. 12383206
  misc_feature (44)..(158): Pfam Name: GDSL-like Lipase/Acylhydrolase Pfam Description: GDSL-like Lipase/Acylhydrolase
  misc_feature (40)..(158): Homolog of NCBI NO: 15228381 NR Description: lipase - like protein; protein id: At3g48460.1, by cDNA: 13870. [Arabidopsis thaliana] >gi|7487944|pir||T06696
  misc_feature (12)..(159): Homolog of NCBI NO: 37533980 NR Description: putative lipase [Oryza sativa (japonica >gi|15451640|gb|AAK98764.1| Putative lipase [Oryza sativa]
  misc_feature (32)..(152): Homolog of NCBI NO: 34903986 NR Description: unnamed protein product [Oryza sativa (japonica group)] >gi|7523496|dbj|BAA94224.1| unnamed protein product
  misc_feature (25)..(179): Homolog of NCBI NO: 37533968 NR Description: putative lipase [Oryza sativa (japonica >gi|15451635|gb|AAK98759.1| Putative lipase [Oryza sativa]
  misc_feature (33)..(146): Homolog of NCBI NO: 15218731 NR Description: lipase, putative; protein id: At1g28600.1, by cDNA: 37307., supported by cDNA: gi_14326569 [Arabidopsis >gi|14326570|gb|AAK60329.1|AF385739_1 At1g28600/F1K23_6
  misc_feature (14)..(135): Homolog of NCBI NO: 34894838 NR Description: putative lipase homolog [Oryza sativa (japonica group)] >gi|13365800|dbj|BAB39238.1| putative lipase homolog
  misc_feature (1)..(134): Homolog of NCBI NO: 33147015 NR Description: putative early nodulin 8 precursor [Oryza sativa
  misc_feature (10)..(140): Homolog of NCBI NO: 15220995 NR Description: lipase, putative; protein id: At1g53940.1
  misc_feature (41)..(183): Homolog of NCBI NO: 26449492 NR Description: unknown protein [Arabidopsis thaliana]
  misc_feature (12)..(133): Homolog of NCBI NO: 7485419 NR Description: hypothetical protein F13C5.140 - Arabidopsis >gi|2832625|emb|CAA16754.1| putative protein [Arabidopsis >gi|7268691|emb|CAB78899.1| putative protein [Arabidopsis
MASTTDNRGLLVVAAATVVLAVAAAPAHTPGGNTATPPPPFRTVYAFGDSFTDTGNTRSTTGPYSFGYVSSPPYGATFFHRSTNRYSDGRLVVDFLAEALALPSYLPPYLAVSVSNANATAAGAGVNFAVAGATAIEHDFFARNNLSIDVTPQSIMTQSGLVRRAPAPLLLLRRRRRRRALLGGRDRRQRLRLHSGRPRHHPSQARPHHGRPEGHRLRRGPAGARRQVRDRAGAAADGVPAAGHDAGARRRPRRRGLRRLRQPPELRAQPPPPGGPPRAAPPPPGRRRCVRRLLRRAPRRDAEPRAPRLRRALPHLLRLRRRRLQLRPLRHLRLAAGHHGLRAPRRVRQLGRRPHDGGHVQGRRRHVLQWRRLLPPSVQGPAGHESPPGEAVILRQSECTFQLQ

SEQ ID NO: 15700 - protein, 249 aa, Zea mays subsp. mays
  peptide (1)..(249): Ceres Seq. ID no. 12383207
  misc_feature (1)..(24): Homolog of NCBI NO: 37533968 NR Description: putative lipase [Oryza sativa (japonica >gi|15451635|gb|AAK98759.1| Putative lipase [Oryza sativa]
  misc_feature (1)..(28): Homolog of NCBI NO: 26449492 NR Description: unknown protein [Arabidopsis thaliana]
MTQSGLVRRAPAPLLLLRRRRRRRALLGGRDRRQRLRLHSGRPRHHPSQARPHHGRPEGHRLRRGPAGARRQVRDRAGAAADGVPAAGHDAGARRRPRRRGLRRLRQPPELRAQPPPPGGPPRAAPPPPGRRRCVRRLLRRAPRRDAEPRAPRLRRALPHLLRLRRRRLQLRPLRHLRLAAGHHGLRAPRRVRQLGRRPHDGGHVQGRRRHVLQWRRLLPPSVQGPAGHESPPGEAVILRQSECTFQLQ

SEQ ID NO: 15701 - DNA, 1671 bp, Zea mays subsp. mays
  misc_feature (1)..(1671): Ceres Seq. ID no. 12352733
  misc_feature: MA Experiment ID: 108528 Result: Up-regulated in Transcription
  misc_feature: MA Experiment 108528 PARAMETER Experiment Name: Zm_Imbibed_Seeds_P Parameter: Age (day) Value: 5 vs. 2
  misc_feature: MA Experiment 108528 PARAMETER Experiment Name: Zm_Imbibed_Seeds_P Parameter: Organism Value: Zea mays
  misc_feature: MA Experiment 108528 PARAMETER Experiment Name: Zm_Imbibed_Seeds_P Parameter: Plant Line Value: 35A19
  misc_feature: MA Experiment 108528 PARAMETER Experiment Name: Zm_Imbibed_Seeds_P Parameter: Tissue Value: Aerial vs. Embryo
  misc_feature: MA Experiment ID: 108530 Result: Up-regulated in Transcription
  misc_feature: MA Experiment 108530 PARAMETER Experiment Name: Zm_Imbibed_Seeds_P Parameter: Age (day) Value: 6 vs. 2
  misc_feature: MA Experiment 108530 PARAMETER Experiment Name: Zm_Imbibed_Seeds_P Parameter: Organism Value: Zea mays
  misc_feature: MA Experiment 108530 PARAMETER Experiment Name: Zm_Imbibed_Seeds_P Parameter: Plant Line Value: 35A19
  misc_feature: MA Experiment 108530 PARAMETER Experiment Name: Zm_Imbibed_Seeds_P Parameter: Tissue Value: Aerial vs. Embryo
  misc_feature: MA Experiment ID: 108535 Result: Down-regulated in Transcription
  misc_feature: MA Experiment 108535 PARAMETER Experiment Name: Zm_Meristem_P Parameter: Age (day) Value: 8
  misc_feature: MA Experiment 108535 PARAMETER Experiment Name: Zm_Meristem_P Parameter: Organism Value: Zea mays
  misc_feature: MA Experiment 108535 PARAMETER Experiment Name: Zm_Meristem_P Parameter: Plant Line Value: 35A19
  misc_feature: MA Experiment 108535 PARAMETER Experiment Name: Zm_Meristem_P Parameter: Tissue Value: Root Meristem vs. Above Root Meristem
  misc_feature: MA Experiment ID: 108547 Result: Up-regulated in Transcription
  misc_feature: MA Experiment 108547 PARAMETER Experiment Name: Zm_Imbibed_Seeds_P Parameter: Age (day) Value: 4 vs. 2
  misc_feature: MA Experiment 108547 PARAMETER Experiment Name: Zm_Imbibed_Seeds_P Parameter: Organism Value: Zea mays
  misc_feature: MA Experiment 108547 PARAMETER Experiment Name: Zm_Imbibed_Seeds_P Parameter: Plant Line Value: 35A19
  misc_feature: MA Experiment 108547 PARAMETER Experiment Name: Zm_Imbibed_Seeds_P Parameter: Tissue Value: Aerial vs. Embryo
accaagcgcccaacaactgccgccccaagccaagggaagggaaaaggctatcgttctcgtcagtcgtcacgagagccgcgacggcgcgcatggcggcgacggcagcggcgctccggtgctgcttccccggatcctccggtgtcggtagtggcttcgtcaagcccaactcctccaggcgaggctggtgcgcagcggccgtggcggcgccgtcgcgggaggcggaaccggtttcgtcgctggggcaccgcacccgcgtcgacttccccatccttcaccaggaatttgatgatgccaaattagtttacttcgacaatggtgcaacatcgcagaaaccatgtagtgtgatgaaaacattagatgagtactaccgatcgtacaattcgaatgttcatcgtggtatccatgcactcaggctactcatgcatatgaggatgcaagaagaaaagttgcaaattttgtcaacgcagctgatagcagagagattgttttcactcgtaatgctactgaagctattaatctggtagcctattcatggggactatctaacttgaaagaaggagatgaaattgttcttacagttgcagagcatcatagtgctattgttccatggcaatttgtttcccagaagactggtgccaccttaaaatatgttggattgactaaagaaaatgtcccagacattgagcagttaaaagggtttctgtcgaacaagacaaagatagttgttgttcatcatgtctcaaatgttctaggttccatgcttcctatcgaggagattgtaacatggtcaaacagagttggagctaaagtccttgtagatgcttgccaaagtgttccccatatgccagttgatgttcagaaacttggcgcggactttcttgtcgcatcctctcataagatgtgtggccctacaggcgtcggatttttgcatggtaaatttgagattttgtcgtctatggagcctttcttaggtggtggtgaaatgattgcggatgtattcgaagacaaatccacatatgctgagcctccctctagatttgaggctggaactcctgcaattggagaagctataggactgggagcagccatcgactatttatcatgcattggcatggagcagatccacgaatatgagaaagagctggggacatacctctacgaaagccttctctctgttccaaatgtccagatatatggcccggcgccttcccagactgtccaccgtgctccgttgtgctccttcaatatcgagaacgtccatcctacagatatcgcagagattcttgatctgcagcatagcgtagcgattcggtcggggcatcactgcgcgcagatcttgcataggacccttggcatcaacgcaagtgctcgtgcgagtcttcacttctacaacacaaaagacgaggtggataccttcgtcgacgcgcttaaagccaccgttgatttcctcacggatcgatactagtgcggttcagttcacttcccttttttttttgccagtttcatcgctctctcgtttgaactgttgtatgcacacacaaaaaagtatgcatatatatttggtataaagaaaacatacaaagtgtacggcttggcaaagtgagctcccttatttggagttttggactgtactcccttatttggcggttgttgttgaattaaacgtagttc

SEQ ID NO: 15702 - protein, 235 aa, Zea mays subsp. mays
  peptide (1)..(235): Ceres Seq. ID no. 12352734
  misc_feature (1)..(220): Pfam Name: Aminotransferase class-V Pfam Description: Aminotransferase class-V
  misc_feature (1)..(230): Homolog of NCBI NO: 22329419 NR Description: nitrogen fixation protein (nifS), putative; id: At1g08490.1, supported by cDNA: gi_16152175, supported by
  misc_feature (1)..(126): Homolog of NCBI NO: 6664318 NR Description: T27G7.17 [Arabidopsis thaliana]
  misc_feature (99)..(230): Homolog of NCBI NO: 6664318 NR Description: T27G7.17 [Arabidopsis thaliana]
  misc_feature (1)..(230): Homolog of NCBI NO: 23129616 NR Description: hypothetical protein [Nostoc punctiforme]
  misc_feature (1)..(230): Homolog of NCBI NO: 17229987 NR Description: probable aminotransferase [Nostoc sp. PCC 7120]
  misc_feature (1)..(233): Homolog of NCBI NO: 23040580 NR Description: hypothetical protein [Trichodesmium erythraeum
  misc_feature (1)..(233): Homolog of NCBI NO: 22299611 NR Description: cysteine desulfurase [Thermosynechococcus BP-1] >gi|22295795|dbj|BAC09620.1| cysteine desulfurase
  misc_feature (1)..(232): Homolog of NCBI NO: 34765746 NR Description: SufS [Synechococcus sp. PCC 7002]
  misc_feature (1)..(233): Homolog of NCBI NO: 16331747 NR Description: NifS protein [Synechocystis sp. PCC 6803]
  misc_feature (1)..(235): Homolog of NCBI NO: 23024352 NR Description: hypothetical protein [Leuconostoc mesenteroides
MLPIEEIVTWSNRVGAKVLVDACQSVPHMPVDVQKLGADFLVASSHKMCGPTGVGFLHGKFEILSSMEPFLGGGEMIADVFEDKSTYAEPPSRFEAGTPAIGEAIGLGAAIDYLSCIGMEQIHEYEKELGTYLYESLLSVPNVQIYGPAPSQTVHRAPLCSFNIENVHPTDIAEILDLQHSVAIRSGHHCAQILHRTLGINASARASLHFYNTKDEVDTFVDALKATVDFLTDRY

SEQ ID NO: 15703 - protein, 207 aa, Zea mays subsp. mays
  peptide (1)..(207): Ceres Seq. ID no. 12352735
  misc_feature (1)..(192): Pfam Name: Aminotransferase class-V Pfam Description: Aminotransferase class-V
  misc_feature (1)..(205): Homolog of NCBI NO: 22299611 NR Description: cysteine desulfurase [Thermosynechococcus BP-1] >gi|22295795|dbj|BAC09620.1| cysteine desulfurase
  misc_feature (1)..(204): Homolog of NCBI NO: 34765746 NR Description: SufS [Synechococcus sp. PCC 7002]
  misc_feature (1)..(202): Homolog of NCBI NO: 22329419 NR Description: nitrogen fixation protein (nifS), putative; id: At1g08490.1, supported by cDNA: gi_16152175, supported by
  misc_feature (71)..(202): Homolog of NCBI NO: 6664318 NR Description: T27G7.17 [Arabidopsis thaliana]
  misc_feature (1)..(202): Homolog of NCBI NO: 17229987 NR Description: probable aminotransferase [Nostoc sp. PCC 7120]
  misc_feature (1)..(205): Homolog of NCBI NO: 23040580 NR Description: hypothetical protein [Trichodesmium erythraeum
  misc_feature (1)..(202): Homolog of NCBI NO: 23129616 NR Description: hypothetical protein [Nostoc punctiforme]
  misc_feature (1)..(98): Homolog of NCBI NO: 6664318 NR Description: T27G7.17 [Arabidopsis thaliana]
  misc_feature (1)..(205): Homolog of NCBI NO: 16331747 NR Description: NifS protein [Synechocystis sp. PCC 6803]
  misc_feature (1)..(207): Homolog of NCBI NO: 23024352 NR Description: hypothetical protein [Leuconostoc mesenteroides
MPVDVQKLGADFLVASSHKMCGPTGVGFLHGKFEILSSMEPFLGGGEMIADVFEDKSTYAEPPSRFEAGTPAIGEAIGLGAAIDYLSCIGMEQIHEYEKELGTYLYESLLSVPNVQIYGPAPSQTVHRAPLCSFNIENVHPTDIAEILDLQHSVAIRSGHHCAQILHRTLGINASARASLHFYNTKDEVDTFVDALKATVDFLTDRY

SEQ ID NO: 15704 - protein, 188 aa, Zea mays subsp. mays
  peptide (1)..(188): Ceres Seq. ID no. 12352736
  misc_feature (1)..(173): Pfam Name: Aminotransferase class-V Pfam Description: Aminotransferase class-V
  misc_feature (1)..(183): Homolog of NCBI NO: 22329419 NR Description: nitrogen fixation protein (nifS), putative; id: At1g08490.1, supported by cDNA: gi_16152175, supported by
  misc_feature (1)..(79): Homolog of NCBI NO: 6664318 NR Description: T27G7.17 [Arabidopsis thaliana]
  misc_feature (52)..(183): Homolog of NCBI NO: 6664318 NR Description: T27G7.17 [Arabidopsis thaliana]
  misc_feature (1)..(183): Homolog of NCBI NO: 23129616 NR Description: hypothetical protein [Nostoc punctiforme]
  misc_feature (1)..(183): Homolog of NCBI NO: 17229987 NR Description: probable aminotransferase [Nostoc sp. PCC 7120]
  misc_feature (1)..(186): Homolog of NCBI NO: 23040580 NR Description: hypothetical protein [Trichodesmium erythraeum
  misc_feature (1)..(186): Homolog of NCBI NO: 22299611 NR Description: cysteine desulfurase [Thermosynechococcus BP-1] >gi|22295795|dbj|BAC09620.1| cysteine desulfurase
  misc_feature (1)..(185): Homolog of NCBI NO: 34765746 NR Description: SufS [Synechococcus sp. PCC 7002]
  misc_feature (1)..(186): Homolog of NCBI NO: 16331747 NR Description: NifS protein [Synechocystis sp. PCC 6803]
  misc_feature (1)..(188): Homolog of NCBI NO: 23024352 NR Description: hypothetical protein [Leuconostoc mesenteroides
MCGPTGVGFLHGKFEILSSMEPFLGGGEMIADVFEDKSTYAEPPSRFEAGTPAIGEAIGLGAAIDYLSCIGMEQIHEYEKELGTYLYESLLSVPNVQIYGPAPSQTVHRAPLCSFNIENVHPTDIAEILDLQHSVAIRSGHHCAQILHRTLGINASARASLHFYNTKDEVDTFVDALKATVDFLTDRY

SEQ ID NO: 15705 - DNA, 1847 bp, Zea mays subsp. mays
  misc_feature (1)..(1847): Ceres Seq. ID no. 12362207
  misc_feature: MA Experiment ID: 108527 Result: Up-regulated in Transcription
  misc_feature: MA Experiment 108527 PARAMETER Experiment Name: Zm_5mM_NO_P Parameter: Age (day) Value: 8
  misc_feature: MA Experiment 108527 PARAMETER Experiment Name: Zm_5mM_NO_P Parameter: Organism Value: Zea mays
  misc_feature: MA Experiment 108527 PARAMETER Experiment Name: Zm_5mM_NO_P Parameter: Plant Line Value: 35A19
  misc_feature: MA Experiment 108527 PARAMETER Experiment Name: Zm_5mM_NO_P Parameter: Timepoint (hr) Value: 6
  misc_feature: MA Experiment 108527 PARAMETER Experiment Name: Zm_5mM_NO_P Parameter: Tissue Value: Aerial
  misc_feature: MA Experiment 108527 PARAMETER Experiment Name: Zm_5mM_NO_P Parameter: Treatment Value: 5mM NO vs. No Treatment
  misc_feature: MA Experiment ID: 108528 Result: Down-regulated in Transcription
  misc_feature: MA Experiment 108528 PARAMETER Experiment Name: Zm_Imbibed_Seeds_P Parameter: Age (day) Value: 5 vs. 2
  misc_feature: MA Experiment 108528 PARAMETER Experiment Name: Zm_Imbibed_Seeds_P Parameter: Organism Value: Zea mays
  misc_feature: MA Experiment 108528 PARAMETER Experiment Name: Zm_Imbibed_Seeds_P Parameter: Plant Line Value: 35A19
  misc_feature: MA Experiment 108528 PARAMETER Experiment Name: Zm_Imbibed_Seeds_P Parameter: Tissue Value: Aerial vs. Embryo
  misc_feature: MA Experiment ID: 108535 Result: Up-regulated in Transcription
  misc_feature: MA Experiment 108535 PARAMETER Experiment Name: Zm_Meristem_P Parameter: Age (day) Value: 8
  misc_feature: MA Experiment 108535 PARAMETER Experiment Name: Zm_Meristem_P Parameter: Organism Value: Zea mays
  misc_feature: MA Experiment 108535 PARAMETER Experiment Name: Zm_Meristem_P Parameter: Plant Line Value: 35A19
  misc_feature: MA Experiment 108535 PARAMETER Experiment Name: Zm_Meristem_P Parameter: Tissue Value: Root Meristem vs. Above Root Meristem
  misc_feature: MA Experiment ID: 108559 Result: Up-regulated in Transcription
  misc_feature: MA Experiment 108559 PARAMETER Experiment Name: Zm_5mM_NO_P Parameter: Age (day) Value: 8
  misc_feature: MA Experiment 108559 PARAMETER Experiment Name: Zm_5mM_NO_P Parameter: Organism Value: Zea mays
  misc_feature: MA Experiment 108559 PARAMETER Experiment Name: Zm_5mM_NO_P Parameter: Plant Line Value: 35A19
  misc_feature: MA Experiment 108559 PARAMETER Experiment Name: Zm_5mM_NO_P Parameter: Timepoint (hr) Value: 12
  misc_feature: MA Experiment 108559 PARAMETER Experiment Name: Zm_5mM_NO_P Parameter: Tissue Value: Aerial
  misc_feature: MA Experiment 108559 PARAMETER Experiment Name: Zm_5mM_NO_P Parameter: Treatment Value: 5mM NO vs. No Treatment
  misc_feature: MA Experiment ID: 108689 Result: Down-regulated in Transcription
  misc_feature: MA Experiment 108689 PARAMETER Experiment Name: Zm_Drought_Roots_P Parameter: Age (day) Value: 9
  misc_feature: MA Experiment 108689 PARAMETER Experiment Name: Zm_Drought_Roots_P Parameter: Organism Value: Zea mays
  misc_feature: MA Experiment 108689 PARAMETER Experiment Name: Zm_Drought_Roots_P Parameter: Plant Line Value: 35A19
  misc_feature: MA Experiment 108689 PARAMETER Experiment Name: Zm_Drought_Roots_P Parameter: Timepoint (hr) Value: 24
  misc_feature: MA Experiment 108689 PARAMETER Experiment Name: Zm_Drought_Roots_P Parameter: Tissue Value: Roots
  misc_feature: MA Experiment 108689 PARAMETER Experiment Name: Zm_Drought_Roots_P Parameter: Treatment Value: Drought vs. No Drought
  misc_feature: MA Experiment ID: 20000477 Result: Up-regulated in Transcription
  misc_feature: MA Experiment 20000477 PARAMETER Experiment Name: Zm_5mM_SA_P Parameter: Age (day) Value: 10
  misc_feature: MA Experiment 20000477 PARAMETER Experiment Name: Zm_5mM_SA_P Parameter: Organism Value: Zea mays
  misc_feature: MA Experiment 20000477 PARAMETER Experiment Name: Zm_5mM_SA_P Parameter: Plant Line Value: 35A19
  misc_feature: MA Experiment 20000477 PARAMETER Experiment Name: Zm_5mM_SA_P Parameter: Timepoint (hr) Value: 48
  misc_feature: MA Experiment 20000477 PARAMETER Experiment Name: Zm_5mM_SA_P Parameter: Tissue Value: Aerial
  misc_feature: MA Experiment 20000477 PARAMETER Experiment Name: Zm_5mM_SA_P Parameter: Treatment Value: 5mM SA vs. No Treatment
  misc_feature: MA Experiment ID: 20000478 Result: Up-regulated in Transcription
  misc_feature: MA Experiment 20000478 PARAMETER Experiment Name: Zm_5mM_SA_P Parameter: Age (day) Value: 11
  misc_feature: MA Experiment 20000478 PARAMETER Experiment Name: Zm_5mM_SA_P Parameter: Organism Value: Zea mays
  misc_feature: MA Experiment 20000478 PARAMETER Experiment Name: Zm_5mM_SA_P Parameter: Plant Line Value: 35A19
  misc_feature: MA Experiment 20000478 PARAMETER Experiment Name: Zm_5mM_SA_P Parameter: Timepoint (hr) Value: 72
  misc_feature: MA Experiment 20000478 PARAMETER Experiment Name: Zm_5mM_SA_P Parameter: Tissue Value: Aerial
  misc_feature: MA Experiment 20000478 PARAMETER Experiment Name: Zm_5mM_SA_P Parameter: Treatment Value: 5mM SA vs. No Treatment
  misc_feature: MA Experiment ID: 20000626 Result: Up-regulated in Transcription
  misc_feature: MA Experiment 20000626 PARAMETER Experiment Name: Zm_Herbicide-Treatments_P Parameter: Timepoint (hr) Value: 12
  misc_feature: MA Experiment 20000626 PARAMETER Experiment Name: Zm_Herbicide-Treatments_P Parameter: Tissue Value: Aerial
  misc_feature: MA Experiment 20000626 PARAMETER Experiment Name: Zm_Herbicide-Treatments_P Parameter: Treatment Value: Roundup vs. No Treatment
gcacgagaccattacctagaacatcctaatcgaaaagtttttgtcagtcatgcggccagcttcctccccgctagctcactagccaggcccgggcgcctcaccgccacggtgaccgccgccttctttgacgcctgcggcctgcctaaccccgaagtctctcagtgcgtgtttggccgaaatccacggggagggcttgtcctcgcctttgctgagctgctccggagcggagccgtgcctacttgagttcaggtttgtttcgccatccgaggccaagattcggagcgtcgccgaagggaggcgatgaagggcaaaggcgggccggtggacaggaggtcctccgccagatggaggctgctggtgctctgcgcattcagcttcggcatcggcatgatcttcaccgaccggttctggacagcaccggataccagtagccataccatgtctcaacgctggaggcaagagcaagagctccaacttgtatcagaagattgcaacacaaagaggaagcatggggaagacaaggatataatgggagaggtaaccaagactcatgaagccatacaatcattggataagtccatctcaacgctgcagatggagcttgcagcaaagcggagcacacttgagctactccgatctagtggttcaccagtaacctctgaaactagccaaccaaggaaaaaggcttttgttgtcattggagtcaacactgcattcagcagccgcaagcgccgtgattctgtccgggagacatggatgcctcaaggagaaaagctgcaacaattagaagaacagaagggaatagttatccgcttcactatcgggcacagtgctacatccaacagtatactggacaaagctatagattcagaggacgctcagcatcatgactttcttaggctggaccatgttgagggatatcatgaactctcagctaagacaaaaatattcttctctactgctgttggcatctgggacgctgacttctacgtcaaggtcgatgatgatgtgcatgtaaacctaggaatgcttgccactacccttgctcggcataaatcgaaaccaagaacttatattggctgcatgaagtcaggcccagttcttgctgacaagaatgtgaagtaccatgaacctgagtactggaaatttggggaggaaggaaataagtacttccgtcatgctacagggcagatatatgccatttcgaaagatctggcgacttatatctcaatcaatcggcctatcttgcacaaatacgcaaacgaagacgtgtcgcttggatcgtggttcatcggtttggaagttaatcacatcgatgaaaggaacatgtgctgtggaactccaccagactgtgagtggaaagggcaagctggcaatgtctgcgtagcgtctttcgactggagctgcagtggcatatgcaagtctgttgagaggatcaaagatgtacatgctcgctgcggcgaaggggattcagcagtttggagtgctcttgtctagcacataccctcctttgcccgtaaatatgtagcataattggtaagctttggtggtggtggacaccagcataggcgttaggcaactccccaagtaaacttgacaaaacccagagatcatgatcatgccccgtggaacattgccaatggtaactctggctggaaaaattctgcgtaattttggtctgtcactgttcatgaccttcggacttcggtggtgttaggagctccaaggtagggttgcaactgatgttactgatcttacatgtagggggagagtttctcagctgatgcgagatcatgtaatgcagaggacattgttttatgcaaattttgacattcttttgcgggttc

SEQ ID NO: 15706 - protein, 398 aa, Zea mays subsp. mays
  peptide (1)..(398): Ceres Seq. ID no. 12362208
  misc_feature (143)..(341): Pfam Name: Galactosyltransferase Pfam Description: Galactosyltransferase
  misc_feature (13)..(397): Homolog of NCBI NO: 4138265 NR Description: Avr9 elicitor response protein [Nicotiana tabacum]
  misc_feature (13)..(398): Homolog of NCBI NO: 30699558 NR Description: Avr9 elicitor response protein -related
  misc_feature (13)..(398): Homolog of NCBI NO: 12323294 NR Description: putative (Avr9) elicitor response protein;
  misc_feature (6)..(396): Homolog of NCBI NO: 15220440 NR Description: putative AVR9 elicitor response protein; protein At1g05170.1, supported by cDNA: gi_14488077 [Arabidopsis
  misc_feature (8)..(396): Homolog of NCBI NO: 18395060 NR Description: Expressed protein; protein id: At1g22015.1, by cDNA: 115483. [Arabidopsis thaliana] >gi|25370622|pir||B86353
  misc_feature (1)..(396): Homolog of NCBI NO: 15225684 NR Description: unknown protein; protein id: At2g32430.1
  misc_feature (18)..(391): Homolog of NCBI NO: 15217544 NR Description: elicitor response protein, putative; protein id: [Arabidopsis thaliana] >gi|25370623|pir||A86458 probasble
  misc_feature (13)..(396): Homolog of NCBI NO: 18416895 NR Description: Avr9 elicitor response like protein; protein id:
  misc_feature (13)..(396): Homolog of NCBI NO: 7485336 NR Description: hypothetical protein F10M23.280 - Arabidopsis >gi|4455217|emb|CAB36540.1| Avr9 elicitor response like protein thaliana] >gi|7269547|emb|CAB79549.1| Avr9 elicitor response like
  misc_feature (13)..(394): Homolog of NCBI NO: 15223337 NR Description: Avr9 elicitor response protein, putative; protein At1g32930.1 [Arabidopsis thaliana] >gi|25370618|pir||H86453 avr9
MKGKGGPVDRRSSARWRLLVLCAFSFGIGMIFTDRFWTAPDTSSHTMSQRWRQEQELQLVSEDCNTKRKHGEDKDIMGEVTKTHEAIQSLDKSISTLQMELAAKRSTLELLRSSGSPVTSETSQPRKKAFVVIGVNTAFSSRKRRDSVRETWMPQGEKLQQLEEQKGIVIRFTIGHSATSNSILDKAIDSEDAQHHDFLRLDHVEGYHELSAKTKIFFSTAVGIWDADFYVKVDDDVHVNLGMLATTLARHKSKPRTYIGCMKSGPVLADKNVKYHEPEYWKFGEEGNKYFRHATGQIYAISKDLATYISINRPILHKYANEDVSLGSWFIGLEVNHIDERNMCCGTPPDCEWKGQAGNVCVASFDWSCSGICKSVERIKDVHARCGEGDSAVWSALV

SEQ ID NO: 15707 - protein, 369 aa, Zea mays subsp. mays
  peptide (1)..(369): Ceres Seq. ID no. 12362209
  misc_feature (114)..(312): Pfam Name: Galactosyltransferase Pfam Description: Galactosyltransferase
  misc_feature (1)..(368): Homolog of NCBI NO: 4138265 NR Description: Avr9 elicitor response protein [Nicotiana tabacum]
  misc_feature (1)..(369): Homolog of NCBI NO: 30699558 NR Description: Avr9 elicitor response protein -related
  misc_feature (1)..(369): Homolog of NCBI NO: 12323294 NR Description: putative (Avr9) elicitor response protein;
  misc_feature (1)..(367): Homolog of NCBI NO: 15220440 NR Description: putative AVR9 elicitor response protein; protein At1g05170.1, supported by cDNA: gi_14488077 [Arabidopsis
  misc_feature (1)..(367): Homolog of NCBI NO: 18395060 NR Description: Expressed protein; protein id: At1g22015.1, by cDNA: 115483. [Arabidopsis thaliana] >gi|25370622|pir||B86353
  misc_feature (1)..(367): Homolog of NCBI NO: 15225684 NR Description: unknown protein; protein id: At2g32430.1
  misc_feature (1)..(362): Homolog of NCBI NO: 15217544 NR Description: elicitor response protein, putative; protein id: [Arabidopsis thaliana] >gi|25370623|pir||A86458 probasble
  misc_feature (1)..(367): Homolog of NCBI NO: 18416895 NR Description: Avr9 elicitor response like protein; protein id:
  misc_feature (1)..(367): Homolog of NCBI NO: 7485336 NR Description: hypothetical protein F10M23.280 - Arabidopsis >gi|4455217|emb|CAB36540.1| Avr9 elicitor response like protein thaliana] >gi|7269547|emb|CAB79549.1| Avr9 elicitor response like
  misc_feature (1)..(365): Homolog of NCBI NO: 15223337 NR Description: Avr9 elicitor response protein, putative; protein At1g32930.1 [Arabidopsis thaliana] >gi|25370618|pir||H86453 avr9
MIFTDRFWTAPDTSSHTMSQRWRQEQELQLVSEDCNTKRKHGEDKDIMGEVTKTHEAIQSLDKSISTLQMELAAKRSTLELLRSSGSPVTSETSQPRKKAFVVIGVNTAFSSRKRRDSVRETWMPQGEKLQQLEEQKGIVIRFTIGHSATSNSILDKAIDSEDAQHHDFLRLDHVEGYHELSAKTKIFFSTAVGIWDADFYVKVDDDVHVNLGMLATTLARHKSKPRTYIGCMKSGPVLADKNVKYHEPEYWKFGEEGNKYFRHATGQIYAISKDLATYISINRPILHKYANEDVSLGSWFIGLEVNHIDERNMCCGTPPDCEWKGQAGNVCVASFDWSCSGICKSVERIKDVHARCGEGDSAVWSALV

SEQ ID NO: 15708 - protein, 352 aa, Zea mays subsp. mays
  peptide (1)..(352): Ceres Seq. ID no. 12362210
  misc_feature (97)..(295): Pfam Name: Galactosyltransferase Pfam Description: Galactosyltransferase
  misc_feature (1)..(351): Homolog of NCBI NO: 4138265 NR Description: Avr9 elicitor response protein [Nicotiana tabacum]
  misc_feature (1)..(352): Homolog of NCBI NO: 30699558 NR Description: Avr9 elicitor response protein -related
  misc_feature (1)..(352): Homolog of NCBI NO: 12323294 NR Description: putative (Avr9) elicitor response protein;
  misc_feature (1)..(350): Homolog of NCBI NO: 15220440 NR Description: putative AVR9 elicitor response protein; protein At1g05170.1, supported by cDNA: gi_14488077 [Arabidopsis
  misc_feature (1)..(350): Homolog of NCBI NO: 18395060 NR Description: Expressed protein; protein id: At1g22015.1, by cDNA: 115483. [Arabidopsis thaliana] >gi|25370622|pir||B86353
  misc_feature (1)..(350): Homolog of NCBI NO: 15225684 NR Description: unknown protein; protein id: At2g32430.1
  misc_feature (1)..(345): Homolog of NCBI NO: 15217544 NR Description: elicitor response protein, putative; protein id: [Arabidopsis thaliana] >gi|25370623|pir||A86458 probasble
  misc_feature (1)..(350): Homolog of NCBI NO: 18416895 NR Description: Avr9 elicitor response like protein; protein id:
  misc_feature (1)..(350): Homolog of NCBI NO: 7485336 NR Description: hypothetical protein F10M23.280 - Arabidopsis >gi|4455217|emb|CAB36540.1| Avr9 elicitor response like protein thaliana] >gi|7269547|emb|CAB79549.1| Avr9 elicitor response like
  misc_feature (1)..(348): Homolog of NCBI NO: 15223337 NR Description: Avr9 elicitor response protein, putative; protein At1g32930.1 [Arabidopsis thaliana] >gi|25370618|pir||H86453 avr9
MSQRWRQEQELQLVSEDCNTKRKHGEDKDIMGEVTKTHEAIQSLDKSISTLQMELAAKRSTLELLRSSGSPVTSETSQPRKKAFVVIGVNTAFSSRKRRDSVRETWMPQGEKLQQLEEQKGIVIRFTIGHSATSNSILDKAIDSEDAQHHDFLRLDHVEGYHELSAKTKIFFSTAVGIWDADFYVKVDDDVHVNLGMLATTLARHKSKPRTYIGCMKSGPVLADKNVKYHEPEYWKFGEEGNKYFRHATGQIYAISKDLATYISINRPILHKYANEDVSLGSWFIGLEVNHIDERNMCCGTPPDCEWKGQAGNVCVASFDWSCSGICKSVERIKDVHARCGEGDSAVWSALV

SEQ ID NO: 15709 - DNA, 1368 bp, Zea mays subsp. mays
  misc_feature (1)..(1368): Ceres Seq. ID no. 12407575
  misc_feature: MA Experiment ID: 108529 Result: Up-regulated in Transcription
  misc_feature: MA Experiment 108529 PARAMETER Experiment Name: Zm_Imbibed_Seeds_P Parameter: Age (day) Value: 5 vs. 2
  misc_feature: MA Experiment 108529 PARAMETER Experiment Name: Zm_Imbibed_Seeds_P Parameter: Organism Value: Zea mays
  misc_feature: MA Experiment 108529 PARAMETER Experiment Name: Zm_Imbibed_Seeds_P Parameter: Plant Line Value: 35A19
  misc_feature: MA Experiment 108529 PARAMETER Experiment Name: Zm_Imbibed_Seeds_P Parameter: Tissue Value: Roots vs. Embryo
  misc_feature: MA Experiment ID: 108546 Result: Up-regulated in Transcription
  misc_feature: MA Experiment 108546 PARAMETER Experiment Name: Zm_Imbibed_Seeds_P Parameter: Age (day) Value: 3 vs. 2
  misc_feature: MA Experiment 108546 PARAMETER Experiment Name: Zm_Imbibed_Seeds_P Parameter: Organism Value: Zea mays
  misc_feature: MA Experiment 108546 PARAMETER Experiment Name: Zm_Imbibed_Seeds_P Parameter: Plant Line Value: 35A19
  misc_feature: MA Experiment 108546 PARAMETER Experiment Name: Zm_Imbibed_Seeds_P Parameter: Tissue Value: Roots vs. Embryo
attaacaaagctgcagcttcgaggcctcacctcccgagccgaaagcgattcatagcatcatctattcatccgcgcgtggtgcaatggaggaggctcccacgacgccgccgcggaaggcgaagccgctgatgtcgcgcctcatgcggctttccatcaaggtcgtggacagggtcaccgacgccacccgccgggcagacgggacgctgaatcgttttgcgctctcgctgctggacccgcgtgtcccggccatctcctccccttgccgtggcgtcgcctcccgggacgtcatcctcgacggcgccctccgcctccgcgcgcgcctattccacccggccacgacgtcaaaatccacggcccctctccccgtgatcgtctttttccacggcggcgggttcgcgtacctctccgcggcgtccccggcctacgacgccgcgtgccgccgcatcgcgcggtacgcctccgcggcagtgctctcggtcgactaccgccgcgctcccgagcaccggttcccgggcgccctacgatgacggtatcgcggcgctgcgcttcctcgacgatccaaagaaccaccccaccccgctcgacgtgtcccgcagcttcgtcgcgggcgacagcgctggcggcaacatcgcccaccacgtggcccgccgctacgcgtccgacgtcgcctcgttcaggaacatccgtgtcgccggcctgatcgccatccagcccttcttcggcggcgaggagcggacaccctccgagctccgcctagacggcgccgcgcccatcgtgtccatcgaccgcaccgactggatgtggcgcgcgttcctgccgcccggctgcgaccgtacccacgagggtgccaacttcgcatccccagcagccgccgccggcctcgactcccaggcgttccctcccgtcctgctcgtcatcggtggcttcgacccgctgcaggattggcagcgccggtacggcgagatgctgaagagcatgggcaaggatgtgcgagtggttgagtaccctgacgccatccacgccttctacgtcttccccgggttcgacaacgcgcgagatttcatgatacgcatcgccaagttcgtcgccgaaagcgccagcggcagaagtagcagctagcgagttgtcggagctggagatacagtctgcacactgtgcagtggtcaggtgtttggtgcaagtggcgtgtcgtgcgtcgcaatttgcagccttggctgtggcgttttggaggatgcggcggtatggttgcgtggttgagtgagagaagaagatgtgtctggttgttattgttaactttcgtaaaagtttggtctgataagtctgatgaatgatgtaattttaattaactaatcaagttggtgatttcgt

SEQ ID NO: 15710 - protein, 147 aa, Zea mays subsp. mays
  peptide (1)..(147): Ceres Seq. ID no. 12407576
  misc_feature (80)..(138): Pfam Name: Carboxylesterase Pfam Description: Carboxylesterase
  misc_feature (10)..(145): Homolog of NCBI NO: 34904770 NR Description: similar to carboxylesterase [Oryza sativa
  misc_feature (1)..(145): Homolog of NCBI NO: 34393714 NR Description: putative esterase [Oryza sativa (japonica
  misc_feature (1)..(145): Homolog of NCBI NO: 34904774 NR Description: similar to carboxylesterase [Oryza sativa
  misc_feature (20)..(145): Homolog of NCBI NO: 34904772 NR Description: similar to carboxylesterase [Oryza sativa
  misc_feature (21)..(143): Homolog of NCBI NO: 15237783 NR Description: putative protein; protein id: At5g23530.1, by cDNA: 9482. [Arabidopsis thaliana] >gi|8809707|dbj|BAA97248.1| similarity to unknown protein~gb|AAF27018.1~gene_id:MQM1.21
  misc_feature (21)..(143): Homolog of NCBI NO: 21618039 NR Description: unknown [Arabidopsis thaliana]
  misc_feature (36)..(145): Homolog of NCBI NO: 34904758 NR Description: hypothetical protein~predicted by GeneMark.hmm
  misc_feature (35)..(145): Homolog of NCBI NO: 15240483 NR Description: putative protein; protein id: At5g27320.1, by cDNA: gi_15451145 [Arabidopsis thaliana] Unknown protein [Arabidopsis thaliana]
  misc_feature (1)..(145): Homolog of NCBI NO: 15229905 NR Description: unknown protein; protein id: At3g05120.1 thaliana] >gi|6729022|gb|AAF27018.1|AC009177_8 unknown protein thaliana] >gi|22530934|gb|AAM96971.1| unknown protein
  misc_feature (10)..(145): Homolog of NCBI NO: 15229371 NR Description: putative protein; protein id: At3g63010.1
MEEAPTTPPRKAKPLMSRLMRLSIKVVDRVTDATRRADGTLNRFALSLLDPRVPAISSPCRGVASRDVILDGALRLRARLFHPATTSKSTAPLPVIVFFHGGGFAYLSAASPAYDAACRRIARYASAAVLSVDYRRAPEHRFPGALR

SEQ ID NO: 15711 - protein, 132 aa, Zea mays subsp. mays
  peptide (1)..(132): Ceres Seq. ID no. 12407577
  misc_feature (65)..(123): Pfam Name: Carboxylesterase Pfam Description: Carboxylesterase
  misc_feature (1)..(130): Homolog of NCBI NO: 34904770 NR Description: similar to carboxylesterase [Oryza sativa
  misc_feature (1)..(130): Homolog of NCBI NO: 34393714 NR Description: putative esterase [Oryza sativa (japonica
  misc_feature (1)..(130): Homolog of NCBI NO: 34904774 NR Description: similar to carboxylesterase [Oryza sativa
  misc_feature (5)..(130): Homolog of NCBI NO: 34904772 NR Description: similar to carboxylesterase [Oryza sativa
  misc_feature (6)..(128): Homolog of NCBI NO: 15237783 NR Description: putative protein; protein id: At5g23530.1, by cDNA: 9482. [Arabidopsis thaliana] >gi|8809707|dbj|BAA97248.1| similarity to unknown protein~gb|AAF27018.1~gene_id:MQM1.21
  misc_feature (6)..(128): Homolog of NCBI NO: 21618039 NR Description: unknown [Arabidopsis thaliana]
  misc_feature (21)..(130): Homolog of NCBI NO: 34904758 NR Description: hypothetical protein~predicted by GeneMark.hmm
  misc_feature (20)..(130): Homolog of NCBI NO: 15240483 NR Description: putative protein; protein id: At5g27320.1, by cDNA: gi_15451145 [Arabidopsis thaliana] Unknown protein [Arabidopsis thaliana]
  misc_feature (1)..(130): Homolog of NCBI NO: 15229905 NR Description: unknown protein; protein id: At3g05120.1 thaliana] >gi|6729022|gb|AAF27018.1|AC009177_8 unknown protein thaliana] >gi|22530934|gb|AAM96971.1| unknown protein
  misc_feature (1)..(130): Homolog of NCBI NO: 15229371 NR Description: putative protein; protein id: At3g63010.1
MSRLMRLSIKVVDRVTDATRRADGTLNRFALSLLDPRVPAISSPCRGVASRDVILDGALRLRARLFHPATTSKSTAPLPVIVFFHGGGFAYLSAASPAYDAACRRIARYASAAVLSVDYRRAPEHRFPGALR

SEQ ID NO: 15712 - protein, 128 aa, Zea mays subsp. mays
  peptide (1)..(128): Ceres Seq. ID no. 12407578
  misc_feature (61)..(119): Pfam Name: Carboxylesterase Pfam Description: Carboxylesterase
  misc_feature (1)..(126): Homolog of NCBI NO: 34904770 NR Description: similar to carboxylesterase [Oryza sativa
  misc_feature (1)..(126): Homolog of NCBI NO: 34393714 NR Description: putative esterase [Oryza sativa (japonica
  misc_feature (1)..(126): Homolog of NCBI NO: 34904774 NR Description: similar to carboxylesterase [Oryza sativa
  misc_feature (1)..(126): Homolog of NCBI NO: 34904772 NR Description: similar to carboxylesterase [Oryza sativa
  misc_feature (2)..(124): Homolog of NCBI NO: 15237783 NR Description: putative protein; protein id: At5g23530.1, by cDNA: 9482. [Arabidopsis thaliana] >gi|8809707|dbj|BAA97248.1| similarity to unknown protein~gb|AAF27018.1~gene_id:MQM1.21
  misc_feature (2)..(124): Homolog of NCBI NO: 21618039 NR Description: unknown [Arabidopsis thaliana]
  misc_feature (17)..(126): Homolog of NCBI NO: 34904758 NR Description: hypothetical protein~predicted by GeneMark.hmm
  misc_feature (16)..(126): Homolog of NCBI NO: 15240483 NR Description: putative protein; protein id: At5g27320.1, by cDNA: gi_15451145 [Arabidopsis thaliana] Unknown protein [Arabidopsis thaliana]
  misc_feature (1)..(126): Homolog of NCBI NO: 15229905 NR Description: unknown protein; protein id: At3g05120.1 thaliana] >gi|6729022|gb|AAF27018.1|AC009177_8 unknown protein thaliana] >gi|22530934|gb|AAM96971.1| unknown protein
  misc_feature (1)..(126): Homolog of NCBI NO: 15229371 NR Description: putative protein; protein id: At3g63010.1
MRLSIKVVDRVTDATRRADGTLNRFALSLLDPRVPAISSPCRGVASRDVILDGALRLRARLFHPATTSKSTAPLPVIVFFHGGGFAYLSAASPAYDAACRRIARYASAAVLSVDYRRAPEHRFPGALR

SEQ ID NO: 15713 - DNA, 1171 bp, Zea mays subsp. mays
  misc_feature (1)..(1171): Ceres Seq. ID no. 12404842
  misc_feature: MA Experiment ID: 108534 Result: Up-regulated in Transcription
  misc_feature: MA Experiment 108534 PARAMETER Experiment Name: Zm_4deg_Cold_P Parameter: Age (hr) Value: 8
  misc_feature: MA Experiment 108534 PARAMETER Experiment Name: Zm_4deg_Cold_P Parameter: Organism Value: Zea mays
  misc_feature: MA Experiment 108534 PARAMETER Experiment Name: Zm_4deg_Cold_P Parameter: Plant Line Value: 35A19
  misc_feature: MA Experiment 108534 PARAMETER Experiment Name: Zm_4deg_Cold_P Parameter: Temperature (deg C) Value: 4 vs. 22
  misc_feature: MA Experiment 108534 PARAMETER Experiment Name: Zm_4deg_Cold_P Parameter: Timepoint (hr) Value: 6
  misc_feature: MA Experiment 108534 PARAMETER Experiment Name: Zm_4deg_Cold_P Parameter: Tissue Value: Aerial
  misc_feature: MA Experiment ID: 20000535 Result: Down-regulated in Transcription
  misc_feature: MA Experiment 20000535 PARAMETER Experiment Name: Zm_Hybrid_Seed_Dev_P Parameter: DAP Value: 30 vs. 12
  misc_feature: MA Experiment 20000535 PARAMETER Experiment Name: Zm_Hybrid_Seed_Dev_P Parameter: Organism Value: Zea mays
  misc_feature: MA Experiment 20000535 PARAMETER Experiment Name: Zm_Hybrid_Seed_Dev_P Parameter: Plant Line Value: 35A19
  misc_feature: MA Experiment 20000535 PARAMETER Experiment Name: Zm_Hybrid_Seed_Dev_P Parameter: Tissue Value: Embryo vs. Unfert Floret
  misc_feature: MA Experiment ID: 20000633 Result: Up-regulated in Transcription
  misc_feature: MA Experiment 20000633 PARAMETER Experiment Name: Zm_Herbicide-Treatments_P Parameter: Timepoint (hr) Value: 4
  misc_feature: MA Experiment 20000633 PARAMETER Experiment Name: Zm_Herbicide-Treatments_P Parameter: Tissue Value: Aerial
  misc_feature: MA Experiment 20000633 PARAMETER Experiment Name: Zm_Herbicide-Treatments_P Parameter: Treatment Value: Trimec vs. No Treatment
accaacgccaccaaaaccaacactccgatggatgttttcaccaagcaactcctccccatgcctcaccagcgggaccccaactacccttcctcttccacctcttcctcctcgtcgtcgtcctcctccacgcccccatctcgccctcaccaccgtgcgcaaccccagccccacaacctcccccagtcccccagacccgtcccgcgcaccatcgacaccaccccgttccccaccaccttcgtccaggccgacaccacctcgttcaagcaggtcgtccagatgctcaccggcgccgagcagccggccaacaacgacgcgacgacggcgggcgcagccgctgccgctgccgccaacggcggtggcgccggcgcccaggcggccagcggtggaccgtgctgccggcccaagaagccgtcgttcaagctgtacgagcggcggagcagcctgaagaacctgaagatgatcgcgccgctggcgatgggctcgccgccgtcgccgtcgccgcggagggcggcgccggagatcctgtcgccgagcgtgctggacttcccgtccctcacgctcagcccggtgacgccgctcgccggcgacccctttaaccgctcgccggcgtcggcgtcgtcctccgaggaggccgagcgcgcggccatcgccgagaggggcttcttcctccacccgtccccgaggggcgccgagcccccgcgcctgctcccgctcttccccgtcgtctcgccccggatggccggcgccgcggcggcgccgtcgtccgagtgaagatcccccgacgcgggcgcgcgcctgctctaccgtagccgccgccgccgccaccaccaccaccatcagtactactactactacaacaaccgtcgccgtcgccgtaccgtccgtccttgtttcgtgaggtgcttgctttgctgttcttcttgatcgacgccgctgtaatttttgcccccttcttgcttttcttggaacgggcgaggaagggagttctctctctctctctctttttttttgcttcgtttcggagcggcgacacgcgagcgatcagcgatctgacgatccaggctcgctcggttcctgatcgctcgcgtcgcgggagcctccggccgggatgaaatgatgggatggatgaattagacagttaataattaatgaagcctaatctgaagatttg

SEQ ID NO: 15714 - protein, 256 aa, Zea mays subsp. mays
  peptide (1)..(256): Ceres Seq. ID no. 12404843
  misc_feature (73)..(103): Pfam Name: VQ motif Pfam Description: VQ motif
  misc_feature (10)..(247): Homolog of NCBI NO: 34909488 NR Description: P0481E12.14 [Oryza sativa (japonica
  misc_feature (1)..(255): Homolog of NCBI NO: 25518323 NR Description: hypothetical protein F3H9.7 [imported] - thaliana >gi|9795609|gb|AAF98427.1|AC021044_6 Unknown protein
  misc_feature (60)..(244): Homolog of NCBI NO: 34903674 NR Description: B1015E06.22 [Oryza sativa (japonica
  misc_feature (7)..(255): Homolog of NCBI NO: 30690315 NR Description: expressed protein [Arabidopsis thaliana]
  misc_feature (7)..(255): Homolog of NCBI NO: 13877535 NR Description: Unknown protein [Arabidopsis thaliana]
  misc_feature (30)..(151): Homolog of NCBI NO: 15238851 NR Description: putative protein; protein id: At5g53830.1, by cDNA: gi_13926341 [Arabidopsis thaliana] gb|AAF34839.1~gene_id:MGN6.22~similar to unknown protein
  misc_feature (163)..(244): Homolog of NCBI NO: 15238851 NR Description: putative protein; protein id: At5g53830.1, by cDNA: gi_13926341 [Arabidopsis thaliana] gb|AAF34839.1~gene_id:MGN6.22~similar to unknown protein
  misc_feature (139)..(255): Homolog of NCBI NO: 21618308 NR Description: unknown [Arabidopsis thaliana]
  misc_feature (33)..(247): Homolog of NCBI NO: 15232547 NR Description: unknown protein; protein id: At3g15300.1 thaliana] >gi|9294257|dbj|BAB02159.1|
  misc_feature (133)..(241): Homolog of NCBI NO: 15226165 NR Description: hypothetical protein; protein id: At2g33780.1
TNATKTNTPMDVFTKQLLPMPHQRDPNYPSSSTSSSSSSSSSTPPSRPHHRAQPQPHNLPQSPRPVPRTIDTTPFPTTFVQADTTSFKQVVQMLTGAEQPANNDATTAGAAAAAAANGGGAGAQAASGGPCCRPKKPSFKLYERRSSLKNLKMIAPLAMGSPPSPSPRRAAPEILSPSVLDFPSLTLSPVTPLAGDPFNRSPASASSSEEAERAAIAERGFFLHPSPRGAEPPRLLPLFPVVSPRMAGAAAAPSSE

SEQ ID NO: 15715 - protein, 247 aa, Zea mays subsp. mays
  peptide (1)..(247): Ceres Seq. ID no. 12404844
  misc_feature (64)..(94): Pfam Name: VQ motif Pfam Description: VQ motif
  misc_feature (1)..(238): Homolog of NCBI NO: 34909488 NR Description: P0481E12.14 [Oryza sativa (japonica
  misc_feature (1)..(246): Homolog of NCBI NO: 25518323 NR Description: hypothetical protein F3H9.7 [imported] - thaliana >gi|9795609|gb|AAF98427.1|AC021044_6 Unknown protein
  misc_feature (51)..(235): Homolog of NCBI NO: 34903674 NR Description: B1015E06.22 [Oryza sativa (japonica
  misc_feature (1)..(246): Homolog of NCBI NO: 30690315 NR Description: expressed protein [Arabidopsis thaliana]
  misc_feature (1)..(246): Homolog of NCBI NO: 13877535 NR Description: Unknown protein [Arabidopsis thaliana]
  misc_feature (21)..(142): Homolog of NCBI NO: 15238851 NR Description: putative protein; protein id: At5g53830.1, by cDNA: gi_13926341 [Arabidopsis thaliana] gb|AAF34839.1~gene_id:MGN6.22~similar to unknown protein
  misc_feature (154)..(235): Homolog of NCBI NO: 15238851 NR Description: putative protein; protein id: At5g53830.1, by cDNA: gi_13926341 [Arabidopsis thaliana] gb|AAF34839.1~gene_id:MGN6.22~similar to unknown protein
  misc_feature (130)..(246): Homolog of NCBI NO: 21618308 NR Description: unknown [Arabidopsis thaliana]
  misc_feature (24)..(238): Homolog of NCBI NO: 15232547 NR Description: unknown protein; protein id: At3g15300.1 thaliana] >gi|9294257|dbj|BAB02159.1|
  misc_feature (124)..(232): Homolog of NCBI NO: 15226165 NR Description: hypothetical protein; protein id: At2g33780.1
MDVFTKQLLPMPHQRDPNYPSSSTSSSSSSSSSTPPSRPHHRAQPQPHNLPQSPRPVPRTIDTTPFPTTFVQADTTSFKQVVQMLTGAEQPANNDATTAGAAAAAAANGGGAGAQAASGGPCCRPKKPSFKLYERRSSLKNLKMIAPLAMGSPPSPSPRRAAPEILSPSVLDFPSLTLSPVTPLAGDPFNRSPASASSSEEAERAAIAERGFFLHPSPRGAEPPRLLPLFPVVSPRMAGAAAAPSSE

SEQ ID NO: 15716 - protein, 237 aa, Zea mays subsp. mays
  peptide (1)..(237): Ceres Seq. ID no. 12404845
  misc_feature (54)..(84): Pfam Name: VQ motif Pfam Description: VQ motif
  misc_feature (144)..(225): Homolog of NCBI NO: 15238851 NR Description: putative protein; protein id: At5g53830.1, by cDNA: gi_13926341 [Arabidopsis thaliana] gb|AAF34839.1~gene_id:MGN6.22~similar to unknown protein
  misc_feature (120)..(236): Homolog of NCBI NO: 21618308 NR Description: unknown [Arabidopsis thaliana]
  misc_feature (1)..(228): Homolog of NCBI NO: 34909488 NR Description: P0481E12.14 [Oryza sativa (japonica
  misc_feature (41)..(225): Homolog of NCBI NO: 34903674 NR Description: B1015E06.22 [Oryza sativa (japonica
  misc_feature (1)..(236): Homolog of NCBI NO: 13877535 NR Description: Unknown protein [Arabidopsis thaliana]
  misc_feature (11)..(132): Homolog of NCBI NO: 15238851 NR Description: putative protein; protein id: At5g53830.1, by cDNA: gi_13926341 [Arabidopsis thaliana] gb|AAF34839.1~gene_id:MGN6.22~similar to unknown protein
  misc_feature (1)..(236): Homolog of NCBI NO: 30690315 NR Description: expressed protein [Arabidopsis thaliana]
  misc_feature (1)..(236): Homolog of NCBI NO: 25518323 NR Description: hypothetical protein F3H9.7 [imported] - thaliana >gi|9795609|gb|AAF98427.1|AC021044_6 Unknown protein
  misc_feature (14)..(228): Homolog of NCBI NO: 15232547 NR Description: unknown protein; protein id: At3g15300.1 thaliana] >gi|9294257|dbj|BAB02159.1|
  misc_feature (114)..(222): Homolog of NCBI NO: 15226165 NR Description: hypothetical protein; protein id: At2g33780.1
MPHQRDPNYPSSSTSSSSSSSSSTPPSRPHHRAQPQPHNLPQSPRPVPRTIDTTPFPTTFVQADTTSFKQVVQMLTGAEQPANNDATTAGAAAAAAANGGGAGAQAASGGPCCRPKKPSFKLYERRSSLKNLKMIAPLAMGSPPSPSPRRAAPEILSPSVLDFPSLTLSPVTPLAGDPFNRSPASASSSEEAERAAIAERGFFLHPSPRGAEPPRLLPLFPVVSPRMAGAAAAPSSE

SEQ ID NO: 15717 - DNA, 1415 bp, Zea mays subsp. mays; identical to SEQ ID NO: 8064
  misc_feature (1)..(1415): Ceres Seq. ID no. 12406615
  misc_feature: MA Experiment ID: 108504 Result: Down-regulated in Transcription
  misc_feature: MA Experiment 108504 PARAMETER Experiment Name: Zm_Drought_P Parameter: Age (day) Value: 8
  misc_feature: MA Experiment 108504 PARAMETER Experiment Name: Zm_Drought_P Parameter: Organism Value: Zea mays
  misc_feature: MA Experiment 108504 PARAMETER Experiment Name: Zm_Drought_P Parameter: Plant Line Value: 35A19
  misc_feature: MA Experiment 108504 PARAMETER Experiment Name: Zm_Drought_P Parameter: Timepoint (hr) Value: 12
  misc_feature: MA Experiment 108504 PARAMETER Experiment Name: Zm_Drought_P Parameter: Tissue Value: Aerial
  misc_feature: MA Experiment 108504 PARAMETER Experiment Name: Zm_Drought_P Parameter: Treatment Value: Drought vs. No Drought
  misc_feature: MA Experiment ID: 108515 Result: Up-regulated in Transcription
  misc_feature: MA Experiment 108515 PARAMETER Experiment Name: Zm_2mM_SA_P Parameter: Age (day) Value: 8
  misc_feature: MA Experiment 108515 PARAMETER Experiment Name: Zm_2mM_SA_P Parameter: Organism Value: Zea mays
  misc_feature: MA Experiment 108515 PARAMETER Experiment Name: Zm_2mM_SA_P Parameter: Plant Line Value: 35A19
  misc_feature: MA Experiment 108515 PARAMETER Experiment Name: Zm_2mM_SA_P Parameter: Timepoint (hr) Value: 12
  misc_feature: MA Experiment 108515 PARAMETER Experiment Name: Zm_2mM_SA_P Parameter: Tissue Value: Aerial
  misc_feature: MA Experiment 108515 PARAMETER Experiment Name: Zm_2mM_SA_P Parameter: Treatment Value: 2mM SA vs. No Treatment
  misc_feature: MA Experiment ID: 108527 Result: Up-regulated in Transcription
  misc_feature: MA Experiment 108527 PARAMETER Experiment Name: Zm_5mM_NO_P Parameter: Age (day) Value: 8
  misc_feature: MA Experiment 108527 PARAMETER Experiment Name: Zm_5mM_NO_P Parameter: Organism Value: Zea mays
  misc_feature: MA Experiment 108527 PARAMETER Experiment Name: Zm_5mM_NO_P Parameter: Plant Line Value: 35A19
  misc_feature: MA Experiment 108527 PARAMETER Experiment Name: Zm_5mM_NO_P Parameter: Timepoint (hr) Value: 6
  misc_feature: MA Experiment 108527 PARAMETER Experiment Name: Zm_5mM_NO_P Parameter: Tissue Value: Aerial
  misc_feature: MA Experiment 108527 PARAMETER Experiment Name: Zm_5mM_NO_P Parameter: Treatment Value: 5mM NO vs. No Treatment
  misc_feature: MA Experiment ID: 108528 Result: Down-regulated in Transcription
  misc_feature: MA Experiment 108528 PARAMETER Experiment Name: Zm_Imbibed_Seeds_P Parameter: Age (day) Value: 5 vs. 2
  misc_feature: MA Experiment 108528 PARAMETER Experiment Name: Zm_Imbibed_Seeds_P Parameter: Organism Value: Zea mays
  misc_feature: MA Experiment 108528 PARAMETER Experiment Name: Zm_Imbibed_Seeds_P Parameter: Plant Line Value: 35A19
  misc_feature: MA Experiment 108528 PARAMETER Experiment Name: Zm_Imbibed_Seeds_P Parameter: Tissue Value: Aerial vs. Embryo
  misc_feature: MA Experiment ID: 108529 Result: Down-regulated in Transcription
  misc_feature: MA Experiment 108529 PARAMETER Experiment Name: Zm_Imbibed_Seeds_P Parameter: Age (day) Value: 5 vs. 2
  misc_feature: MA Experiment 108529 PARAMETER Experiment Name: Zm_Imbibed_Seeds_P Parameter: Organism Value: Zea mays
  misc_feature: MA Experiment 108529 PARAMETER Experiment Name: Zm_Imbibed_Seeds_P Parameter: Plant Line Value: 35A19
  misc_feature: MA Experiment 108529 PARAMETER Experiment Name: Zm_Imbibed_Seeds_P Parameter: Tissue Value: Roots vs. Embryo
  misc_feature: MA Experiment ID: 108530 Result: Down-regulated in Transcription
  misc_feature: MA Experiment 108530 PARAMETER Experiment Name: Zm_Imbibed_Seeds_P Parameter: Age (day) Value: 6 vs. 2
  misc_feature: MA Experiment 108530 PARAMETER Experiment Name: Zm_Imbibed_Seeds_P Parameter: Organism Value: Zea mays
  misc_feature: MA Experiment 108530 PARAMETER Experiment Name: Zm_Imbibed_Seeds_P Parameter: Plant Line Value: 35A19
  misc_feature: MA Experiment 108530 PARAMETER Experiment Name: Zm_Imbibed_Seeds_P Parameter: Tissue Value: Aerial vs. Embryo
  misc_feature: MA Experiment ID: 108535 Result: Up-regulated in Transcription
  misc_feature: MA Experiment 108535 PARAMETER Experiment Name: Zm_Meristem_P Parameter: Age (day) Value: 8
  misc_feature: MA Experiment 108535 PARAMETER Experiment Name: Zm_Meristem_P Parameter: Organism Value: Zea mays
  misc_feature: MA Experiment 108535 PARAMETER Experiment Name: Zm_Meristem_P Parameter: Plant Line Value: 35A19
  misc_feature: MA Experiment 108535 PARAMETER Experiment Name: Zm_Meristem_P Parameter: Tissue Value: Root Meristem vs. Above Root Meristem
  misc_feature: MA Experiment ID: 108540 Result: Down-regulated in Transcription
  misc_feature: MA Experiment 108540 PARAMETER Experiment Name: Zm_20percent_PEG_P Parameter: Age (day) Value: 8
  misc_feature: MA Experiment 108540 PARAMETER Experiment Name: Zm_20percent_PEG_P Parameter: Organism Value: Zea mays
  misc_feature: MA Experiment 108540 PARAMETER Experiment Name: Zm_20percent_PEG_P Parameter: Plant Line Value: 35A19
  misc_feature: MA Experiment 108540 PARAMETER Experiment Name: Zm_20percent_PEG_P Parameter: Timepoint (hr) Value: 6
  misc_feature: MA Experiment 108540 PARAMETER Experiment Name: Zm_20percent_PEG_P Parameter: Tissue Value: Aerial
  misc_feature: MA Experiment 108540 PARAMETER Experiment Name: Zm_20percent_PEG_P Parameter: Treatment Value: 20percent PEG vs. No Treatment
  misc_feature: MA Experiment ID: 108544 Result: Down-regulated in Transcription
  misc_feature: MA Experiment ID: 108559 Result: Up-regulated in Transcription
  misc_feature: MA Experiment 108559 PARAMETER Experiment Name: Zm_5mM_NO_P Parameter: Age (day) Value: 8
  misc_feature: MA Experiment 108559 PARAMETER Experiment Name: Zm_5mM_NO_P Parameter: Organism Value: Zea mays
  misc_feature: MA Experiment 108559 PARAMETER Experiment Name: Zm_5mM_NO_P Parameter: Plant Line Value: 35A19
  misc_feature: MA Experiment 108559 PARAMETER Experiment Name: Zm_5mM_NO_P Parameter: Timepoint (hr) Value: 12
  misc_feature: MA Experiment 108559 PARAMETER Experiment Name: Zm_5mM_NO_P Parameter: Tissue Value: Aerial
  misc_feature: MA Experiment 108559 PARAMETER Experiment Name: Zm_5mM_NO_P Parameter: Treatment Value: 5mM NO vs. No Treatment
  misc_feature: MA Experiment ID: 108597 Result: Down-regulated in Transcription
  misc_feature: MA Experiment 108597 PARAMETER Experiment Name: Zm_100uM_ABA_P Parameter: Age (day) Value: 9
  misc_feature: MA Experiment 108597 PARAMETER Experiment Name: Zm_100uM_ABA_P Parameter: Organism Value: Zea mays
  misc_feature: MA Experiment 108597 PARAMETER Experiment Name: Zm_100uM_ABA_P Parameter: Plant Line Value: 35A19
  misc_feature: MA Experiment 108597 PARAMETER Experiment Name: Zm_100uM_ABA_P Parameter: Timepoint (hr) Value: 24
  misc_feature: MA Experiment 108597 PARAMETER Experiment Name: Zm_100uM_ABA_P Parameter: Tissue Value: Aerial
  misc_feature: MA Experiment 108597 PARAMETER Experiment Name: Zm_100uM_ABA_P Parameter: Treatment Value: 100uM ABA vs. No Treatment
  misc_feature: MA Experiment ID: 108599 Result: Up-regulated in Transcription
  misc_feature: MA Experiment 108599 PARAMETER Experiment Name: Zm_RT1_P Parameter: Age (day) Value: 11
  misc_feature: MA Experiment 108599 PARAMETER Experiment Name: Zm_RT1_P Parameter: Organism Value: Zea mays
  misc_feature: MA Experiment 108599 PARAMETER Experiment Name: Zm_RT1_P Parameter: Plant Line Value: rt1 mut vs. rt1 wt
  misc_feature: MA Experiment 108599 PARAMETER Experiment Name: Zm_RT1_P Parameter: Tissue Value: Roots
  misc_feature: MA Experiment ID: 20000108 Result: Up-regulated in Transcription
  misc_feature: MA Experiment 20000108 PARAMETER Experiment Name: Zm_Root-Tips_P Parameter: Age (day) Value: 12
  misc_feature: MA Experiment 20000108 PARAMETER Experiment Name: Zm_Root-Tips_P Parameter: Organism Value: Zea mays
  misc_feature: MA Experiment 20000108 PARAMETER Experiment Name: Zm_Root-Tips_P Parameter: Tissue Value: Root tips vs. Root mid region    35
  misc_feature: MA Experiment 20000108 PARAMETER Experiment Name: Zm_Root-Tips_P Parameter: Tissue Value: Root tips vs. Root mid region   Sequence Listing-Misc Features (4)
  misc_feature: MA Experiment ID: 20000478 Result: Down-regulated in Transcription
  misc_feature: MA Experiment 20000478 PARAMETER Experiment Name: Zm_5mM_SA_P Parameter: Age (day) Value: 11
  misc_feature: MA Experiment 20000478 PARAMETER Experiment Name: Zm_5mM_SA_P Parameter: Organism Value: Zea mays
  misc_feature: MA Experiment 20000478 PARAMETER Experiment Name: Zm_5mM_SA_P Parameter: Plant Line Value: 35A19
  misc_feature: MA Experiment 20000478 PARAMETER Experiment Name: Zm_5mM_SA_P Parameter: Timepoint (hr) Value: 72
  misc_feature: MA Experiment 20000478 PARAMETER Experiment Name: Zm_5mM_SA_P Parameter: Tissue Value: Aerial
  misc_feature: MA Experiment 20000478 PARAMETER Experiment Name: Zm_5mM_SA_P Parameter: Treatment Value: 5mM SA vs. No Treatment
  misc_feature: MA Experiment ID: 20000480 Result: Down-regulated in Transcription
  misc_feature: MA Experiment 20000480 PARAMETER Experiment Name: Zm_Drought_P Parameter: Age (day) Value: 11
  misc_feature: MA Experiment 20000480 PARAMETER Experiment Name: Zm_Drought_P Parameter: Organism Value: Zea mays
  misc_feature: MA Experiment 20000480 PARAMETER Experiment Name: Zm_Drought_P Parameter: Plant Line Value: 35A19
  misc_feature: MA Experiment 20000480 PARAMETER Experiment Name: Zm_Drought_P Parameter: Timepoint (hr) Value: 72
  misc_feature: MA Experiment 20000480 PARAMETER Experiment Name: Zm_Drought_P Parameter: Tissue Value: Aerial
  misc_feature: MA Experiment 20000480 PARAMETER Experiment Name: Zm_Drought_P Parameter: Treatment Value: Drought vs. No Drought
  misc_feature: MA Experiment ID: 20000532 Result: Up-regulated in Transcription
  misc_feature: MA Experiment 20000532 PARAMETER Experiment Name: Zm_0.001percent_MeJA_P Parameter: Age (day) Value: 10
  misc_feature: MA Experiment 20000532 PARAMETER Experiment Name: Zm_0.001percent_MeJA_P Parameter: Organism Value: Zea mays
  misc_feature: MA Experiment 20000532 PARAMETER Experiment Name: Zm_0.001percent_MeJA_P Parameter: Plant Line Value: 35A19
  misc_feature: MA Experiment 20000532 PARAMETER Experiment Name: Zm_0.001percent_MeJA_P Parameter: Timepoint (hr) Value: 48
  misc_feature: MA Experiment 20000532 PARAMETER Experiment Name: Zm_0.001percent_MeJA_P Parameter: Tissue Value: Aerial
  misc_feature: MA Experiment 20000532 PARAMETER Experiment Name: Zm_0.001percent_MeJA_P Parameter: Treatment Value: 0.001percent MeJA vs. No Treatment
  misc_feature: MA Experiment ID: 20000533 Result: Up-regulated in Transcription
  misc_feature: MA Experiment 20000533 PARAMETER Experiment Name: Zm_0.001percent_MeJA_P Parameter: Age (day) Value: 11
  misc_feature: MA Experiment 20000533 PARAMETER Experiment Name: Zm_0.001percent_MeJA_P Parameter: Organism Value: Zea mays
  misc_feature: MA Experiment 20000533 PARAMETER Experiment Name: Zm_0.001percent_MeJA_P Parameter: Plant Line Value: 35A19
  misc_feature: MA Experiment 20000533 PARAMETER Experiment Name: Zm_0.001percent_MeJA_P Parameter: Timepoint (hr) Value: 72
  misc_feature: MA Experiment 20000533 PARAMETER Experiment Name: Zm_0.001percent_MeJA_P Parameter: Tissue Value: Aerial
  misc_feature: MA Experiment 20000533 PARAMETER Experiment Name: Zm_0.001percent_MeJA_P Parameter: Treatment Value: 0.001percent MeJA vs. No Treatment
  misc_feature: MA Experiment ID: 20000626 Result: Up-regulated in Transcription
  misc_feature: MA Experiment 20000626 PARAMETER Experiment Name: Zm_Herbicide-Treatments_P Parameter: Timepoint (hr) Value: 12
  misc_feature: MA Experiment 20000626 PARAMETER Experiment Name: Zm_Herbicide-Treatments_P Parameter: Tissue Value: Aerial
  misc_feature: MA Experiment 20000626 PARAMETER Experiment Name: Zm_Herbicide-Treatments_P Parameter: Treatment Value: Roundup vs. No Treatment
  misc_feature: MA Experiment ID: 20000632 Result: Down-regulated in Transcription
  misc_feature: MA Experiment 20000632 PARAMETER Experiment Name: Zm_Herbicide-Treatments_P Parameter: Timepoint (hr) Value: 4
  misc_feature: MA Experiment 20000632 PARAMETER Experiment Name: Zm_Herbicide-Treatments_P Parameter: Tissue Value: Aerial
  misc_feature: MA Experiment 20000632 PARAMETER Experiment Name: Zm_Herbicide-Treatments_P Parameter: Treatment Value: Glean vs. No Treatment
  misc_feature: MA Experiment ID: 20001606 Result: Up-regulated in Transcription
  misc_feature: MA Experiment 20001606 PARAMETER Experiment Name: Zm_50ppm_KNO3_L-to-H_P Parameter: Age (day) Value: 19
  misc_feature: MA Experiment 20001606 PARAMETER Experiment Name: Zm_50ppm_KNO3_L-to-H_P Parameter: Organism Value: Zea mays
  misc_feature: MA Experiment 20001606 PARAMETER Experiment Name: Zm_50ppm_KNO3_L-to-H_P Parameter: Plant Line Value: 35A19
  misc_feature: MA Experiment 20001606 PARAMETER Experiment Name: Zm_50ppm_KNO3_L-to-H_P Parameter: Timepoint (hr) Value: 8
  misc_feature: MA Experiment 20001606 PARAMETER Experiment Name: Zm_50ppm_KNO3_L-to-H_P Parameter: Tissue Value: Shoots
  misc_feature: MA Experiment 20001606 PARAMETER Experiment Name: Zm_50ppm_KNO3_L-to-H_P Parameter: Treatment Value: 50ppm KNO3 vs. 50ppm KCl

SEQ ID NO: 15718 - protein, 336 aa, Zea mays subsp. mays; identical to SEQ ID NO: 8065
  peptide (1)..(336): Ceres Seq. ID no. 12406616
  misc_feature (41)..(197): Pfam Name: Formin Homology 2 Domain Pfam Description: Formin Homology 2 Domain
  misc_feature (41)..(197): Pfam Name: Formin Homology 2 Domain Pfam Description: Formin Homology 2 Domain
  misc_feature (59)..(197): Homolog of NCBI NO: 7446482 NR Description: probable cell wall-plasma membrane linker protein
  misc_feature (62)..(202): Homolog of NCBI NO: 7446482 NR Description: probable cell wall-plasma membrane linker protein
  misc_feature (28)..(202): Homolog of NCBI NO: 7446483 NR Description: probable cell wall protein - garden pea
  misc_feature (35)..(199): Homolog of NCBI NO: 18396941 NR Description: expressed protein; protein id: At2g10940.1, by cDNA: 32647., supported by cDNA: gi_17473864 [Arabidopsis >gi|25411373|pir||G84494 hypothetical protein At2g10940
  misc_feature (62)..(202): Homolog of NCBI NO: 7446482 NR Description: probable cell wall-plasma membrane linker protein
  misc_feature (58)..(202): Homolog of NCBI NO: 1076501 NR Description: cell wall protein - alfalfa
  misc_feature (58)..(197): Homolog of NCBI NO: 7446482 NR Description: probable cell wall-plasma membrane linker protein
  misc_feature (56)..(202): Homolog of NCBI NO: 1076501 NR Description: cell wall protein - alfalfa
  misc_feature (62)..(202): Homolog of NCBI NO: 7446482 NR Description: probable cell wall-plasma membrane linker protein
  misc_feature (35)..(199): Homolog of NCBI NO: 18396941 NR Description: expressed protein; protein id: At2g10940.1, by cDNA: 32647., supported by cDNA: gi_17473864 [Arabidopsis >gi|25411373|pir||G84494 hypothetical protein At2g10940
  misc_feature (28)..(202): Homolog of NCBI NO: 7446483 NR Description: probable cell wall protein - garden pea
  misc_feature (62)..(202): Homolog of NCBI NO: 7446482 NR Description: probable cell wall-plasma membrane linker protein
  misc_feature (59)..(197): Homolog of NCBI NO: 7446482 NR Description: probable cell wall-plasma membrane linker protein
  misc_feature (58)..(202): Homolog of NCBI NO: 11994732 NR Description: contains similarity to cell wall-plasma membrane
  misc_feature (58)..(202): Homolog of NCBI NO: 15233282 NR Description: unknown protein; protein id: At3g22120.1
  misc_feature (58)..(202): Homolog of NCBI NO: 1076501 NR Description: cell wall protein - alfalfa
  misc_feature (58)..(197): Homolog of NCBI NO: 7446482 NR Description: probable cell wall-plasma membrane linker protein
  misc_feature (56)..(202): Homolog of NCBI NO: 1076501 NR Description: cell wall protein - alfalfa
  misc_feature (58)..(202): Homolog of NCBI NO: 11994732 NR Description: contains similarity to cell wall-plasma membrane
  misc_feature (58)..(202): Homolog of NCBI NO: 15233282 NR Description: unknown protein; protein id: At3g22120.1

SEQ ID NO: 15719 - protein, 320 aa, Zea mays subsp. mays; identical to SEQ ID NO: 8066
  peptide (1)..(320): Ceres Seq. ID no. 12406617
  misc_feature (25)..(181): Pfam Name: Formin Homology 2 Domain Pfam Description: Formin Homology 2 Domain
  misc_feature (25)..(181): Pfam Name: Formin Homology 2 Domain Pfam Description: Formin Homology 2 Domain
  misc_feature (43)..(181): Homolog of NCBI NO: 7446482 NR Description: probable cell wall-plasma membrane linker protein
  misc_feature (46)..(186): Homolog of NCBI NO: 7446482 NR Description: probable cell wall-plasma membrane linker protein
  misc_feature (12)..(186): Homolog of NCBI NO: 7446483 NR Description: probable cell wall protein - garden pea
  misc_feature (19)..(183): Homolog of NCBI NO: 18396941 NR Description: expressed protein; protein id: At2g10940.1, by cDNA: 32647., supported by cDNA: gi_17473864 [Arabidopsis >gi|25411373|pir||G84494 hypothetical protein At2g10940
  misc_feature (46)..(186): Homolog of NCBI NO: 7446482 NR Description: probable cell wall-plasma membrane linker protein
  misc_feature (46)..(186): Homolog of NCBI NO: 7446482 NR Description: probable cell wall-plasma membrane linker protein
  misc_feature (19)..(183): Homolog of NCBI NO: 18396941 NR Description: expressed protein; protein id: At2g10940.1, by cDNA: 32647., supported by cDNA: gi_17473864 [Arabidopsis >gi|25411373|pir||G84494 hypothetical protein At2g10940
  misc_feature (42)..(186): Homolog of NCBI NO: 15233282 NR Description: unknown protein; protein id: At3g22120.1
  misc_feature (42)..(186): Homolog of NCBI NO: 11994732 NR Description: contains similarity to cell wall-plasma membrane
  misc_feature (40)..(186): Homolog of NCBI NO: 1076501 NR Description: cell wall protein - alfalfa
  misc_feature (42)..(181): Homolog of NCBI NO: 7446482 NR Description: probable cell wall-plasma membrane linker protein
  misc_feature (42)..(186): Homolog of NCBI NO: 1076501 NR Description: cell wall protein - alfalfa
  misc_feature (46)..(186): Homolog of NCBI NO: 7446482 NR Description: probable cell wall-plasma membrane linker protein
  misc_feature (12)..(186): Homolog of NCBI NO: 7446483 NR Description: probable cell wall protein - garden pea
  misc_feature (43)..(181): Homolog of NCBI NO: 7446482 NR Description: probable cell wall-plasma membrane linker protein
  misc_feature (42)..(186): Homolog of NCBI NO: 1076501 NR Description: cell wall protein - alfalfa
  misc_feature (42)..(181): Homolog of NCBI NO: 7446482 NR Description: probable cell wall-plasma membrane linker protein
  misc_feature (40)..(186): Homolog of NCBI NO: 1076501 NR Description: cell wall protein - alfalfa
  misc_feature (42)..(186): Homolog of NCBI NO: 11994732 NR Description: contains similarity to cell wall-plasma membrane
  misc_feature (42)..(186): Homolog of NCBI NO: 15233282 NR Description: unknown protein; protein id: At3g22120.1

SEQ ID NO: 15720 - protein, 208 aa, Zea mays subsp. mays; identical to SEQ ID NO: 8067
  peptide (1)..(208): Ceres Seq. ID no. 12406618

SEQ ID NO: 15721 - DNA, 1076 bp, Zea mays subsp. mays
  misc_feature (1)..(1076): Ceres Seq. ID no. 12407567
  misc_feature: MA Experiment ID: 108535 Result: Up-regulated in Transcription
  misc_feature: MA Experiment 108535 PARAMETER Experiment Name: Zm_Meristem_P Parameter: Age (day) Value: 8
  misc_feature: MA Experiment 108535 PARAMETER Experiment Name: Zm_Meristem_P Parameter: Organism Value: Zea mays
  misc_feature: MA Experiment 108535 PARAMETER Experiment Name: Zm_Meristem_P Parameter: Plant Line Value: 35A19
  misc_feature: MA Experiment 108535 PARAMETER Experiment Name: Zm_Meristem_P Parameter: Tissue Value: Root Meristem vs. Above Root Meristem
  misc_feature: MA Experiment ID: 108544 Result: Down-regulated in Transcription
  misc_feature: MA Experiment ID: 108545 Result: Up-regulated in Transcription
  misc_feature: MA Experiment 108545 PARAMETER Experiment Name: Zm_Imbibed_Seeds_P Parameter: Age (day) Value: 3 vs. 2
  misc_feature: MA Experiment 108545 PARAMETER Experiment Name: Zm_Imbibed_Seeds_P Parameter: Organism Value: Zea mays
  misc_feature: MA Experiment 108545 PARAMETER Experiment Name: Zm_Imbibed_Seeds_P Parameter: Plant Line Value: 35A19
  misc_feature: MA Experiment 108545 PARAMETER Experiment Name: Zm_Imbibed_Seeds_P Parameter: Tissue Value: Aerial vs. Embryo
  misc_feature: MA Experiment ID: 108547 Result: Up-regulated in Transcription
  misc_feature: MA Experiment 108547 PARAMETER Experiment Name: Zm_Imbibed_Seeds_P Parameter: Age (day) Value: 4 vs. 2
  misc_feature: MA Experiment 108547 PARAMETER Experiment Name: Zm_Imbibed_Seeds_P Parameter: Organism Value: Zea mays
  misc_feature: MA Experiment 108547 PARAMETER Experiment Name: Zm_Imbibed_Seeds_P Parameter: Plant Line Value: 35A19
  misc_feature: MA Experiment 108547 PARAMETER Experiment Name: Zm_Imbibed_Seeds_P Parameter: Tissue Value: Aerial vs. Embryo
  misc_feature: MA Experiment ID: 108556 Result: Down-regulated in Transcription
  misc_feature: MA Experiment 108556 PARAMETER Experiment Name: Zm_Drought_P Parameter: Age (day) Value: 9
  misc_feature: MA Experiment 108556 PARAMETER Experiment Name: Zm_Drought_P Parameter: Organism Value: Zea mays
  misc_feature: MA Experiment 108556 PARAMETER Experiment Name: Zm_Drought_P Parameter: Plant Line Value: 35A19
  misc_feature: MA Experiment 108556 PARAMETER Experiment Name: Zm_Drought_P Parameter: Timepoint (hr) Value: 24
  misc_feature: MA Experiment 108556 PARAMETER Experiment Name: Zm_Drought_P Parameter: Tissue Value: Aerial
  misc_feature: MA Experiment 108556 PARAMETER Experiment Name: Zm_Drought_P Parameter: Treatment Value: Drought vs. No Drought
  misc_feature: MA Experiment ID: 108687 Result: Down-regulated in Transcription
  misc_feature: MA Experiment 108687 PARAMETER Experiment Name: Zm_Embryos-Flowers__P Parameter: Tissue Value: Embryo vs. Aerial+
  misc_feature: MA Experiment ID: 108689 Result: Down-regulated in Transcription
  misc_feature: MA Experiment 108689 PARAMETER Experiment Name: Zm_Drought_Roots_P Parameter: Age (day) Value: 9
  misc_feature: MA Experiment 108689 PARAMETER Experiment Name: Zm_Drought_Roots_P Parameter: Organism Value: Zea mays
  misc_feature: MA Experiment 108689 PARAMETER Experiment Name: Zm_Drought_Roots_P Parameter: Plant Line Value: 35A19
  misc_feature: MA Experiment 108689 PARAMETER Experiment Name: Zm_Drought_Roots_P Parameter: Timepoint (hr) Value: 24
  misc_feature: MA Experiment 108689 PARAMETER Experiment Name: Zm_Drought_Roots_P Parameter: Tissue Value: Roots
  misc_feature: MA Experiment 108689 PARAMETER Experiment Name: Zm_Drought_Roots_P Parameter: Treatment Value: Drought vs. No Drought
  misc_feature: MA Experiment ID: 20000477 Result: Down-regulated in Transcription
  misc_feature: MA Experiment 20000477 PARAMETER Experiment Name: Zm_5mM_SA_P Parameter: Age (day) Value: 10
  misc_feature: MA Experiment 20000477 PARAMETER Experiment Name: Zm_5mM_SA_P Parameter: Organism Value: Zea mays
  misc_feature: MA Experiment 20000477 PARAMETER Experiment Name: Zm_5mM_SA_P Parameter: Plant Line Value: 35A19
  misc_feature: MA Experiment 20000477 PARAMETER Experiment Name: Zm_5mM_SA_P Parameter: Timepoint (hr) Value: 48
  misc_feature: MA Experiment 20000477 PARAMETER Experiment Name: Zm_5mM_SA_P Parameter: Tissue Value: Aerial
  misc_feature: MA Experiment 20000477 PARAMETER Experiment Name: Zm_5mM_SA_P Parameter: Treatment Value: 5mM SA vs. No Treatment
  misc_feature: MA Experiment ID: 20000478 Result: Down-regulated in Transcription
  misc_feature: MA Experiment 20000478 PARAMETER Experiment Name: Zm_5mM_SA_P Parameter: Age (day) Value: 11
  misc_feature: MA Experiment 20000478 PARAMETER Experiment Name: Zm_5mM_SA_P Parameter: Organism Value: Zea mays
  misc_feature: MA Experiment 20000478 PARAMETER Experiment Name: Zm_5mM_SA_P Parameter: Plant Line Value: 35A19
  misc_feature: MA Experiment 20000478 PARAMETER Experiment Name: Zm_5mM_SA_P Parameter: Timepoint (hr) Value: 72
  misc_feature: MA Experiment 20000478 PARAMETER Experiment Name: Zm_5mM_SA_P Parameter: Tissue Value: Aerial
  misc_feature: MA Experiment 20000478 PARAMETER Experiment Name: Zm_5mM_SA_P Parameter: Treatment Value: 5mM SA vs. No Treatment
  misc_feature: MA Experiment ID: 20000479 Result: Down-regulated in Transcription
  misc_feature: MA Experiment 20000479 PARAMETER Experiment Name: Zm_Drought_P Parameter: Age (day) Value: 10
  misc_feature: MA Experiment 20000479 PARAMETER Experiment Name: Zm_Drought_P Parameter: Organism Value: Zea mays
  misc_feature: MA Experiment 20000479 PARAMETER Experiment Name: Zm_Drought_P Parameter: Plant Line Value: 35A19
  misc_feature: MA Experiment 20000479 PARAMETER Experiment Name: Zm_Drought_P Parameter: Timepoint (hr) Value: 48
  misc_feature: MA Experiment 20000479 PARAMETER Experiment Name: Zm_Drought_P Parameter: Tissue Value: Aerial
  misc_feature: MA Experiment 20000479 PARAMETER Experiment Name: Zm_Drought_P Parameter: Treatment Value: Drought vs. No Drought
  misc_feature: MA Experiment ID: 20000480 Result: Down-regulated in Transcription
  misc_feature: MA Experiment 20000480 PARAMETER Experiment Name: Zm_Drought_P Parameter: Age (day) Value: 11
  misc_feature: MA Experiment 20000480 PARAMETER Experiment Name: Zm_Drought_P Parameter: Organism Value: Zea mays
  misc_feature: MA Experiment 20000480 PARAMETER Experiment Name: Zm_Drought_P Parameter: Plant Line Value: 35A19
  misc_feature: MA Experiment 20000480 PARAMETER Experiment Name: Zm_Drought_P Parameter: Timepoint (hr) Value: 72
  misc_feature: MA Experiment 20000480 PARAMETER Experiment Name: Zm_Drought_P Parameter: Tissue Value: Aerial
  misc_feature: MA Experiment 20000480 PARAMETER Experiment Name: Zm_Drought_P Parameter: Treatment Value: Drought vs. No Drought
  misc_feature: MA Experiment ID: 20000488 Result: Down-regulated in Transcription
  misc_feature: MA Experiment 20000488 PARAMETER Experiment Name: Zm_50mM_NH4NO3_L_to_H_P Parameter: Organism Value: Zea mays
  misc_feature: MA Experiment 20000488 PARAMETER Experiment Name: Zm_50mM_NH4NO3_L_to_H_P Parameter: Timepoint (hr) Value: 8
  misc_feature: MA Experiment 20000488 PARAMETER Experiment Name: Zm_50mM_NH4NO3_L_to_H_P Parameter: Tissue Value: Leaves
  misc_feature: MA Experiment 20000488 PARAMETER Experiment Name: Zm_50mM_NH4NO3_L_to_H_P Parameter: Treatment Value: 50mM NH4NO3 vs. 100mM Mannitol
  misc_feature: MA Experiment ID: 20000534 Result: Down-regulated in Transcription
  misc_feature: MA Experiment 20000534 PARAMETER Experiment Name: Zm_Hybrid_Pollen_P Parameter: Age (day) Value: 8
  misc_feature: MA Experiment 20000534 PARAMETER Experiment Name: Zm_Hybrid_Pollen_P Parameter: Organism Value: Zea mays
  misc_feature: MA Experiment 20000534 PARAMETER Experiment Name: Zm_Hybrid_Pollen_P Parameter: Plant Line Value: 35A19
  misc_feature: MA Experiment 20000534 PARAMETER Experiment Name: Zm_Hybrid_Pollen_P Parameter: Tissue Value: Pollen vs. Aerial
  misc_feature: MA Experiment ID: 20000626 Result: Down-regulated in Transcription
  misc_feature: MA Experiment 20000626 PARAMETER Experiment Name: Zm_Herbicide-Treatments_P Parameter: Timepoint (hr) Value: 12
  misc_feature: MA Experiment 20000626 PARAMETER Experiment Name: Zm_Herbicide-Treatments_P Parameter: Tissue Value: Aerial
  misc_feature: MA Experiment 20000626 PARAMETER Experiment Name: Zm_Herbicide-Treatments_P Parameter: Treatment Value: Roundup vs. No Treatment
accttgctttgctcgcactcgcacacagttgcgagcgcattgcttgcattggcgcagccgcaggccgcagcacgaagctagccagtaggcggtagatggcgagcagcgcggggaaccgcttcctgaggcagctgagcgcgagcaacggcgacgaagcggtctgcggcggcctgcagatggaccagcaggagtacggcggcgccggcgtggggaggaggggatcccggcggtggtcgaagaagcgggccgccgccgccgccgccgcgaggggctacggcgccggcagcgggaatggcgtgaagcagccggcctctgccgcggggaagcgggtgatggtggtggtggacgagagctcgggagccaaccacgccatgatgtgggcgctcacccacgtcgccgacaagggggacttcctcacgctgctccacgtcctgccgcgctccggcagcggcaggggcgaggaggcctcctccctcgccaactcgctcggcacgctctgcaaggcctccaggccagaggtggaggtcgaagcgcttgtgatccaagggcccaagctgggcaccgtgctcagccaggtgaagaagctggaggcctccgtgctggtgctcagccagtgcaggccatctccctgctggttaagctgcttcctgcggagcagcggcgaggagtttgtggagcagtgcatcaaccaggcggagtgcctgacgctggcggtgaggaagcagagcaagggcgtctgtgggtacctcatcagcacccggtggcagaagaacttctggctcctggcctgacaaccatgcattttacctagctagttactactgctacatgatcacatttgttttaagtcactcccgtatatgtgctgtcatttcgtgtcatcaagtgcgtcacaagaaagaccatctctctctctccttcatcctgttgtaaagcgaaaagagcctccgaatctgaccacctttctacgaacctgtatcttccctgcaagtctttagcgtgcgtgtagtactgtgatctgcactgaacaatcatgtaatgctgcataaatgaccaattctgttgtaaaaaaaatt

SEQ ID NO: 15722 - protein, 231 aa, Zea mays subsp. mays
  peptide (1)..(231): Ceres Seq. ID no. 12407568
  misc_feature (77)..(208): Pfam Name: Universal stress protein family Pfam Description: Universal stress protein family
  misc_feature (1)..(231): Homolog of NCBI NO: 34907308 NR Description: hypothetical protein~similar to Arabidopsis
  misc_feature (40)..(231): Homolog of NCBI NO: 15219439 NR Description: hypothetical protein; protein id: At1g44760.1, by cDNA: gi_17380775 [Arabidopsis thaliana]
  misc_feature (68)..(231): Homolog of NCBI NO: 15237955 NR Description: putative protein; protein id: At5g17390.1
  misc_feature (80)..(231): Homolog of NCBI NO: 15227695 NR Description: unknown protein; protein id: At2g03720.1
  misc_feature (68)..(231): Homolog of NCBI NO: 15228516 NR Description: hypothetical protein; protein id: At3g03290.1 thaliana] >gi|6714411|gb|AAF26099.1|AC012328_2 hypothetical
  misc_feature (124)..(231): Homolog of NCBI NO: 18409190 NR Description: expressed protein; protein id: At1g69080.1, by cDNA: 22327. [Arabidopsis thaliana]
  misc_feature (124)..(231): Homolog of NCBI NO: 21592322 NR Description: unknown [Arabidopsis thaliana]
MASSAGNRFLRQLSASNGDEAVCGGLQMDQQEYGGAGVGRRGSRRWSKKRAAAAAAARGYGAGSGNGVKQPASAAGKRVMVVVDESSGANHAMMWALTHVADKGDFLTLLHVLPRSGSGRGEEASSLANSLGTLCKASRPEVEVEALVIQGPKLGTVLSQVKKLEASVLVLSQCRPSPCWLSCFLRSSGEEFVEQCINQAECLTLAVRKQSKGVCGYLISTRWQKNFWLLA

SEQ ID NO: 15723 - protein, 204 aa, Zea mays subsp. mays
  peptide (1)..(204): Ceres Seq. ID no. 12407569
  misc_feature (50)..(181): Pfam Name: Universal stress protein family Pfam Description: Universal stress protein family
  misc_feature (1)..(204): Homolog of NCBI NO: 34907308 NR Description: hypothetical protein~similar to Arabidopsis
  misc_feature (13)..(204): Homolog of NCBI NO: 15219439 NR Description: hypothetical protein; protein id: At1g44760.1, by cDNA: gi_17380775 [Arabidopsis thaliana]
  misc_feature (41)..(204): Homolog of NCBI NO: 15237955 NR Description: putative protein; protein id: At5g17390.1
  misc_feature (53)..(204): Homolog of NCBI NO: 15227695 NR Description: unknown protein; protein id: At2g03720.1
  misc_feature (41)..(204): Homolog of NCBI NO: 15228516 NR Description: hypothetical protein; protein id: At3g03290.1 thaliana] >gi|6714411|gb|AAF26099.1|AC012328_2 hypothetical
  misc_feature (97)..(204): Homolog of NCBI NO: 18409190 NR Description: expressed protein; protein id: At1g69080.1, by cDNA: 22327. [Arabidopsis thaliana]
  misc_feature (97)..(204): Homolog of NCBI NO: 21592322 NR Description: unknown [Arabidopsis thaliana]
MDQQEYGGAGVGRRGSRRWSKKRAAAAAAARGYGAGSGNGVKQPASAAGKRVMVVVDESSGANHAMMWALTHVADKGDFLTLLHVLPRSGSGRGEEASSLANSLGTLCKASRPEVEVEALVIQGPKLGTVLSQVKKLEASVLVLSQCRPSPCWLSCFLRSSGEEFVEQCINQAECLTLAVRKQSKGVCGYLISTRWQKNFWLLA

SEQ ID NO: 15724 - protein, 152 aa, Zea mays subsp. mays
  peptide (1)..(152): Ceres Seq. ID no. 12407570
  misc_feature (1)..(129): Pfam Name: Universal stress protein family Pfam Description: Universal stress protein family
  misc_feature (1)..(152): Homolog of NCBI NO: 34907308 NR Description: hypothetical protein~similar to Arabidopsis
  misc_feature (1)..(152): Homolog of NCBI NO: 15219439 NR Description: hypothetical protein; protein id: At1g44760.1, by cDNA: gi_17380775 [Arabidopsis thaliana]
  misc_feature (1)..(152): Homolog of NCBI NO: 15237955 NR Description: putative protein; protein id: At5g17390.1
  misc_feature (1)..(152): Homolog of NCBI NO: 15227695 NR Description: unknown protein; protein id: At2g03720.1
  misc_feature (1)..(152): Homolog of NCBI NO: 15228516 NR Description: hypothetical protein; protein id: At3g03290.1 thaliana] >gi|6714411|gb|AAF26099.1|AC012328_2 hypothetical
  misc_feature (45)..(152): Homolog of NCBI NO: 18409190 NR Description: expressed protein; protein id: At1g69080.1, by cDNA: 22327. [Arabidopsis thaliana]
  misc_feature (45)..(152): Homolog of NCBI NO: 21592322 NR Description: unknown [Arabidopsis thaliana]
MVVVDESSGANHAMMWALTHVADKGDFLTLLHVLPRSGSGRGEEASSLANSLGTLCKASRPEVEVEALVIQGPKLGTVLSQVKKLEASVLVLSQCRPSPCWLSCFLRSSGEEFVEQCINQAECLTLAVRKQSKGVCGYLISTRWQKNFWLLA

SEQ ID NO: 15725 - DNA, 1314 bp, Zea mays subsp. mays
  misc_feature (1)..(1314): Ceres Seq. ID no. 12363419
  misc_feature: MA Experiment ID: 108529 Result: Up-regulated in Transcription
  misc_feature: MA Experiment 108529 PARAMETER Experiment Name: Zm_Imbibed_Seeds_P Parameter: Age (day) Value: 5 vs. 2
  misc_feature: MA Experiment 108529 PARAMETER Experiment Name: Zm_Imbibed_Seeds_P Parameter: Organism Value: Zea mays
  misc_feature: MA Experiment 108529 PARAMETER Experiment Name: Zm_Imbibed_Seeds_P Parameter: Plant Line Value: 35A19
  misc_feature: MA Experiment 108529 PARAMETER Experiment Name: Zm_Imbibed_Seeds_P Parameter: Tissue Value: Roots vs. Embryo
  misc_feature: MA Experiment ID: 108535 Result: Down-regulated in Transcription
  misc_feature: MA Experiment 108535 PARAMETER Experiment Name: Zm_Meristem_P Parameter: Age (day) Value: 8
  misc_feature: MA Experiment 108535 PARAMETER Experiment Name: Zm_Meristem_P Parameter: Organism Value: Zea mays
  misc_feature: MA Experiment 108535 PARAMETER Experiment Name: Zm_Meristem_P Parameter: Plant Line Value: 35A19
  misc_feature: MA Experiment 108535 PARAMETER Experiment Name: Zm_Meristem_P Parameter: Tissue Value: Root Meristem vs. Above Root Meristem
  misc_feature: MA Experiment ID: 108543 Result: Up-regulated in Transcription
  misc_feature: MA Experiment ID: 108546 Result: Up-regulated in Transcription
  misc_feature: MA Experiment 108546 PARAMETER Experiment Name: Zm_Imbibed_Seeds_P Parameter: Age (day) Value: 3 vs. 2
  misc_feature: MA Experiment 108546 PARAMETER Experiment Name: Zm_Imbibed_Seeds_P Parameter: Organism Value: Zea mays
  misc_feature: MA Experiment 108546 PARAMETER Experiment Name: Zm_Imbibed_Seeds_P Parameter: Plant Line Value: 35A19
  misc_feature: MA Experiment 108546 PARAMETER Experiment Name: Zm_Imbibed_Seeds_P Parameter: Tissue Value: Roots vs. Embryo
  misc_feature: MA Experiment ID: 108689 Result: Up-regulated in Transcription
  misc_feature: MA Experiment 108689 PARAMETER Experiment Name: Zm_Drought_Roots_P Parameter: Age (day) Value: 9
  misc_feature: MA Experiment 108689 PARAMETER Experiment Name: Zm_Drought_Roots_P Parameter: Organism Value: Zea mays
  misc_feature: MA Experiment 108689 PARAMETER Experiment Name: Zm_Drought_Roots_P Parameter: Plant Line Value: 35A19
  misc_feature: MA Experiment 108689 PARAMETER Experiment Name: Zm_Drought_Roots_P Parameter: Timepoint (hr) Value: 24
  misc_feature: MA Experiment 108689 PARAMETER Experiment Name: Zm_Drought_Roots_P Parameter: Tissue Value: Roots
  misc_feature: MA Experiment 108689 PARAMETER Experiment Name: Zm_Drought_Roots_P Parameter: Treatment Value: Drought vs. No Drought
  misc_feature: MA Experiment ID: 20000108 Result: Down-regulated in Transcription
  misc_feature: MA Experiment 20000108 PARAMETER Experiment Name: Zm_Root-Tips_P Parameter: Age (day) Value: 12
  misc_feature: MA Experiment 20000108 PARAMETER Experiment Name: Zm_Root-Tips_P Parameter: Organism Value: Zea mays
  misc_feature: MA Experiment 20000108 PARAMETER Experiment Name: Zm_Root-Tips_P Parameter: Tissue Value: Root tips vs. Root mid region    35
  misc_feature: MA Experiment 20000108 PARAMETER Experiment Name: Zm_Root-Tips_P Parameter: Tissue Value: Root tips vs. Root mid region   Sequence Listing-Misc Features (4)
  misc_feature: MA Experiment ID: 20000535 Result: Down-regulated in Transcription
  misc_feature: MA Experiment 20000535 PARAMETER Experiment Name: Zm_Hybrid_Seed_Dev_P Parameter: DAP Value: 30 vs. 12
  misc_feature: MA Experiment 20000535 PARAMETER Experiment Name: Zm_Hybrid_Seed_Dev_P Parameter: Organism Value: Zea mays
  misc_feature: MA Experiment 20000535 PARAMETER Experiment Name: Zm_Hybrid_Seed_Dev_P Parameter: Plant Line Value: 35A19
  misc_feature: MA Experiment 20000535 PARAMETER Experiment Name: Zm_Hybrid_Seed_Dev_P Parameter: Tissue Value: Embryo vs. Unfert Floret
gcacgagaccattacctagaacatcctaatcgaaaaatttttcgacatgccgcgcgagctggaggtccggtacggtggctggctggacgctgggatccgggaggagtacgagcactacgcggacgtctgcttcggggcgttcggcgaccgggtgcggctctggacgaccttcaacgagcccaacctgctggtcaagttccagtacatgctgggcgcgtacccgcccagccgctgctccccgccgttcggcagctgcgggagcggcgactcgcgccgggagccgtacgccgcggcgcacaacatcatcatgtcccccgccgccgtccgcgcctacagggacaagtaccaggcgacgcagggcggctccgtcgggatcgtggccgccatgaaatggtacgagccgctgacgaactccacggacgacatcctggccgcgcggcgcgcgcaggctttcgagacggactggtttctggagccgatattcttgggcgattaccccggagcgatgcgggagatcctgggatcggacctgccgaccttcaccgcggaggagaaggcgctgctgctgcggtacaaggcggacttcatcgggctgaaccactacacggcgatctacgccagggactgcctgcgctccccgtgcaacctcgggtcgtacgaagggaacgccttcgtctcggcgactggggaaagggacgacggggtcaagatcgggggagatactgcgctggcaggtttcttcgacgtcccagaggccatagagctggctatccagtacgtgaacgggaggtacaagggcacgcctgtgtatattactgagaacggttactcgcagtggagtgatgccagcagggaggagctgatcaacgatgtgaggagaaagaactacctgcagggctacatcacgtatctatccaaagcagtcaggaacggagcaaacgtgcggggctacttcgtgtggacgctgctggacaacttcgagtgggcgttcggttacaggttgaagtacgggctgtaccacgtcgacttcgacacacaggagaggacgccccggatgtctgcgaggtggtaccagggcttcctcacggcccgcaccagccagcgcgacgaagcagcgcaggcacggagagcagactcgtgatgaaccattcccacttccaccgatatatatcatcgaacgccttgctagacagccgagggtctcatgactcgtgctcatttccgtcctcgcggtatattggaataactgtggctgtggtgtcctaatgtctgtatatgcatatatcatatattttgacctcaaaagaggtttag

SEQ ID NO: 15726 - protein, 364 aa, Zea mays subsp. mays
  peptide (1)..(364): Ceres Seq. ID no. 12363420
  misc_feature (1)..(364): Homolog of NCBI NO: 38345327 NR Description: OSJNBa0004N05.24 [Oryza sativa (japonica
  misc_feature (1)..(346): Homolog of NCBI NO: 38345329 NR Description: OSJNBa0004N05.26 [Oryza sativa (japonica
  misc_feature (1)..(356): Homolog of NCBI NO: 38345324 NR Description: OSJNBa0004N05.21 [Oryza sativa (japonica
  misc_feature (1)..(364): Homolog of NCBI NO: 22328863 NR Description: glycosyl hydrolase family 1; protein id:
  misc_feature (1)..(355): Homolog of NCBI NO: 7435450 NR Description: beta-glucosidase homolog F8K4.3 - Arabidopsis
  misc_feature (1)..(355): Homolog of NCBI NO: 30696622 NR Description: glycosyl hydrolase family 1 [Arabidopsis thaliana]
  misc_feature (1)..(355): Homolog of NCBI NO: 30696625 NR Description: glycosyl hydrolase family 1 [Arabidopsis thaliana]
  misc_feature (1)..(354): Homolog of NCBI NO: 15220627 NR Description: glycosyl hydrolase family 1; protein id:
  misc_feature (1)..(364): Homolog of NCBI NO: 3820531 NR Description: beta-glucosidase [Pinus contorta]
  misc_feature (141)..(364): Homolog of NCBI NO: 38345326 NR Description: OSJNBa0004N05.23 [Oryza sativa (japonica
MPRELEVRYGGWLDAGIREEYEHYADVCFGAFGDRVRLWTTFNEPNLLVKFQYMLGAYPPSRCSPPFGSCGSGDSRREPYAAAHNIIMSPAAVRAYRDKYQATQGGSVGIVAAMKWYEPLTNSTDDILAARRAQAFETDWFLEPIFLGDYPGAMREILGSDLPTFTAEEKALLLRYKADFIGLNHYTAIYARDCLRSPCNLGSYEGNAFVSATGERDDGVKIGGDTALAGFFDVPEAIELAIQYVNGRYKGTPVYITENGYSQWSDASREELINDVRRKNYLQGYITYLSKAVRNGANVRGYFVWTLLDNFEWAFGYRLKYGLYHVDFDTQERTPRMSARWYQGFLTARTSQRDEAAQARRADS

SEQ ID NO: 15727 - protein, 311 aa, Zea mays subsp. mays
  peptide (1)..(311): Ceres Seq. ID no. 12363421
  misc_feature (1)..(311): Homolog of NCBI NO: 38345327 NR Description: OSJNBa0004N05.24 [Oryza sativa (japonica
  misc_feature (1)..(293): Homolog of NCBI NO: 38345329 NR Description: OSJNBa0004N05.26 [Oryza sativa (japonica
  misc_feature (1)..(303): Homolog of NCBI NO: 38345324 NR Description: OSJNBa0004N05.21 [Oryza sativa (japonica
  misc_feature (1)..(311): Homolog of NCBI NO: 22328863 NR Description: glycosyl hydrolase family 1; protein id:
  misc_feature (1)..(302): Homolog of NCBI NO: 7435450 NR Description: beta-glucosidase homolog F8K4.3 - Arabidopsis
  misc_feature (1)..(302): Homolog of NCBI NO: 30696622 NR Description: glycosyl hydrolase family 1 [Arabidopsis thaliana]
  misc_feature (1)..(302): Homolog of NCBI NO: 30696625 NR Description: glycosyl hydrolase family 1 [Arabidopsis thaliana]
  misc_feature (1)..(301): Homolog of NCBI NO: 15220627 NR Description: glycosyl hydrolase family 1; protein id:
  misc_feature (1)..(311): Homolog of NCBI NO: 3820531 NR Description: beta-glucosidase [Pinus contorta]
  misc_feature (88)..(311): Homolog of NCBI NO: 38345326 NR Description: OSJNBa0004N05.23 [Oryza sativa (japonica
MLGAYPPSRCSPPFGSCGSGDSRREPYAAAHNIIMSPAAVRAYRDKYQATQGGSVGIVAAMKWYEPLTNSTDDILAARRAQAFETDWFLEPIFLGDYPGAMREILGSDLPTFTAEEKALLLRYKADFIGLNHYTAIYARDCLRSPCNLGSYEGNAFVSATGERDDGVKIGGDTALAGFFDVPEAIELAIQYVNGRYKGTPVYITENGYSQWSDASREELINDVRRKNYLQGYITYLSKAVRNGANVRGYFVWTLLDNFEWAFGYRLKYGLYHVDFDTQERTPRMSARWYQGFLTARTSQRDEAAQARRADS

SEQ ID NO: 15728 - protein, 277 aa, Zea mays subsp. mays
  peptide (1)..(277): Ceres Seq. ID no. 12363422
  misc_feature (1)..(277): Homolog of NCBI NO: 38345327 NR Description: OSJNBa0004N05.24 [Oryza sativa (japonica
  misc_feature (1)..(259): Homolog of NCBI NO: 38345329 NR Description: OSJNBa0004N05.26 [Oryza sativa (japonica
  misc_feature (1)..(269): Homolog of NCBI NO: 38345324 NR Description: OSJNBa0004N05.21 [Oryza sativa (japonica
  misc_feature (1)..(277): Homolog of NCBI NO: 22328863 NR Description: glycosyl hydrolase family 1; protein id:
  misc_feature (1)..(268): Homolog of NCBI NO: 7435450 NR Description: beta-glucosidase homolog F8K4.3 - Arabidopsis
  misc_feature (1)..(268): Homolog of NCBI NO: 30696622 NR Description: glycosyl hydrolase family 1 [Arabidopsis thaliana]
  misc_feature (1)..(268): Homolog of NCBI NO: 30696625 NR Description: glycosyl hydrolase family 1 [Arabidopsis thaliana]
  misc_feature (1)..(267): Homolog of NCBI NO: 15220627 NR Description: glycosyl hydrolase family 1; protein id:
  misc_feature (1)..(277): Homolog of NCBI NO: 3820531 NR Description: beta-glucosidase [Pinus contorta]
  misc_feature (54)..(277): Homolog of NCBI NO: 38345326 NR Description: OSJNBa0004N05.23 [Oryza sativa (japonica
MSPAAVRAYRDKYQATQGGSVGIVAAMKWYEPLTNSTDDILAARRAQAFETDWFLEPIFLGDYPGAMREILGSDLPTFTAEEKALLLRYKADFIGLNHYTAIYARDCLRSPCNLGSYEGNAFVSATGERDDGVKIGGDTALAGFFDVPEAIELAIQYVNGRYKGTPVYITENGYSQWSDASREELINDVRRKNYLQGYITYLSKAVRNGANVRGYFVWTLLDNFEWAFGYRLKYGLYHVDFDTQERTPRMSARWYQGFLTARTSQRDEAAQARRADS

SEQ ID NO: 15729 - DNA, 1726 bp, Zea mays subsp. mays
  misc_feature (1)..(1726): Ceres Seq. ID no. 12363262
  misc_feature: MA Experiment ID: 108535 Result: Up-regulated in Transcription
  misc_feature: MA Experiment 108535 PARAMETER Experiment Name: Zm_Meristem_P Parameter: Age (day) Value: 8
  misc_feature: MA Experiment 108535 PARAMETER Experiment Name: Zm_Meristem_P Parameter: Organism Value: Zea mays
  misc_feature: MA Experiment 108535 PARAMETER Experiment Name: Zm_Meristem_P Parameter: Plant Line Value: 35A19
  misc_feature: MA Experiment 108535 PARAMETER Experiment Name: Zm_Meristem_P Parameter: Tissue Value: Root Meristem vs. Above Root Meristem
  misc_feature: MA Experiment ID: 108536 Result: Up-regulated in Transcription
  misc_feature: MA Experiment 108536 PARAMETER Experiment Name: Zm_Meristem_P Parameter: Age (day) Value: 8
  misc_feature: MA Experiment 108536 PARAMETER Experiment Name: Zm_Meristem_P Parameter: Organism Value: Zea mays
  misc_feature: MA Experiment 108536 PARAMETER Experiment Name: Zm_Meristem_P Parameter: Plant Line Value: 35A19
  misc_feature: MA Experiment 108536 PARAMETER Experiment Name: Zm_Meristem_P Parameter: Tissue Value: Shoot Meristem vs. Above Shoot Meristem
  misc_feature: MA Experiment ID: 108543 Result: Down-regulated in Transcription
  misc_feature: MA Experiment ID: 108544 Result: Down-regulated in Transcription
  misc_feature: MA Experiment ID: 108556 Result: Down-regulated in Transcription
  misc_feature: MA Experiment 108556 PARAMETER Experiment Name: Zm_Drought_P Parameter: Age (day) Value: 9
  misc_feature: MA Experiment 108556 PARAMETER Experiment Name: Zm_Drought_P Parameter: Organism Value: Zea mays
  misc_feature: MA Experiment 108556 PARAMETER Experiment Name: Zm_Drought_P Parameter: Plant Line Value: 35A19
  misc_feature: MA Experiment 108556 PARAMETER Experiment Name: Zm_Drought_P Parameter: Timepoint (hr) Value: 24
  misc_feature: MA Experiment 108556 PARAMETER Experiment Name: Zm_Drought_P Parameter: Tissue Value: Aerial
  misc_feature: MA Experiment 108556 PARAMETER Experiment Name: Zm_Drought_P Parameter: Treatment Value: Drought vs. No Drought
  misc_feature: MA Experiment ID: 20000478 Result: Down-regulated in Transcription
  misc_feature: MA Experiment 20000478 PARAMETER Experiment Name: Zm_5mM_SA_P Parameter: Age (day) Value: 11
  misc_feature: MA Experiment 20000478 PARAMETER Experiment Name: Zm_5mM_SA_P Parameter: Organism Value: Zea mays
  misc_feature: MA Experiment 20000478 PARAMETER Experiment Name: Zm_5mM_SA_P Parameter: Plant Line Value: 35A19
  misc_feature: MA Experiment 20000478 PARAMETER Experiment Name: Zm_5mM_SA_P Parameter: Timepoint (hr) Value: 72
  misc_feature: MA Experiment 20000478 PARAMETER Experiment Name: Zm_5mM_SA_P Parameter: Tissue Value: Aerial
  misc_feature: MA Experiment 20000478 PARAMETER Experiment Name: Zm_5mM_SA_P Parameter: Treatment Value: 5mM SA vs. No Treatment
  misc_feature: MA Experiment ID: 20000535 Result: Up-regulated in Transcription
  misc_feature: MA Experiment 20000535 PARAMETER Experiment Name: Zm_Hybrid_Seed_Dev_P Parameter: DAP Value: 30 vs. 12
  misc_feature: MA Experiment 20000535 PARAMETER Experiment Name: Zm_Hybrid_Seed_Dev_P Parameter: Organism Value: Zea mays
  misc_feature: MA Experiment 20000535 PARAMETER Experiment Name: Zm_Hybrid_Seed_Dev_P Parameter: Plant Line Value: 35A19
  misc_feature: MA Experiment 20000535 PARAMETER Experiment Name: Zm_Hybrid_Seed_Dev_P Parameter: Tissue Value: Embryo vs. Unfert Floret
gcacgagaccattacctagaacatcctaatcgaaaaacactctcctcgcgtttcccgccattaactctgcaacctattctcttcctcgcgaaaccgcttccttcgattcattccccctctcccctctccaagacccaaaaccctaacccctacgacccccgtgaccgccgccgccgtcgatgcctgcgctctccgacgtcgcgcttcaggctgccatcgccggcaacctccgcctcctgaagctggtggcgagcaagatgaatctgcgcgaagcgaaggacgccgctgggcggaacgcgctccacctggccgcggagatgggccgtcttgaggtttgcaggttcctggtggaggaatcgggcttcgaggtgaacttcgcctgcgccgaaggcgggtcgccggtccactgcgccgcggccgggggcagcgagagcgtcttgggctaccttctcgaccacggtggcgaccctgtgatgccggactccatgggctccactccactgcatgatgcggcagaggaagggcattgtgcggctgtgaggatgctgctgtccaagggtgtcgatgtggatccacacggctgtcgtgggacgccgctgcacttggcctgctccaatgaccgggatcaggttgttaggatcctgctggaacatggcgcagatcccaacaaagttgtcggtcatgtcctcccaccactcatgatggcatactgtggcggttctttgagatgcatgaagctactgattgaggctggtgcggatgtgaacttgattgctccttctggagtaattttggctcaggcagtttgtgatgggtcaactgagattgtcaagtttttgctagaggttggagctgatcctaacattcctgatgaggatgggaaaatcccgatcatgtacccagcatttaatgggcatcgggagcttgttgaaattctatttcctaagacaagaccagtttcatctttgccagactggagcgttgatgggattattagaagtatgaaagatctgtttttcaagcctcaggatgcagctgtggtggaaaaaaagatagctgatgcgaagtcacaagggaaggaagctttcgcaaggggagagtaccctgcagcagtatacttctataccatggtactagagaacgaccttgatgctactgcgtttgccaaccggagcctgtgctggttgcggctgagggagggggccaaggctctgttagatgctcaacagtgcaaaatgatacggcctcgttggtcgaaggcatggtatcgcgagggcgcggctctcagcttgctgaaggactaccaaggggcagtcaacgcgttcacggaagcattgaaactggatcctgcaagtttagagatcaagaaagccttaagggaggccaccgattccctggcgaacgttggccgctccggagaacagaacccatgagctgctgctgcatccatgtgctttatctcacgttaagaatcctctaacactatgtggctcagcctcatattatatgttgatatatgtcgccttaacgcactgctggagatactagtttcgatctcagcctatatgttttgctccttcgggatgcagcctaagatacatgtggcaaccaagtgaggttgggcagggtagcatatctatggactggttgaactattatatgtatctggatatctaagtgcacctgttgctcctagtaaagttgcagttctaatgaccccttcgtc

SEQ ID NO: 15730 - protein, 417 aa, Zea mays subsp. mays
  peptide (1)..(417): Ceres Seq. ID no. 12363263
  misc_feature (325)..(358): Pfam Name: TPR Domain Pfam Description: TPR Domain
  misc_feature (11)..(406): Homolog of NCBI NO: 27542766 NR Description: ankyrin-like protein-like protein [Sorghum
  misc_feature (9)..(400): Homolog of NCBI NO: 27542768 NR Description: ankyrin-like protein-like protein [Sorghum
  misc_feature (9)..(283): Homolog of NCBI NO: 13435243 NR Description: putative gag-pol polyprotein [Oryza sativa]
  misc_feature (288)..(399): Homolog of NCBI NO: 13435243 NR Description: putative gag-pol polyprotein [Oryza sativa]
  misc_feature (41)..(414): Homolog of NCBI NO: 34896852 NR Description: putative ankyrin [Oryza sativa]
  misc_feature (37)..(406): Homolog of NCBI NO: 13435247 NR Description: putative ankyrin [Oryza sativa]
  misc_feature (9)..(276): Homolog of NCBI NO: 34329680 NR Description: unknown [Nicotiana benthamiana]
  misc_feature (9)..(291): Homolog of NCBI NO: 24745936 NR Description: ankyrin-like protein [Solanum tuberosum]
  misc_feature (9)..(276): Homolog of NCBI NO: 15229331 NR Description: ankyrin-like protein; protein id: At3g04710.1, by cDNA: 104284. [Arabidopsis thaliana]
  misc_feature (162)..(407): Homolog of NCBI NO: 34910278 NR Description: OSJNBa0089K24.26 [Oryza sativa (japonica
MPALSDVALQAAIAGNLRLLKLVASKMNLREAKDAAGRNALHLAAEMGRLEVCRFLVEESGFEVNFACAEGGSPVHCAAAGGSESVLGYLLDHGGDPVMPDSMGSTPLHDAAEEGHCAAVRMLLSKGVDVDPHGCRGTPLHLACSNDRDQVVRILLEHGADPNKVVGHVLPPLMMAYCGGSLRCMKLLIEAGADVNLIAPSGVILAQAVCDGSTEIVKFLLEVGADPNIPDEDGKIPIMYPAFNGHRELVEILFPKTRPVSSLPDWSVDGIIRSMKDLFFKPQDAAVVEKKIADAKSQGKEAFARGEYPAAVYFYTMVLENDLDATAFANRSLCWLRLREGAKALLDAQQCKMIRPRWSKAWYREGAALSLLKDYQGAVNAFTEALKLDPASLEIKKALREATDSLANVGRSGEQNP

SEQ ID NO: 15731 - protein, 391 aa, Zea mays subsp. mays
  peptide (1)..(391): Ceres Seq. ID no. 12363264
  misc_feature (299)..(332): Pfam Name: TPR Domain Pfam Description: TPR Domain
  misc_feature (1)..(380): Homolog of NCBI NO: 27542766 NR Description: ankyrin-like protein-like protein [Sorghum
  misc_feature (1)..(374): Homolog of NCBI NO: 27542768 NR Description: ankyrin-like protein-like protein [Sorghum
  misc_feature (1)..(257): Homolog of NCBI NO: 13435243 NR Description: putative gag-pol polyprotein [Oryza sativa]
  misc_feature (262)..(373): Homolog of NCBI NO: 13435243 NR Description: putative gag-pol polyprotein [Oryza sativa]
  misc_feature (15)..(388): Homolog of NCBI NO: 34896852 NR Description: putative ankyrin [Oryza sativa]
  misc_feature (11)..(380): Homolog of NCBI NO: 13435247 NR Description: putative ankyrin [Oryza sativa]
  misc_feature (1)..(250): Homolog of NCBI NO: 34329680 NR Description: unknown [Nicotiana benthamiana]
  misc_feature (1)..(265): Homolog of NCBI NO: 24745936 NR Description: ankyrin-like protein [Solanum tuberosum]
  misc_feature (1)..(250): Homolog of NCBI NO: 15229331 NR Description: ankyrin-like protein; protein id: At3g04710.1, by cDNA: 104284. [Arabidopsis thaliana]
  misc_feature (136)..(381): Homolog of NCBI NO: 34910278 NR Description: OSJNBa0089K24.26 [Oryza sativa (japonica
MNLREAKDAAGRNALHLAAEMGRLEVCRFLVEESGFEVNFACAEGGSPVHCAAAGGSESVLGYLLDHGGDPVMPDSMGSTPLHDAAEEGHCAAVRMLLSKGVDVDPHGCRGTPLHLACSNDRDQVVRILLEHGADPNKVVGHVLPPLMMAYCGGSLRCMKLLIEAGADVNLIAPSGVILAQAVCDGSTEIVKFLLEVGADPNIPDEDGKIPIMYPAFNGHRELVEILFPKTRPVSSLPDWSVDGIIRSMKDLFFKPQDAAVVEKKIADAKSQGKEAFARGEYPAAVYFYTMVLENDLDATAFANRSLCWLRLREGAKALLDAQQCKMIRPRWSKAWYREGAALSLLKDYQGAVNAFTEALKLDPASLEIKKALREATDSLANVGRSGEQNP

SEQ ID NO: 15732 - protein, 371 aa, Zea mays subsp. mays
  peptide (1)..(371): Ceres Seq. ID no. 12363265
  misc_feature (279)..(312): Pfam Name: TPR Domain Pfam Description: TPR Domain
  misc_feature (1)..(360): Homolog of NCBI NO: 27542766 NR Description: ankyrin-like protein-like protein [Sorghum
  misc_feature (1)..(354): Homolog of NCBI NO: 27542768 NR Description: ankyrin-like protein-like protein [Sorghum
  misc_feature (1)..(237): Homolog of NCBI NO: 13435243 NR Description: putative gag-pol polyprotein [Oryza sativa]
  misc_feature (242)..(353): Homolog of NCBI NO: 13435243 NR Description: putative gag-pol polyprotein [Oryza sativa]
  misc_feature (1)..(368): Homolog of NCBI NO: 34896852 NR Description: putative ankyrin [Oryza sativa]
  misc_feature (1)..(360): Homolog of NCBI NO: 13435247 NR Description: putative ankyrin [Oryza sativa]
  misc_feature (1)..(230): Homolog of NCBI NO: 34329680 NR Description: unknown [Nicotiana benthamiana]
  misc_feature (1)..(245): Homolog of NCBI NO: 24745936 NR Description: ankyrin-like protein [Solanum tuberosum]
  misc_feature (1)..(230): Homolog of NCBI NO: 15229331 NR Description: ankyrin-like protein; protein id: At3g04710.1, by cDNA: 104284. [Arabidopsis thaliana]
  misc_feature (116)..(361): Homolog of NCBI NO: 34910278 NR Description: OSJNBa0089K24.26 [Oryza sativa (japonica
MGRLEVCRFLVEESGFEVNFACAEGGSPVHCAAAGGSESVLGYLLDHGGDPVMPDSMGSTPLHDAAEEGHCAAVRMLLSKGVDVDPHGCRGTPLHLACSNDRDQVVRILLEHGADPNKVVGHVLPPLMMAYCGGSLRCMKLLIEAGADVNLIAPSGVILAQAVCDGSTEIVKFLLEVGADPNIPDEDGKIPIMYPAFNGHRELVEILFPKTRPVSSLPDWSVDGIIRSMKDLFFKPQDAAVVEKKIADAKSQGKEAFARGEYPAAVYFYTMVLENDLDATAFANRSLCWLRLREGAKALLDAQQCKMIRPRWSKAWYREGAALSLLKDYQGAVNAFTEALKLDPASLEIKKALREATDSLANVGRSGEQNP

SEQ ID NO: 15733 - DNA, 1585 bp, Zea mays subsp. mays; identical to SEQ ID NO: 4558
  misc_feature (1)..(1585): Ceres Seq. ID no. 12381056
  misc_feature: MA Experiment ID: 108530 Result: Down-regulated in Transcription
  misc_feature: MA Experiment 108530 PARAMETER Experiment Name: Zm_Imbibed_Seeds_P Parameter: Age (day) Value: 6 vs. 2
  misc_feature: MA Experiment 108530 PARAMETER Experiment Name: Zm_Imbibed_Seeds_P Parameter: Organism Value: Zea mays
  misc_feature: MA Experiment 108530 PARAMETER Experiment Name: Zm_Imbibed_Seeds_P Parameter: Plant Line Value: 35A19
  misc_feature: MA Experiment 108530 PARAMETER Experiment Name: Zm_Imbibed_Seeds_P Parameter: Tissue Value: Aerial vs. Embryo
  misc_feature: MA Experiment ID: 20000477 Result: Down-regulated in Transcription
  misc_feature: MA Experiment 20000477 PARAMETER Experiment Name: Zm_5mM_SA_P Parameter: Age (day) Value: 10
  misc_feature: MA Experiment 20000477 PARAMETER Experiment Name: Zm_5mM_SA_P Parameter: Organism Value: Zea mays
  misc_feature: MA Experiment 20000477 PARAMETER Experiment Name: Zm_5mM_SA_P Parameter: Plant Line Value: 35A19
  misc_feature: MA Experiment 20000477 PARAMETER Experiment Name: Zm_5mM_SA_P Parameter: Timepoint (hr) Value: 48
  misc_feature: MA Experiment 20000477 PARAMETER Experiment Name: Zm_5mM_SA_P Parameter: Tissue Value: Aerial
  misc_feature: MA Experiment 20000477 PARAMETER Experiment Name: Zm_5mM_SA_P Parameter: Treatment Value: 5mM SA vs. No Treatment

SEQ ID NO: 15734 - protein, 287 aa, Zea mays subsp. mays; identical to SEQ ID NO: 4559
  peptide (1)..(287): Ceres Seq. ID no. 12381057
  misc_feature (1)..(284): Homolog of NCBI NO: 22331664 NR Description: DP-E2F-like protein 1; protein id: At3g48160.1,
  misc_feature (1)..(267): Homolog of NCBI NO: 30692988 NR Description: DP-E2F-related protein 1 [Arabidopsis thaliana]
  misc_feature (1)..(267): Homolog of NCBI NO: 7487385 NR Description: hypothetical protein T24C20.40 - Arabidopsis >gi|5541722|emb|CAB51063.1| putative protein [Arabidopsis
  misc_feature (14)..(281): Homolog of NCBI NO: 22330789 NR Description: DP-E2F-like protein 3; protein id: At3g01330.1, by cDNA: gi_20260249, supported by cDNA: gi_20502505 [Arabidopsis >gi|20260250|gb|AAM13023.1| unknown protein [Arabidopsis
  misc_feature (48)..(284): Homolog of NCBI NO: 15242176 NR Description: DP-E2F-like 2; protein id: At5g14960.1, supported cDNA: gi_20502503 [Arabidopsis thaliana] >gi|11289607|pir||T51441
  misc_feature (1)..(49): Homolog of NCBI NO: 15242176 NR Description: DP-E2F-like 2; protein id: At5g14960.1, supported cDNA: gi_20502503 [Arabidopsis thaliana] >gi|11289607|pir||T51441
  misc_feature (14)..(264): Homolog of NCBI NO: 6094551 NR Description: hypothetical protein [Arabidopsis thaliana]
  misc_feature (1)..(142): Homolog of NCBI NO: 26334515 NR Description: unnamed protein product [Mus musculus]
  misc_feature (1)..(170): Homolog of NCBI NO: 40254337 NR Description: E2F transcription factor 7 [Mus musculus]
  misc_feature (1)..(170): Homolog of NCBI NO: 26326999 NR Description: unnamed protein product [Mus musculus]

SEQ ID NO: 15735 - protein, 278 aa, Zea mays subsp. mays; identical to SEQ ID NO: 4560
  peptide (1)..(278): Ceres Seq. ID no. 12381058
  misc_feature (1)..(161): Homolog of NCBI NO: 40254337 NR Description: E2F transcription factor 7 [Mus musculus]
  misc_feature (1)..(161): Homolog of NCBI NO: 26326999 NR Description: unnamed protein product [Mus musculus]
  misc_feature (1)..(275): Homolog of NCBI NO: 22331664 NR Description: DP-E2F-like protein 1; protein id: At3g48160.1,
  misc_feature (1)..(258): Homolog of NCBI NO: 30692988 NR Description: DP-E2F-related protein 1 [Arabidopsis thaliana]
  misc_feature (1)..(258): Homolog of NCBI NO: 7487385 NR Description: hypothetical protein T24C20.40 - Arabidopsis >gi|5541722|emb|CAB51063.1| putative protein [Arabidopsis
  misc_feature (5)..(272): Homolog of NCBI NO: 22330789 NR Description: DP-E2F-like protein 3; protein id: At3g01330.1, by cDNA: gi_20260249, supported by cDNA: gi_20502505 [Arabidopsis >gi|20260250|gb|AAM13023.1| unknown protein [Arabidopsis
  misc_feature (39)..(275): Homolog of NCBI NO: 15242176 NR Description: DP-E2F-like 2; protein id: At5g14960.1, supported cDNA: gi_20502503 [Arabidopsis thaliana] >gi|11289607|pir||T51441
  misc_feature (1)..(40): Homolog of NCBI NO: 15242176 NR Description: DP-E2F-like 2; protein id: At5g14960.1, supported cDNA: gi_20502503 [Arabidopsis thaliana] >gi|11289607|pir||T51441
  misc_feature (5)..(255): Homolog of NCBI NO: 6094551 NR Description: hypothetical protein [Arabidopsis thaliana]
  misc_feature (1)..(133): Homolog of NCBI NO: 26334515 NR Description: unnamed protein product [Mus musculus]

SEQ ID NO: 15736 - protein, 207 aa, Zea mays subsp. mays; identical to SEQ ID NO: 4561
  peptide (1)..(207): Ceres Seq. ID no. 12381059
  misc_feature (1)..(204): Homolog of NCBI NO: 22331664 NR Description: DP-E2F-like protein 1; protein id: At3g48160.1,
  misc_feature (1)..(187): Homolog of NCBI NO: 30692988 NR Description: DP-E2F-related protein 1 [Arabidopsis thaliana]
  misc_feature (1)..(187): Homolog of NCBI NO: 7487385 NR Description: hypothetical protein T24C20.40 - Arabidopsis >gi|5541722|emb|CAB51063.1| putative protein [Arabidopsis
  misc_feature (1)..(201): Homolog of NCBI NO: 22330789 NR Description: DP-E2F-like protein 3; protein id: At3g01330.1, by cDNA: gi_20260249, supported by cDNA: gi_20502505 [Arabidopsis >gi|20260250|gb|AAM13023.1| unknown protein [Arabidopsis
  misc_feature (1)..(204): Homolog of NCBI NO: 15242176 NR Description: DP-E2F-like 2; protein id: At5g14960.1, supported cDNA: gi_20502503 [Arabidopsis thaliana] >gi|11289607|pir||T51441
  misc_feature (1)..(184): Homolog of NCBI NO: 6094551 NR Description: hypothetical protein [Arabidopsis thaliana]
  misc_feature (1)..(62): Homolog of NCBI NO: 26334515 NR Description: unnamed protein product [Mus musculus]
  misc_feature (1)..(90): Homolog of NCBI NO: 40254337 NR Description: E2F transcription factor 7 [Mus musculus]
  misc_feature (1)..(90): Homolog of NCBI NO: 26326999 NR Description: unnamed protein product [Mus musculus]
  misc_feature (1)..(90): Homolog of NCBI NO: 29741773 NR Description: similar to Transcription factor E2F dimerisation

SEQ ID NO: 15737 - DNA, 1274 bp, Zea mays subsp. mays
  misc_feature (1)..(1274): Ceres Seq. ID no. 12372822
  misc_feature: MA Experiment ID: 108504 Result: Up-regulated in Transcription
  misc_feature: MA Experiment 108504 PARAMETER Experiment Name: Zm_Drought_P Parameter: Age (day) Value: 8
  misc_feature: MA Experiment 108504 PARAMETER Experiment Name: Zm_Drought_P Parameter: Organism Value: Zea mays
  misc_feature: MA Experiment 108504 PARAMETER Experiment Name: Zm_Drought_P Parameter: Plant Line Value: 35A19
  misc_feature: MA Experiment 108504 PARAMETER Experiment Name: Zm_Drought_P Parameter: Timepoint (hr) Value: 12
  misc_feature: MA Experiment 108504 PARAMETER Experiment Name: Zm_Drought_P Parameter: Tissue Value: Aerial
  misc_feature: MA Experiment 108504 PARAMETER Experiment Name: Zm_Drought_P Parameter: Treatment Value: Drought vs. No Drought
  misc_feature: MA Experiment ID: 108523 Result: Up-regulated in Transcription
  misc_feature: MA Experiment 108523 PARAMETER Experiment Name: Zm_42deg_Heat_P Parameter: Age (day) Value: 8
  misc_feature: MA Experiment 108523 PARAMETER Experiment Name: Zm_42deg_Heat_P Parameter: Organism Value: Zea mays
  misc_feature: MA Experiment 108523 PARAMETER Experiment Name: Zm_42deg_Heat_P Parameter: Plant Line Value: 35A19
  misc_feature: MA Experiment 108523 PARAMETER Experiment Name: Zm_42deg_Heat_P Parameter: Temperature (deg C) Value: 42 vs. 22
  misc_feature: MA Experiment 108523 PARAMETER Experiment Name: Zm_42deg_Heat_P Parameter: Timepoint (hr) Value: 6
  misc_feature: MA Experiment 108523 PARAMETER Experiment Name: Zm_42deg_Heat_P Parameter: Tissue Value: Aerial
  misc_feature: MA Experiment ID: 108527 Result: Up-regulated in Transcription
  misc_feature: MA Experiment 108527 PARAMETER Experiment Name: Zm_5mM_NO_P Parameter: Age (day) Value: 8
  misc_feature: MA Experiment 108527 PARAMETER Experiment Name: Zm_5mM_NO_P Parameter: Organism Value: Zea mays
  misc_feature: MA Experiment 108527 PARAMETER Experiment Name: Zm_5mM_NO_P Parameter: Plant Line Value: 35A19
  misc_feature: MA Experiment 108527 PARAMETER Experiment Name: Zm_5mM_NO_P Parameter: Timepoint (hr) Value: 6
  misc_feature: MA Experiment 108527 PARAMETER Experiment Name: Zm_5mM_NO_P Parameter: Tissue Value: Aerial
  misc_feature: MA Experiment 108527 PARAMETER Experiment Name: Zm_5mM_NO_P Parameter: Treatment Value: 5mM NO vs. No Treatment
  misc_feature: MA Experiment ID: 108535 Result: Up-regulated in Transcription
  misc_feature: MA Experiment 108535 PARAMETER Experiment Name: Zm_Meristem_P Parameter: Age (day) Value: 8
  misc_feature: MA Experiment 108535 PARAMETER Experiment Name: Zm_Meristem_P Parameter: Organism Value: Zea mays
  misc_feature: MA Experiment 108535 PARAMETER Experiment Name: Zm_Meristem_P Parameter: Plant Line Value: 35A19
  misc_feature: MA Experiment 108535 PARAMETER Experiment Name: Zm_Meristem_P Parameter: Tissue Value: Root Meristem vs. Above Root Meristem
  misc_feature: MA Experiment ID: 108540 Result: Up-regulated in Transcription
  misc_feature: MA Experiment 108540 PARAMETER Experiment Name: Zm_20percent_PEG_P Parameter: Age (day) Value: 8
  misc_feature: MA Experiment 108540 PARAMETER Experiment Name: Zm_20percent_PEG_P Parameter: Organism Value: Zea mays
  misc_feature: MA Experiment 108540 PARAMETER Experiment Name: Zm_20percent_PEG_P Parameter: Plant Line Value: 35A19
  misc_feature: MA Experiment 108540 PARAMETER Experiment Name: Zm_20percent_PEG_P Parameter: Timepoint (hr) Value: 6
  misc_feature: MA Experiment 108540 PARAMETER Experiment Name: Zm_20percent_PEG_P Parameter: Tissue Value: Aerial
  misc_feature: MA Experiment 108540 PARAMETER Experiment Name: Zm_20percent_PEG_P Parameter: Treatment Value: 20percent PEG vs. No Treatment
  misc_feature: MA Experiment ID: 108556 Result: Up-regulated in Transcription
  misc_feature: MA Experiment 108556 PARAMETER Experiment Name: Zm_Drought_P Parameter: Age (day) Value: 9
  misc_feature: MA Experiment 108556 PARAMETER Experiment Name: Zm_Drought_P Parameter: Organism Value: Zea mays
  misc_feature: MA Experiment 108556 PARAMETER Experiment Name: Zm_Drought_P Parameter: Plant Line Value: 35A19
  misc_feature: MA Experiment 108556 PARAMETER Experiment Name: Zm_Drought_P Parameter: Timepoint (hr) Value: 24
  misc_feature: MA Experiment 108556 PARAMETER Experiment Name: Zm_Drought_P Parameter: Tissue Value: Aerial
  misc_feature: MA Experiment 108556 PARAMETER Experiment Name: Zm_Drought_P Parameter: Treatment Value: Drought vs. No Drought
  misc_feature: MA Experiment ID: 108559 Result: Up-regulated in Transcription
  misc_feature: MA Experiment 108559 PARAMETER Experiment Name: Zm_5mM_NO_P Parameter: Age (day) Value: 8
  misc_feature: MA Experiment 108559 PARAMETER Experiment Name: Zm_5mM_NO_P Parameter: Organism Value: Zea mays
  misc_feature: MA Experiment 108559 PARAMETER Experiment Name: Zm_5mM_NO_P Parameter: Plant Line Value: 35A19
  misc_feature: MA Experiment 108559 PARAMETER Experiment Name: Zm_5mM_NO_P Parameter: Timepoint (hr) Value: 12
  misc_feature: MA Experiment 108559 PARAMETER Experiment Name: Zm_5mM_NO_P Parameter: Tissue Value: Aerial
  misc_feature: MA Experiment 108559 PARAMETER Experiment Name: Zm_5mM_NO_P Parameter: Treatment Value: 5mM NO vs. No Treatment
  misc_feature: MA Experiment ID: 108597 Result: Up-regulated in Transcription
  misc_feature: MA Experiment 108597 PARAMETER Experiment Name: Zm_100uM_ABA_P Parameter: Age (day) Value: 9
  misc_feature: MA Experiment 108597 PARAMETER Experiment Name: Zm_100uM_ABA_P Parameter: Organism Value: Zea mays
  misc_feature: MA Experiment 108597 PARAMETER Experiment Name: Zm_100uM_ABA_P Parameter: Plant Line Value: 35A19
  misc_feature: MA Experiment 108597 PARAMETER Experiment Name: Zm_100uM_ABA_P Parameter: Timepoint (hr) Value: 24
  misc_feature: MA Experiment 108597 PARAMETER Experiment Name: Zm_100uM_ABA_P Parameter: Tissue Value: Aerial
  misc_feature: MA Experiment 108597 PARAMETER Experiment Name: Zm_100uM_ABA_P Parameter: Treatment Value: 100uM ABA vs. No Treatment
  misc_feature: MA Experiment ID: 108688 Result: Down-regulated in Transcription
  misc_feature: MA Experiment 108688 PARAMETER Experiment Name: Zm_Embryos-Flowers__P Parameter: Tissue Value: Immature Flowers vs. Aerial+
  misc_feature: MA Experiment ID: 20000478 Result: Up-regulated in Transcription
  misc_feature: MA Experiment 20000478 PARAMETER Experiment Name: Zm_5mM_SA_P Parameter: Age (day) Value: 11
  misc_feature: MA Experiment 20000478 PARAMETER Experiment Name: Zm_5mM_SA_P Parameter: Organism Value: Zea mays
  misc_feature: MA Experiment 20000478 PARAMETER Experiment Name: Zm_5mM_SA_P Parameter: Plant Line Value: 35A19
  misc_feature: MA Experiment 20000478 PARAMETER Experiment Name: Zm_5mM_SA_P Parameter: Timepoint (hr) Value: 72
  misc_feature: MA Experiment 20000478 PARAMETER Experiment Name: Zm_5mM_SA_P Parameter: Tissue Value: Aerial
  misc_feature: MA Experiment 20000478 PARAMETER Experiment Name: Zm_5mM_SA_P Parameter: Treatment Value: 5mM SA vs. No Treatment
  misc_feature: MA Experiment ID: 20000480 Result: Up-regulated in Transcription
  misc_feature: MA Experiment 20000480 PARAMETER Experiment Name: Zm_Drought_P Parameter: Age (day) Value: 11
  misc_feature: MA Experiment 20000480 PARAMETER Experiment Name: Zm_Drought_P Parameter: Organism Value: Zea mays
  misc_feature: MA Experiment 20000480 PARAMETER Experiment Name: Zm_Drought_P Parameter: Plant Line Value: 35A19
  misc_feature: MA Experiment 20000480 PARAMETER Experiment Name: Zm_Drought_P Parameter: Timepoint (hr) Value: 72
  misc_feature: MA Experiment 20000480 PARAMETER Experiment Name: Zm_Drought_P Parameter: Tissue Value: Aerial
  misc_feature: MA Experiment 20000480 PARAMETER Experiment Name: Zm_Drought_P Parameter: Treatment Value: Drought vs. No Drought
  misc_feature: MA Experiment ID: 20000626 Result: Up-regulated in Transcription
  misc_feature: MA Experiment 20000626 PARAMETER Experiment Name: Zm_Herbicide-Treatments_P Parameter: Timepoint (hr) Value: 12
  misc_feature: MA Experiment 20000626 PARAMETER Experiment Name: Zm_Herbicide-Treatments_P Parameter: Tissue Value: Aerial
  misc_feature: MA Experiment 20000626 PARAMETER Experiment Name: Zm_Herbicide-Treatments_P Parameter: Treatment Value: Roundup vs. No Treatment
  misc_feature: MA Experiment ID: 20000629 Result: Up-regulated in Transcription
  misc_feature: MA Experiment 20000629 PARAMETER Experiment Name: Zm_Herbicide-Treatments_P Parameter: Timepoint (hr) Value: 12
  misc_feature: MA Experiment 20000629 PARAMETER Experiment Name: Zm_Herbicide-Treatments_P Parameter: Tissue Value: Aerial
  misc_feature: MA Experiment 20000629 PARAMETER Experiment Name: Zm_Herbicide-Treatments_P Parameter: Treatment Value: Trimec vs. No Treatment
  misc_feature: MA Experiment ID: 20000630 Result: Up-regulated in Transcription
  misc_feature: MA Experiment 20000630 PARAMETER Experiment Name: Zm_Herbicide-Treatments_P Parameter: Timepoint (hr) Value: 4
  misc_feature: MA Experiment 20000630 PARAMETER Experiment Name: Zm_Herbicide-Treatments_P Parameter: Tissue Value: Aerial
  misc_feature: MA Experiment 20000630 PARAMETER Experiment Name: Zm_Herbicide-Treatments_P Parameter: Treatment Value: Roundup vs. No Treatment
ccaaccaaacttccggtcttctcttctccactacccacccgcctgcccgcccgccttctcctccaccactgccccgccgctaaccaaccactcgtgcgccacaagtctcccgtcgtggaatagggcaaaggccaggcatctcgcttctgtcctctgtcgaggggatcggacccgatcggagaaagaatgggctcggaggcggactgcgacaggatcaggggcccgtggagccccgaggaggacgacgcgctgcggcggctcgtggagcggcacggcgcgcgcaactggacggcgatcgggcgcgagatcccggggcggtcgggcaagtcgtgccgcctgcggtggtgcaaccagctgtcgccgcaggtggagcgccggcccttcacggcggaggaggacgcggccatcgtccgcgcccacgcccgcctcggcaaccgctgggccgccatcgcgcgcctcctccccggccgcaccgacaacgccgtcaagaaccactggaactgctcgctcaagcgcaagctcgccgccgcgtccgccccggcgggttcctccgacgtcgaggcgcgcccgaccaagcgcgtcagcctctcgcccgacagcccgtcggggtcggggtcggggtcagggtcagggtccgggtccgggtccgggtccgaccgtagcgacctgagccacggcgccggccaggtttaccgcccagtggcgcggtccggcgggttcgagccggcggactgcgcgatgagccgtccgctggaggaagaggaggaggaaaaggaggacccgctcacctccctcagcctctcgcttccaggcacggaccagcggttccaccacgaccgcgcccacagccagttccaggagctcccggcgtcgccgccctcgccctccccgcctccgccgccggttctctcggcgtacccgttcagccccgtgttcatggaggcgatgcaggagctgatccgcacggaggtgcagcggtacatggcgagcgtgggcgtgcgcgccgggtgcggcgccgccggcggggccgacctctgcatgccgcaactggtcgacggcgtcatgcgcgccgccgccgagcgggtcggccggatgcagtagcagtagctcctgccatcaaatgctcccgaaccgtcaatcgatcttctaggacgaacgcgcagcagctgttgttatcagtagcaaacttccaagttattattttcctttttttaaaactttattctctcgaaccgctgtgaaaccgaaacagcagtgaaaagagtcagcaactg

SEQ ID NO: 15738 - protein, 304 aa, Zea mays subsp. mays
  peptide (1)..(304): Ceres Seq. ID no. 12372823
  misc_feature (11)..(57): Pfam Name: Myb-like DNA-binding domain Pfam Description: Myb-like DNA-binding domain
  misc_feature (8)..(259): Homolog of NCBI NO: 9954112 NR Description: tuber-specific and sucrose-responsive element
  misc_feature (6)..(256): Homolog of NCBI NO: 27529846 NR Description: Myb-like protein [Nicotiana tabacum]
  misc_feature (6)..(291): Homolog of NCBI NO: 21593586 NR Description: putative MYB family transcription factor
  misc_feature (6)..(291): Homolog of NCBI NO: 15227806 NR Description: MYB family transcription factor; protein id: supported by cDNA: 40307. [Arabidopsis thaliana]
  misc_feature (8)..(280): Homolog of NCBI NO: 15450393 NR Description: AT5g67300/K8K14_2 [Arabidopsis thaliana]
  misc_feature (8)..(280): Homolog of NCBI NO: 15240708 NR Description: myb family transcription factor; protein id: supported by cDNA: 33763., supported by cDNA: gi_11908059, by cDNA: gi_12642875, supported by cDNA: gi_15450392, supported
  misc_feature (8)..(280): Homolog of NCBI NO: 2129648 NR Description: myb-related protein, 33.3K - Arabidopsis thaliana
  misc_feature (8)..(280): Homolog of NCBI NO: 21592897 NR Description: myb-related protein, 33.3K [Arabidopsis thaliana]
  misc_feature (8)..(280): Homolog of NCBI NO: 15229664 NR Description: myb DNA-binding protein (MYB77); protein id: supported by cDNA: gi_15983427 [Arabidopsis thaliana]
  misc_feature (9)..(248): Homolog of NCBI NO: 9954114 NR Description: tuber-specific and sucrose-responsive element
MGSEADCDRIRGPWSPEEDDALRRLVERHGARNWTAIGREIPGRSGKSCRLRWCNQLSPQVERRPFTAEEDAAIVRAHARLGNRWAAIARLLPGRTDNAVKNHWNCSLKRKLAAASAPAGSSDVEARPTKRVSLSPDSPSGSGSGSGSGSGSGSGSDRSDLSHGAGQVYRPVARSGGFEPADCAMSRPLEEEEEEKEDPLTSLSLSLPGTDQRFHHDRAHSQFQELPASPPSPSPPPPPVLSAYPFSPVFMEAMQELIRTEVQRYMASVGVRAGCGAAGGADLCMPQLVDGVMRAAAERVGRMQ

SEQ ID NO: 15739 - protein, 222 aa, Zea mays subsp. mays
  peptide (1)..(222): Ceres Seq. ID no. 12372824
  misc_feature (17)..(222): Homolog of NCBI NO: 30424862 NR Description: RIKEN cDNA 5033413A03 [Mus musculus]
  misc_feature (37)..(222): Homolog of NCBI NO: 30424862 NR Description: RIKEN cDNA 5033413A03 [Mus musculus]
  misc_feature (17)..(222): Homolog of NCBI NO: 30313663 NR Description: sublingual apomucin [Mus musculus]
  misc_feature (116)..(221): Homolog of NCBI NO: 30140331 NR Description: putative arabinagalactan protein [Lotus japonicus]
  misc_feature (53)..(222): Homolog of NCBI NO: 30424862 NR Description: RIKEN cDNA 5033413A03 [Mus musculus]
  misc_feature (33)..(222): Homolog of NCBI NO: 30313663 NR Description: sublingual apomucin [Mus musculus]
  misc_feature (54)..(222): Homolog of NCBI NO: 30354095 NR Description: Similar to serine/arginine repetitive matrix 2
QPNFRSSLLHYPPACPPAFSSTTAPPLTNHSCATSLPSWNRAKARHLASVLCRGDRTRSEKEWARRRTATGSGARGAPRRTTRCGGSWSGTARATGRRSGARSRGGRASRAACGGATSCRRRWSAGPSRRRRTRPSSAPTPASATAGPPSRASSPAAPTTPSRTTGTARSSASSPPRPPRRVPPTSRRARPSASASRPTARRGRGRGQGQGPGPGPGPTVAT

SEQ ID NO: 15740 - DNA, 1200 bp, Zea mays subsp. mays
  misc_feature (1)..(1200): Ceres Seq. ID no. 12406443
  misc_feature: MA Experiment ID: 108504 Result: Up-regulated in Transcription
  misc_feature: MA Experiment 108504 PARAMETER Experiment Name: Zm_Drought_P Parameter: Age (day) Value: 8
  misc_feature: MA Experiment 108504 PARAMETER Experiment Name: Zm_Drought_P Parameter: Organism Value: Zea mays
  misc_feature: MA Experiment 108504 PARAMETER Experiment Name: Zm_Drought_P Parameter: Plant Line Value: 35A19
  misc_feature: MA Experiment 108504 PARAMETER Experiment Name: Zm_Drought_P Parameter: Timepoint (hr) Value: 12
  misc_feature: MA Experiment 108504 PARAMETER Experiment Name: Zm_Drought_P Parameter: Tissue Value: Aerial
  misc_feature: MA Experiment 108504 PARAMETER Experiment Name: Zm_Drought_P Parameter: Treatment Value: Drought vs. No Drought
  misc_feature: MA Experiment ID: 108513 Result: Up-regulated in Transcription
  misc_feature: MA Experiment 108513 PARAMETER Experiment Name: Zm_100uM_ABA_P Parameter: Age (day) Value: 8
  misc_feature: MA Experiment 108513 PARAMETER Experiment Name: Zm_100uM_ABA_P Parameter: Organism Value: Zea mays
  misc_feature: MA Experiment 108513 PARAMETER Experiment Name: Zm_100uM_ABA_P Parameter: Plant Line Value: 35A19
  misc_feature: MA Experiment 108513 PARAMETER Experiment Name: Zm_100uM_ABA_P Parameter: Timepoint (hr) Value: 6
  misc_feature: MA Experiment 108513 PARAMETER Experiment Name: Zm_100uM_ABA_P Parameter: Tissue Value: Aerial
  misc_feature: MA Experiment 108513 PARAMETER Experiment Name: Zm_100uM_ABA_P Parameter: Treatment Value: 100uM ABA vs. No Treatment
  misc_feature: MA Experiment ID: 108522 Result: Up-regulated in Transcription
  misc_feature: MA Experiment 108522 PARAMETER Experiment Name: Zm_42deg_Heat_P Parameter: Age (day) Value: 8
  misc_feature: MA Experiment 108522 PARAMETER Experiment Name: Zm_42deg_Heat_P Parameter: Organism Value: Zea mays
  misc_feature: MA Experiment 108522 PARAMETER Experiment Name: Zm_42deg_Heat_P Parameter: Plant Line Value: 35A19
  misc_feature: MA Experiment 108522 PARAMETER Experiment Name: Zm_42deg_Heat_P Parameter: Temperature (deg C) Value: 42 vs. 22
  misc_feature: MA Experiment 108522 PARAMETER Experiment Name: Zm_42deg_Heat_P Parameter: Timepoint (hr) Value: 1
  misc_feature: MA Experiment 108522 PARAMETER Experiment Name: Zm_42deg_Heat_P Parameter: Tissue Value: Aerial
  misc_feature: MA Experiment ID: 108527 Result: Up-regulated in Transcription
  misc_feature: MA Experiment 108527 PARAMETER Experiment Name: Zm_5mM_NO_P Parameter: Age (day) Value: 8
  misc_feature: MA Experiment 108527 PARAMETER Experiment Name: Zm_5mM_NO_P Parameter: Organism Value: Zea mays
  misc_feature: MA Experiment 108527 PARAMETER Experiment Name: Zm_5mM_NO_P Parameter: Plant Line Value: 35A19
  misc_feature: MA Experiment 108527 PARAMETER Experiment Name: Zm_5mM_NO_P Parameter: Timepoint (hr) Value: 6
  misc_feature: MA Experiment 108527 PARAMETER Experiment Name: Zm_5mM_NO_P Parameter: Tissue Value: Aerial
  misc_feature: MA Experiment 108527 PARAMETER Experiment Name: Zm_5mM_NO_P Parameter: Treatment Value: 5mM NO vs. No Treatment
  misc_feature: MA Experiment ID: 108540 Result: Up-regulated in Transcription
  misc_feature: MA Experiment 108540 PARAMETER Experiment Name: Zm_20percent_PEG_P Parameter: Age (day) Value: 8
  misc_feature: MA Experiment 108540 PARAMETER Experiment Name: Zm_20percent_PEG_P Parameter: Organism Value: Zea mays
  misc_feature: MA Experiment 108540 PARAMETER Experiment Name: Zm_20percent_PEG_P Parameter: Plant Line Value: 35A19
  misc_feature: MA Experiment 108540 PARAMETER Experiment Name: Zm_20percent_PEG_P Parameter: Timepoint (hr) Value: 6
  misc_feature: MA Experiment 108540 PARAMETER Experiment Name: Zm_20percent_PEG_P Parameter: Tissue Value: Aerial
  misc_feature: MA Experiment 108540 PARAMETER Experiment Name: Zm_20percent_PEG_P Parameter: Treatment Value: 20percent PEG vs. No Treatment
  misc_feature: MA Experiment ID: 108542 Result: Up-regulated in Transcription
  misc_feature: MA Experiment 108542 PARAMETER Experiment Name: Zm_150mM_NaCl_P Parameter: Age (day) Value: 8
  misc_feature: MA Experiment 108542 PARAMETER Experiment Name: Zm_150mM_NaCl_P Parameter: Organism Value: Zea mays
  misc_feature: MA Experiment 108542 PARAMETER Experiment Name: Zm_150mM_NaCl_P Parameter: Plant Line Value: 35A19
  misc_feature: MA Experiment 108542 PARAMETER Experiment Name: Zm_150mM_NaCl_P Parameter: Timepoint (hr) Value: 6
  misc_feature: MA Experiment 108542 PARAMETER Experiment Name: Zm_150mM_NaCl_P Parameter: Tissue Value: Aerial
  misc_feature: MA Experiment 108542 PARAMETER Experiment Name: Zm_150mM_NaCl_P Parameter: Treatment Value: 150mM NaCl vs. No Treatment
  misc_feature: MA Experiment ID: 108556 Result: Up-regulated in Transcription
  misc_feature: MA Experiment 108556 PARAMETER Experiment Name: Zm_Drought_P Parameter: Age (day) Value: 9
  misc_feature: MA Experiment 108556 PARAMETER Experiment Name: Zm_Drought_P Parameter: Organism Value: Zea mays
  misc_feature: MA Experiment 108556 PARAMETER Experiment Name: Zm_Drought_P Parameter: Plant Line Value: 35A19
  misc_feature: MA Experiment 108556 PARAMETER Experiment Name: Zm_Drought_P Parameter: Timepoint (hr) Value: 24
  misc_feature: MA Experiment 108556 PARAMETER Experiment Name: Zm_Drought_P Parameter: Tissue Value: Aerial
  misc_feature: MA Experiment 108556 PARAMETER Experiment Name: Zm_Drought_P Parameter: Treatment Value: Drought vs. No Drought
  misc_feature: MA Experiment ID: 108689 Result: Up-regulated in Transcription
  misc_feature: MA Experiment 108689 PARAMETER Experiment Name: Zm_Drought_Roots_P Parameter: Age (day) Value: 9
  misc_feature: MA Experiment 108689 PARAMETER Experiment Name: Zm_Drought_Roots_P Parameter: Organism Value: Zea mays
  misc_feature: MA Experiment 108689 PARAMETER Experiment Name: Zm_Drought_Roots_P Parameter: Plant Line Value: 35A19
  misc_feature: MA Experiment 108689 PARAMETER Experiment Name: Zm_Drought_Roots_P Parameter: Timepoint (hr) Value: 24
  misc_feature: MA Experiment 108689 PARAMETER Experiment Name: Zm_Drought_Roots_P Parameter: Tissue Value: Roots
  misc_feature: MA Experiment 108689 PARAMETER Experiment Name: Zm_Drought_Roots_P Parameter: Treatment Value: Drought vs. No Drought
  misc_feature: MA Experiment ID: 20000477 Result: Up-regulated in Transcription
  misc_feature: MA Experiment 20000477 PARAMETER Experiment Name: Zm_5mM_SA_P Parameter: Age (day) Value: 10
  misc_feature: MA Experiment 20000477 PARAMETER Experiment Name: Zm_5mM_SA_P Parameter: Organism Value: Zea mays
  misc_feature: MA Experiment 20000477 PARAMETER Experiment Name: Zm_5mM_SA_P Parameter: Plant Line Value: 35A19
  misc_feature: MA Experiment 20000477 PARAMETER Experiment Name: Zm_5mM_SA_P Parameter: Timepoint (hr) Value: 48
  misc_feature: MA Experiment 20000477 PARAMETER Experiment Name: Zm_5mM_SA_P Parameter: Tissue Value: Aerial
  misc_feature: MA Experiment 20000477 PARAMETER Experiment Name: Zm_5mM_SA_P Parameter: Treatment Value: 5mM SA vs. No Treatment
  misc_feature: MA Experiment ID: 20000478 Result: Up-regulated in Transcription
  misc_feature: MA Experiment 20000478 PARAMETER Experiment Name: Zm_5mM_SA_P Parameter: Age (day) Value: 11
  misc_feature: MA Experiment 20000478 PARAMETER Experiment Name: Zm_5mM_SA_P Parameter: Organism Value: Zea mays
  misc_feature: MA Experiment 20000478 PARAMETER Experiment Name: Zm_5mM_SA_P Parameter: Plant Line Value: 35A19
  misc_feature: MA Experiment 20000478 PARAMETER Experiment Name: Zm_5mM_SA_P Parameter: Timepoint (hr) Value: 72
  misc_feature: MA Experiment 20000478 PARAMETER Experiment Name: Zm_5mM_SA_P Parameter: Tissue Value: Aerial
  misc_feature: MA Experiment 20000478 PARAMETER Experiment Name: Zm_5mM_SA_P Parameter: Treatment Value: 5mM SA vs. No Treatment
  misc_feature: MA Experiment ID: 20000479 Result: Up-regulated in Transcription
  misc_feature: MA Experiment 20000479 PARAMETER Experiment Name: Zm_Drought_P Parameter: Age (day) Value: 10
  misc_feature: MA Experiment 20000479 PARAMETER Experiment Name: Zm_Drought_P Parameter: Organism Value: Zea mays
  misc_feature: MA Experiment 20000479 PARAMETER Experiment Name: Zm_Drought_P Parameter: Plant Line Value: 35A19
  misc_feature: MA Experiment 20000479 PARAMETER Experiment Name: Zm_Drought_P Parameter: Timepoint (hr) Value: 48
  misc_feature: MA Experiment 20000479 PARAMETER Experiment Name: Zm_Drought_P Parameter: Tissue Value: Aerial
  misc_feature: MA Experiment 20000479 PARAMETER Experiment Name: Zm_Drought_P Parameter: Treatment Value: Drought vs. No Drought
  misc_feature: MA Experiment ID: 20000492 Result: Down-regulated in Transcription
  misc_feature: MA Experiment 20000492 PARAMETER Experiment Name: Zm_Hybrid_Seed_Dev_P Parameter: DAP Value: 12
  misc_feature: MA Experiment 20000492 PARAMETER Experiment Name: Zm_Hybrid_Seed_Dev_P Parameter: Organism Value: Zea mays
  misc_feature: MA Experiment 20000492 PARAMETER Experiment Name: Zm_Hybrid_Seed_Dev_P Parameter: Plant Line Value: 35A19
  misc_feature: MA Experiment 20000492 PARAMETER Experiment Name: Zm_Hybrid_Seed_Dev_P Parameter: Tissue Value: Fert Kernel vs. Unfert Floret
  misc_feature: MA Experiment ID: 20000535 Result: Down-regulated in Transcription
  misc_feature: MA Experiment 20000535 PARAMETER Experiment Name: Zm_Hybrid_Seed_Dev_P Parameter: DAP Value: 30 vs. 12
  misc_feature: MA Experiment 20000535 PARAMETER Experiment Name: Zm_Hybrid_Seed_Dev_P Parameter: Organism Value: Zea mays
  misc_feature: MA Experiment 20000535 PARAMETER Experiment Name: Zm_Hybrid_Seed_Dev_P Parameter: Plant Line Value: 35A19
  misc_feature: MA Experiment 20000535 PARAMETER Experiment Name: Zm_Hybrid_Seed_Dev_P Parameter: Tissue Value: Embryo vs. Unfert Floret
gcacgagaccattacctagaacatcctaatcaaaaaactgaaccaaccaaccaccgctccttcttccttccttccttccttccccagttcccctcgtctcaccagtcaccaaggttccgagagcagagaaagataaaaaaaaggtaatccgacggaaacgacaagggcgcggcgagggcggggacagggtcggggaggccctgggcgcgggggcgccaagcgcatggcatcgtcgagggtgatgccgtcgtcctcgccgtcgcacacggcctctgatctcgcgcgcctagcgcaggccgccagcaggcccggcggcgggggcagcgggctgggctccatgaacgtggaggagctcctccgcggcatctacagcgacatgcccaccccggcgccgcccgcgtcggagcccgaacgcccgaggtcgccggccccggcgccggaggtcgccacgcggaggacggcggaggaggtgtggaaggagatcaccggcggaggtggcagtggggaacccgcgccccccgtggcggctcaggctgccgtccccgctggtggcgccggcggcccggagatgacgctggaggacttcctggctagggaggagggcgcggtgaaggaggatggggttagggtttcgggcccctctgcgccggccatggggttcctgggcggagcggagggcgtgggtgtgcctggcggcggaggcgggaggggaaggaancggcacctcatggatccagtggatcgcgccgcgatgcagcgacagaaacgaatgatcaaaaaccgcgagtctgctgcccggtcacgggagaggaagcaggcttatatcgccgagctagaatcgctggtaacgcacctcgaggaggagaatgccgagttgttgagagaacaggaagagcggcaccagaagcggcttaaagagctcttggaacgggtgacgccagtcattctgaggaaaaaaccatcaggagatcttagaagaacgaactcaatgcagtggtagattggagccaagctcagtcgccgtctctttacagttataacatagaatttgcccctgtatgtcatttttctatttatatatgcgccaactaagttgtagtatcttagctgaaatagcatgggcaattagccgacacaaaggttaaacgaaatcatattatgtaggagtgctcatgaccaagaaaggttgctgttcctgtc

SEQ ID NO: 15741 - protein, 258 aa, Zea mays subsp. mays
  peptide (1)..(258): Ceres Seq. ID no. 12406444
  misc_feature (174)..(235): Pfam Name: bZIP transcription factor Pfam Description: bZIP transcription factor
  misc_feature (3)..(258): Homolog of NCBI NO: 34908608 NR Description: putative DNA binding protein [Oryza sativa
  misc_feature (52)..(258): Homolog of NCBI NO: 7489466 NR Description: DNA binding protein - rice
  misc_feature (52)..(258): Homolog of NCBI NO: 7638404 NR Description: OSE2 [Oryza sativa]
  misc_feature (77)..(258): Homolog of NCBI NO: 29367541 NR Description: OSE2-like protein [Oryza sativa (japonica
  misc_feature (66)..(258): Homolog of NCBI NO: 15219608 NR Description: G-box binding factor 4, GBF4; protein id:
  misc_feature (78)..(258): Homolog of NCBI NO: 21554353 NR Description: unknown [Arabidopsis thaliana]
  misc_feature (78)..(258): Homolog of NCBI NO: 15240086 NR Description: bZIP transcription factor, G-box binding factor protein id: At5g44080.1, supported by cDNA: 25211., supported by gi_18175621, supported by cDNA: gi_20465650 [Arabidopsis binding
  misc_feature (1)..(251): Homolog of NCBI NO: 18404091 NR Description: ABA-responsive element binding protein, putative; id: At2g36270.1 [Arabidopsis thaliana] >gi|4510349|gb|AAD21438.1|
  misc_feature (1)..(251): Homolog of NCBI NO: 25408456 NR Description: probable bZIP transcription factor [imported] -
  misc_feature (155)..(258): Homolog of NCBI NO: 7406677 NR Description: putative ripening-related bZIP protein [Vitis
  misc_feature (165)..(165): Xaa is any aa, unknown or other
MASSRVMPSSSPSHTASDLARLAQAASRPGGGGSGLGSMNVEELLRGIYSDMPTPAPPASEPERPRSPAPAPEVATRRTAEEVWKEITGGGGSGEPAPPVAAQAAVPAGGAGGPEMTLEDFLAREEGAVKEDGVRVSGPSAPAMGFLGGAEGVGVPGGGGGRGRXRHLMDPVDRAAMQRQKRMIKNRESAARSRERKQAYIAELESLVTHLEEENAELLREQEERHQKRLKELLERVTPVILRKKPSGDLRRTNSMQW

SEQ ID NO: 15742 - protein, 252 aa, Zea mays subsp. mays
  peptide (1)..(252): Ceres Seq. ID no. 12406445
  misc_feature (168)..(229): Pfam Name: bZIP transcription factor Pfam Description: bZIP transcription factor
  misc_feature (1)..(252): Homolog of NCBI NO: 34908608 NR Description: putative DNA binding protein [Oryza sativa
  misc_feature (46)..(252): Homolog of NCBI NO: 7489466 NR Description: DNA binding protein - rice
  misc_feature (46)..(252): Homolog of NCBI NO: 7638404 NR Description: OSE2 [Oryza sativa]
  misc_feature (71)..(252): Homolog of NCBI NO: 29367541 NR Description: OSE2-like protein [Oryza sativa (japonica
  misc_feature (60)..(252): Homolog of NCBI NO: 15219608 NR Description: G-box binding factor 4, GBF4; protein id:
  misc_feature (72)..(252): Homolog of NCBI NO: 21554353 NR Description: unknown [Arabidopsis thaliana]
  misc_feature (72)..(252): Homolog of NCBI NO: 15240086 NR Description: bZIP transcription factor, G-box binding factor protein id: At5g44080.1, supported by cDNA: 25211., supported by gi_18175621, supported by cDNA: gi_20465650 [Arabidopsis binding
  misc_feature (1)..(245): Homolog of NCBI NO: 18404091 NR Description: ABA-responsive element binding protein, putative; id: At2g36270.1 [Arabidopsis thaliana] >gi|4510349|gb|AAD21438.1|
  misc_feature (1)..(245): Homolog of NCBI NO: 25408456 NR Description: probable bZIP transcription factor [imported] -
  misc_feature (149)..(252): Homolog of NCBI NO: 7406677 NR Description: putative ripening-related bZIP protein [Vitis
  misc_feature (159)..(159): Xaa is any aa, unknown or other
MPSSSPSHTASDLARLAQAASRPGGGGSGLGSMNVEELLRGIYSDMPTPAPPASEPERPRSPAPAPEVATRRTAEEVWKEITGGGGSGEPAPPVAAQAAVPAGGAGGPEMTLEDFLAREEGAVKEDGVRVSGPSAPAMGFLGGAEGVGVPGGGGGRGRXRHLMDPVDRAAMQRQKRMIKNRESAARSRERKQAYIAELESLVTHLEEENAELLREQEERHQKRLKELLERVTPVILRKKPSGDLRRTNSMQW

SEQ ID NO: 15743 - protein, 220 aa, Zea mays subsp. mays
  peptide (1)..(220): Ceres Seq. ID no. 12406446
  misc_feature (136)..(197): Pfam Name: bZIP transcription factor Pfam Description: bZIP transcription factor
  misc_feature (1)..(220): Homolog of NCBI NO: 34908608 NR Description: putative DNA binding protein [Oryza sativa
  misc_feature (14)..(220): Homolog of NCBI NO: 7489466 NR Description: DNA binding protein - rice
  misc_feature (14)..(220): Homolog of NCBI NO: 7638404 NR Description: OSE2 [Oryza sativa]
  misc_feature (39)..(220): Homolog of NCBI NO: 29367541 NR Description: OSE2-like protein [Oryza sativa (japonica
  misc_feature (28)..(220): Homolog of NCBI NO: 15219608 NR Description: G-box binding factor 4, GBF4; protein id:
  misc_feature (40)..(220): Homolog of NCBI NO: 21554353 NR Description: unknown [Arabidopsis thaliana]
  misc_feature (40)..(220): Homolog of NCBI NO: 15240086 NR Description: bZIP transcription factor, G-box binding factor protein id: At5g44080.1, supported by cDNA: 25211., supported by gi_18175621, supported by cDNA: gi_20465650 [Arabidopsis binding
  misc_feature (1)..(213): Homolog of NCBI NO: 18404091 NR Description: ABA-responsive element binding protein, putative; id: At2g36270.1 [Arabidopsis thaliana] >gi|4510349|gb|AAD21438.1|
  misc_feature (1)..(213): Homolog of NCBI NO: 25408456 NR Description: probable bZIP transcription factor [imported] -
  misc_feature (117)..(220): Homolog of NCBI NO: 7406677 NR Description: putative ripening-related bZIP protein [Vitis
  misc_feature (127)..(127): Xaa is any aa, unknown or other
MNVEELLRGIYSDMPTPAPPASEPERPRSPAPAPEVATRRTAEEVWKEITGGGGSGEPAPPVAAQAAVPAGGAGGPEMTLEDFLAREEGAVKEDGVRVSGPSAPAMGFLGGAEGVGVPGGGGGRGRXRHLMDPVDRAAMQRQKRMIKNRESAARSRERKQAYIAELESLVTHLEEENAELLREQEERHQKRLKELLERVTPVILRKKPSGDLRRTNSMQW

SEQ ID NO: 15744 - DNA, 1322 bp, Zea mays subsp. mays
  misc_feature (1)..(1322): Ceres Seq. ID no. 12374300
  misc_feature: MA Experiment ID: 108527 Result: Up-regulated in Transcription
  misc_feature: MA Experiment 108527 PARAMETER Experiment Name: Zm_5mM_NO_P Parameter: Age (day) Value: 8
  misc_feature: MA Experiment 108527 PARAMETER Experiment Name: Zm_5mM_NO_P Parameter: Organism Value: Zea mays
  misc_feature: MA Experiment 108527 PARAMETER Experiment Name: Zm_5mM_NO_P Parameter: Plant Line Value: 35A19
  misc_feature: MA Experiment 108527 PARAMETER Experiment Name: Zm_5mM_NO_P Parameter: Timepoint (hr) Value: 6
  misc_feature: MA Experiment 108527 PARAMETER Experiment Name: Zm_5mM_NO_P Parameter: Tissue Value: Aerial
  misc_feature: MA Experiment 108527 PARAMETER Experiment Name: Zm_5mM_NO_P Parameter: Treatment Value: 5mM NO vs. No Treatment
  misc_feature: MA Experiment ID: 108528 Result: Down-regulated in Transcription
  misc_feature: MA Experiment 108528 PARAMETER Experiment Name: Zm_Imbibed_Seeds_P Parameter: Age (day) Value: 5 vs. 2
  misc_feature: MA Experiment 108528 PARAMETER Experiment Name: Zm_Imbibed_Seeds_P Parameter: Organism Value: Zea mays
  misc_feature: MA Experiment 108528 PARAMETER Experiment Name: Zm_Imbibed_Seeds_P Parameter: Plant Line Value: 35A19
  misc_feature: MA Experiment 108528 PARAMETER Experiment Name: Zm_Imbibed_Seeds_P Parameter: Tissue Value: Aerial vs. Embryo
  misc_feature: MA Experiment ID: 108689 Result: Down-regulated in Transcription
  misc_feature: MA Experiment 108689 PARAMETER Experiment Name: Zm_Drought_Roots_P Parameter: Age (day) Value: 9
  misc_feature: MA Experiment 108689 PARAMETER Experiment Name: Zm_Drought_Roots_P Parameter: Organism Value: Zea mays
  misc_feature: MA Experiment 108689 PARAMETER Experiment Name: Zm_Drought_Roots_P Parameter: Plant Line Value: 35A19
  misc_feature: MA Experiment 108689 PARAMETER Experiment Name: Zm_Drought_Roots_P Parameter: Timepoint (hr) Value: 24
  misc_feature: MA Experiment 108689 PARAMETER Experiment Name: Zm_Drought_Roots_P Parameter: Tissue Value: Roots
  misc_feature: MA Experiment 108689 PARAMETER Experiment Name: Zm_Drought_Roots_P Parameter: Treatment Value: Drought vs. No Drought
  misc_feature: MA Experiment ID: 20000478 Result: Down-regulated in Transcription
  misc_feature: MA Experiment 20000478 PARAMETER Experiment Name: Zm_5mM_SA_P Parameter: Age (day) Value: 11
  misc_feature: MA Experiment 20000478 PARAMETER Experiment Name: Zm_5mM_SA_P Parameter: Organism Value: Zea mays
  misc_feature: MA Experiment 20000478 PARAMETER Experiment Name: Zm_5mM_SA_P Parameter: Plant Line Value: 35A19
  misc_feature: MA Experiment 20000478 PARAMETER Experiment Name: Zm_5mM_SA_P Parameter: Timepoint (hr) Value: 72
  misc_feature: MA Experiment 20000478 PARAMETER Experiment Name: Zm_5mM_SA_P Parameter: Tissue Value: Aerial
  misc_feature: MA Experiment 20000478 PARAMETER Experiment Name: Zm_5mM_SA_P Parameter: Treatment Value: 5mM SA vs. No Treatment
  misc_feature: MA Experiment ID: 20000488 Result: Up-regulated in Transcription
  misc_feature: MA Experiment 20000488 PARAMETER Experiment Name: Zm_50mM_NH4NO3_L_to_H_P Parameter: Organism Value: Zea mays
  misc_feature: MA Experiment 20000488 PARAMETER Experiment Name: Zm_50mM_NH4NO3_L_to_H_P Parameter: Timepoint (hr) Value: 8
  misc_feature: MA Experiment 20000488 PARAMETER Experiment Name: Zm_50mM_NH4NO3_L_to_H_P Parameter: Tissue Value: Leaves
  misc_feature: MA Experiment 20000488 PARAMETER Experiment Name: Zm_50mM_NH4NO3_L_to_H_P Parameter: Treatment Value: 50mM NH4NO3 vs. 100mM Mannitol
  misc_feature: MA Experiment ID: 20000492 Result: Up-regulated in Transcription
  misc_feature: MA Experiment 20000492 PARAMETER Experiment Name: Zm_Hybrid_Seed_Dev_P Parameter: DAP Value: 12
  misc_feature: MA Experiment 20000492 PARAMETER Experiment Name: Zm_Hybrid_Seed_Dev_P Parameter: Organism Value: Zea mays
  misc_feature: MA Experiment 20000492 PARAMETER Experiment Name: Zm_Hybrid_Seed_Dev_P Parameter: Plant Line Value: 35A19
  misc_feature: MA Experiment 20000492 PARAMETER Experiment Name: Zm_Hybrid_Seed_Dev_P Parameter: Tissue Value: Fert Kernel vs. Unfert Floret
  misc_feature: MA Experiment ID: 20000626 Result: Up-regulated in Transcription
  misc_feature: MA Experiment 20000626 PARAMETER Experiment Name: Zm_Herbicide-Treatments_P Parameter: Timepoint (hr) Value: 12
  misc_feature: MA Experiment 20000626 PARAMETER Experiment Name: Zm_Herbicide-Treatments_P Parameter: Tissue Value: Aerial
  misc_feature: MA Experiment 20000626 PARAMETER Experiment Name: Zm_Herbicide-Treatments_P Parameter: Treatment Value: Roundup vs. No Treatment
  misc_feature: MA Experiment ID: 20001610 Result: Down-regulated in Transcription
  misc_feature: MA Experiment 20001610 PARAMETER Experiment Name: Zm_50ppm_KNO3_L-to-H_P Parameter: Age (day) Value: 19
  misc_feature: MA Experiment 20001610 PARAMETER Experiment Name: Zm_50ppm_KNO3_L-to-H_P Parameter: Organism Value: Zea mays
  misc_feature: MA Experiment 20001610 PARAMETER Experiment Name: Zm_50ppm_KNO3_L-to-H_P Parameter: Plant Line Value: 35A19
  misc_feature: MA Experiment 20001610 PARAMETER Experiment Name: Zm_50ppm_KNO3_L-to-H_P Parameter: Timepoint (hr) Value: 2
  misc_feature: MA Experiment 20001610 PARAMETER Experiment Name: Zm_50ppm_KNO3_L-to-H_P Parameter: Tissue Value: Roots
  misc_feature: MA Experiment 20001610 PARAMETER Experiment Name: Zm_50ppm_KNO3_L-to-H_P Parameter: Treatment Value: 50ppm KNO3 vs. 50ppm KCl
agataatgtagagtgcgccgcgccgtgacggcgcggatgagaaagcctccaaacctctctgtttcgggctctccgtccccggcgtccaacacccatactctccccaggttgtgtgccacacccacactcaactatatacgaaaaccgccggcgcctggcccctaggccctagtcacagacccttgttctttcttcgacgcgcccccgggcatggcgaaccgcagtgttgccatgggcgtggccctcgcgttcgtggccatgaccgcgctctgttgcgcgccgggcgccgcggagttgcccaggctggaccacccggccaggagcgacggatcgctgaagctgctcgtcgtcggggactggggacgcaaggggactcacaaccagtcccgggtcgccgaccagatgggaagggtcggggagaagctcgatatcgactttgttatatccaccggggacaacttctacaaggacggcctcaagggcgtgcgcgaccaggcatttgaagaatcgttcgtggatatctacacagctcaaagcttacagaagccatggtactcagttctaggaaatcatgattacaggggcaatgcgctcgcacagcttagcccagtcttgaggaagatcgacgaccgattcatttgcatgagatcgttcatcgttaacgcagaacttgtggacttcttctttgtcgacaccactccgttccaactggagtattggactcaccctggcaaggatcgttatgactggagaggggtggcgcctcgaggcaagtacatagccaatttgctgaaggatctggatgtggctatgaagaaatcaactgcaaggtggaagattgtggctgggcatcacaccatgaggagtgtgagtgagcacggggacactaaggagcttctggaattactacttccagtcctcaaggacaatggcgtcgacttctacatcaatggacacgatcactgcctggagcacattagcagcagagacagtccactccagtatttcacgagcggaggcggttccaaggcatggagaggagtcttccatccaaacaaggacaaactccggttcttctacgacgggcaagggttcatgtccctccagctgaaccaagaccaggcgcacttcatcttttacgacgttttcgggaacatactgtaccgatggagctcgagacatccccagccctccacctatctcgatgaggaataaattggattgattttgcgccattgatatgtacaaaacaccgcctgccaactgtcatgtatgtgaaatgatgagtgttagacgcaaagaaggttatacaccagttaggg

SEQ ID NO: 15745 - protein, 334 aa, Zea mays subsp. mays
  peptide (1)..(334): Ceres Seq. ID no. 12374301
  misc_feature (42)..(253): Pfam Name: Calcineurin-like phosphoesterase Pfam Description: Calcineurin-like phosphoesterase
  misc_feature (8)..(321): Homolog of NCBI NO: 37530584 NR Description: putative purple acid phosphatase [Oryza sativa
  misc_feature (11)..(322): Homolog of NCBI NO: 39918795 NR Description: putative acid phosphatase [Lupinus luteus]
  misc_feature (27)..(326): Homolog of NCBI NO: 30683951 NR Description: calcineurin-like phosphoesterase family thaliana] >gi|24030193|gb|AAN41277.1| putative purple acid
  misc_feature (27)..(326): Homolog of NCBI NO: 30911094 NR Description: putative purple acid phosphatase [Arabidopsis
  misc_feature (28)..(320): Homolog of NCBI NO: 18401643 NR Description: acid phosphatase type 5; protein id: At3g17790.1, by cDNA: 113666. [Arabidopsis thaliana] acid phosphatase type 5 [Arabidopsis thaliana]
MANRSVAMGVALAFVAMTALCCAPGAAELPRLDHPARSDGSLKLLVVGDWGRKGTHNQSRVADQMGRVGEKLDIDFVISTGDNFYKDGLKGVRDQAFEESFVDIYTAQSLQKPWYSVLGNHDYRGNALAQLSPVLRKIDDRFICMRSFIVNAELVDFFFVDTTPFQLEYWTHPGKDRYDWRGVAPRGKYIANLLKDLDVAMKKSTARWKIVAGHHTMRSVSEHGDTKELLELLLPVLKDNGVDFYINGHDHCLEHISSRDSPLQYFTSGGGSKAWRGVFHPNKDKLRFFYDGQGFMSLQLNQDQAHFIFYDVFGNILYRWSSRHPQPSTYLDEE

SEQ ID NO: 15746 - protein, 327 aa, Zea mays subsp. mays
  peptide (1)..(327): Ceres Seq. ID no. 12374302
  misc_feature (35)..(246): Pfam Name: Calcineurin-like phosphoesterase Pfam Description: Calcineurin-like phosphoesterase
  misc_feature (1)..(314): Homolog of NCBI NO: 37530584 NR Description: putative purple acid phosphatase [Oryza sativa
  misc_feature (4)..(315): Homolog of NCBI NO: 39918795 NR Description: putative acid phosphatase [Lupinus luteus]
  misc_feature (20)..(319): Homolog of NCBI NO: 30683951 NR Description: calcineurin-like phosphoesterase family thaliana] >gi|24030193|gb|AAN41277.1| putative purple acid
  misc_feature (20)..(319): Homolog of NCBI NO: 30911094 NR Description: putative purple acid phosphatase [Arabidopsis
  misc_feature (21)..(313): Homolog of NCBI NO: 18401643 NR Description: acid phosphatase type 5; protein id: At3g17790.1, by cDNA: 113666. [Arabidopsis thaliana] acid phosphatase type 5 [Arabidopsis thaliana]
MGVALAFVAMTALCCAPGAAELPRLDHPARSDGSLKLLVVGDWGRKGTHNQSRVADQMGRVGEKLDIDFVISTGDNFYKDGLKGVRDQAFEESFVDIYTAQSLQKPWYSVLGNHDYRGNALAQLSPVLRKIDDRFICMRSFIVNAELVDFFFVDTTPFQLEYWTHPGKDRYDWRGVAPRGKYIANLLKDLDVAMKKSTARWKIVAGHHTMRSVSEHGDTKELLELLLPVLKDNGVDFYINGHDHCLEHISSRDSPLQYFTSGGGSKAWRGVFHPNKDKLRFFYDGQGFMSLQLNQDQAHFIFYDVFGNILYRWSSRHPQPSTYLDEE

SEQ ID NO: 15747 - protein, 318 aa, Zea mays subsp. mays
  peptide (1)..(318): Ceres Seq. ID no. 12374303
  misc_feature (26)..(237): Pfam Name: Calcineurin-like phosphoesterase Pfam Description: Calcineurin-like phosphoesterase
  misc_feature (1)..(305): Homolog of NCBI NO: 37530584 NR Description: putative purple acid phosphatase [Oryza sativa
  misc_feature (1)..(306): Homolog of NCBI NO: 39918795 NR Description: putative acid phosphatase [Lupinus luteus]
  misc_feature (11)..(310): Homolog of NCBI NO: 30683951 NR Description: calcineurin-like phosphoesterase family thaliana] >gi|24030193|gb|AAN41277.1| putative purple acid
  misc_feature (11)..(310): Homolog of NCBI NO: 30911094 NR Description: putative purple acid phosphatase [Arabidopsis
  misc_feature (12)..(304): Homolog of NCBI NO: 18401643 NR Description: acid phosphatase type 5; protein id: At3g17790.1, by cDNA: 113666. [Arabidopsis thaliana] acid phosphatase type 5 [Arabidopsis thaliana]
MTALCCAPGAAELPRLDHPARSDGSLKLLVVGDWGRKGTHNQSRVADQMGRVGEKLDIDFVISTGDNFYKDGLKGVRDQAFEESFVDIYTAQSLQKPWYSVLGNHDYRGNALAQLSPVLRKIDDRFICMRSFIVNAELVDFFFVDTTPFQLEYWTHPGKDRYDWRGVAPRGKYIANLLKDLDVAMKKSTARWKIVAGHHTMRSVSEHGDTKELLELLLPVLKDNGVDFYINGHDHCLEHISSRDSPLQYFTSGGGSKAWRGVFHPNKDKLRFFYDGQGFMSLQLNQDQAHFIFYDVFGNILYRWSSRHPQPSTYLDEE

SEQ ID NO: 15748 - DNA, 1305 bp, Zea mays subsp. mays
  misc_feature (1)..(1305): Ceres Seq. ID no. 12350207
  misc_feature: MA Experiment ID: 108522 Result: Up-regulated in Transcription
  misc_feature: MA Experiment 108522 PARAMETER Experiment Name: Zm_42deg_Heat_P Parameter: Age (day) Value: 8
  misc_feature: MA Experiment 108522 PARAMETER Experiment Name: Zm_42deg_Heat_P Parameter: Organism Value: Zea mays
  misc_feature: MA Experiment 108522 PARAMETER Experiment Name: Zm_42deg_Heat_P Parameter: Plant Line Value: 35A19
  misc_feature: MA Experiment 108522 PARAMETER Experiment Name: Zm_42deg_Heat_P Parameter: Temperature (deg C) Value: 42 vs. 22
  misc_feature: MA Experiment 108522 PARAMETER Experiment Name: Zm_42deg_Heat_P Parameter: Timepoint (hr) Value: 1
  misc_feature: MA Experiment 108522 PARAMETER Experiment Name: Zm_42deg_Heat_P Parameter: Tissue Value: Aerial
  misc_feature: MA Experiment ID: 108556 Result: Up-regulated in Transcription
  misc_feature: MA Experiment 108556 PARAMETER Experiment Name: Zm_Drought_P Parameter: Age (day) Value: 9
  misc_feature: MA Experiment 108556 PARAMETER Experiment Name: Zm_Drought_P Parameter: Organism Value: Zea mays
  misc_feature: MA Experiment 108556 PARAMETER Experiment Name: Zm_Drought_P Parameter: Plant Line Value: 35A19
  misc_feature: MA Experiment 108556 PARAMETER Experiment Name: Zm_Drought_P Parameter: Timepoint (hr) Value: 24
  misc_feature: MA Experiment 108556 PARAMETER Experiment Name: Zm_Drought_P Parameter: Tissue Value: Aerial
  misc_feature: MA Experiment 108556 PARAMETER Experiment Name: Zm_Drought_P Parameter: Treatment Value: Drought vs. No Drought
  misc_feature: MA Experiment ID: 108689 Result: Up-regulated in Transcription
  misc_feature: MA Experiment 108689 PARAMETER Experiment Name: Zm_Drought_Roots_P Parameter: Age (day) Value: 9
  misc_feature: MA Experiment 108689 PARAMETER Experiment Name: Zm_Drought_Roots_P Parameter: Organism Value: Zea mays
  misc_feature: MA Experiment 108689 PARAMETER Experiment Name: Zm_Drought_Roots_P Parameter: Plant Line Value: 35A19
  misc_feature: MA Experiment 108689 PARAMETER Experiment Name: Zm_Drought_Roots_P Parameter: Timepoint (hr) Value: 24
  misc_feature: MA Experiment 108689 PARAMETER Experiment Name: Zm_Drought_Roots_P Parameter: Tissue Value: Roots
  misc_feature: MA Experiment 108689 PARAMETER Experiment Name: Zm_Drought_Roots_P Parameter: Treatment Value: Drought vs. No Drought
  misc_feature: MA Experiment ID: 20000480 Result: Up-regulated in Transcription
  misc_feature: MA Experiment 20000480 PARAMETER Experiment Name: Zm_Drought_P Parameter: Age (day) Value: 11
  misc_feature: MA Experiment 20000480 PARAMETER Experiment Name: Zm_Drought_P Parameter: Organism Value: Zea mays
  misc_feature: MA Experiment 20000480 PARAMETER Experiment Name: Zm_Drought_P Parameter: Plant Line Value: 35A19
  misc_feature: MA Experiment 20000480 PARAMETER Experiment Name: Zm_Drought_P Parameter: Timepoint (hr) Value: 72
  misc_feature: MA Experiment 20000480 PARAMETER Experiment Name: Zm_Drought_P Parameter: Tissue Value: Aerial
  misc_feature: MA Experiment 20000480 PARAMETER Experiment Name: Zm_Drought_P Parameter: Treatment Value: Drought vs. No Drought
accgcaaacgccaccacgcccacgcctcgccgcgcaccacatctgaaacctccagcccgacgccggcgccggcgccgctgctcgcctgctcgtcacatttcctggtgcccgccaagccccgcgacctgggctccccagctccatccatcaaccgcctgcagccgcggaaatggcagcgccgacgacgctgcgctcggcggcggcgcgggcgcgcgcgcgcgcagcggagctcgtgagagggcggtggccgcagcggcgtctggggacgacgtccgcggcggagacggagagcaaaaagaataaggaggaggaggaggagggggccgggtgggagctctcggcggcgcgggagtactacgactaccgcaagtctatctacggcgacgtcacgcaccgcgccctcctcgtcggacgccgtcggcaccctcgtcgtccccgcccagcccaccgcgcaggtgtataagagcattggtgagaagtatggagtgaagtactcggaagacgagatcctgatgagataccggcgggcatacgagcaaccatggggtggatcacgtctcaggtatgtggatgatgggagaaccttttggcagcatatagtcacttcttctacaggatgttcagatgcacagtactttgaggaactctatcaatactttatgacagaaaaggcctggaagctttgtgaccccgatgccgaaagtgtatttaaagctttgaggaaagctggcgttaaaactgcagtcgtctccaatttcgatacccgtctacggccactcctgcaggccttgaaatgtgaccactggtttgatgcagttgcagtctctgcagaggttgcagcagagaagccgaacccaataatattcttgaaggcctgtgagttactgggcgtgaagcctgaagaagctgtgcacgttggcgacgatcgtagaaatgatatatggggagcgagagatgcaggctgcgatgcttggctctggggcagcgacgttcgctctttcaaggaggttgccgagcggatcggtgttgaggtgacgaagtgaggtaggatggtgaatatacggaggcagaggtagtagttacccaggatcgcggtcgtgaaggaagccagtgacccccatccttgtggtgaaattcctgtgctggtttgtaggcttgtagctgtatgtatgacaacttattagggttccgttgaacctactatgcatgcatgcttgctgccctgacagtgacaggcgaatgcgtgccacgcacttgaatctgagggtctgggactctgggttattgaattattatcgcctggtt

SEQ ID NO: 15749 - protein, 176 aa, Zea mays subsp. mays
  peptide (1)..(176): Ceres Seq. ID no. 12350208
  misc_feature (1)..(159): Pfam Name: haloacid dehalogenase-like hydrolase Pfam Description: haloacid dehalogenase-like hydrolase
  misc_feature (1)..(165): Homolog of NCBI NO: 34899086 NR Description: contains ESTs to Arabidopsis thaliana chromosome 2, At2g41250~unknown protein
  misc_feature (1)..(174): Homolog of NCBI NO: 15227309 NR Description: hypothetical protein; protein id: At2g41250.1, by cDNA: gi_17979160 [Arabidopsis thaliana]
  misc_feature (1)..(170): Homolog of NCBI NO: 28393346 NR Description: unknown protein [Arabidopsis thaliana]
  misc_feature (1)..(170): Homolog of NCBI NO: 30683719 NR Description: haloacid dehalogenase-like hydrolase family
  misc_feature (1)..(150): Homolog of NCBI NO: 37520921 NR Description: hypothetical protein gll1352 [Gloeobacter
  misc_feature (1)..(155): Homolog of NCBI NO: 27714603 NR Description: similar to RIKEN cDNA 2810435D12 [Mus musculus]
  misc_feature (1)..(158): Homolog of NCBI NO: 17553988 NR Description: Predicted CDS, haloacid dehalogenase-like [Caenorhabditis elegans] >gi|13548390|emb|CAC35822.1|
  misc_feature (1)..(155): Homolog of NCBI NO: 17231587 NR Description: hypothetical protein [Nostoc sp. PCC 7120]
  misc_feature (1)..(155): Homolog of NCBI NO: 23041810 NR Description: hypothetical protein [Trichodesmium erythraeum
  misc_feature (1)..(155): Homolog of NCBI NO: 21312204 NR Description: RIKEN cDNA 2810435D12 [Mus musculus] unnamed protein product [Mus musculus] RIKEN cDNA 2810435D12 gene [Mus musculus]
MRYRRAYEQPWGGSRLRYVDDGRTFWQHIVTSSTGCSDAQYFEELYQYFMTEKAWKLCDPDAESVFKALRKAGVKTAVVSNFDTRLRPLLQALKCDHWFDAVAVSAEVAAEKPNPIIFLKACELLGVKPEEAVHVGDDRRNDIWGARDAGCDAWLWGSDVRSFKEVAERIGVEVTK

SEQ ID NO: 15750 - protein, 127 aa, Zea mays subsp. mays
  peptide (1)..(127): Ceres Seq. ID no. 12350209
  misc_feature (1)..(110): Pfam Name: haloacid dehalogenase-like hydrolase Pfam Description: haloacid dehalogenase-like hydrolase
  misc_feature (1)..(116): Homolog of NCBI NO: 34899086 NR Description: contains ESTs to Arabidopsis thaliana chromosome 2, At2g41250~unknown protein
  misc_feature (1)..(125): Homolog of NCBI NO: 15227309 NR Description: hypothetical protein; protein id: At2g41250.1, by cDNA: gi_17979160 [Arabidopsis thaliana]
  misc_feature (1)..(121): Homolog of NCBI NO: 28393346 NR Description: unknown protein [Arabidopsis thaliana]
  misc_feature (1)..(121): Homolog of NCBI NO: 30683719 NR Description: haloacid dehalogenase-like hydrolase family
  misc_feature (1)..(101): Homolog of NCBI NO: 37520921 NR Description: hypothetical protein gll1352 [Gloeobacter
  misc_feature (1)..(106): Homolog of NCBI NO: 27714603 NR Description: similar to RIKEN cDNA 2810435D12 [Mus musculus]
  misc_feature (1)..(109): Homolog of NCBI NO: 17553988 NR Description: Predicted CDS, haloacid dehalogenase-like [Caenorhabditis elegans] >gi|13548390|emb|CAC35822.1|
  misc_feature (1)..(106): Homolog of NCBI NO: 17231587 NR Description: hypothetical protein [Nostoc sp. PCC 7120]
  misc_feature (1)..(106): Homolog of NCBI NO: 23041810 NR Description: hypothetical protein [Trichodesmium erythraeum
  misc_feature (1)..(106): Homolog of NCBI NO: 21312204 NR Description: RIKEN cDNA 2810435D12 [Mus musculus] unnamed protein product [Mus musculus] RIKEN cDNA 2810435D12 gene [Mus musculus]
MTEKAWKLCDPDAESVFKALRKAGVKTAVVSNFDTRLRPLLQALKCDHWFDAVAVSAEVAAEKPNPIIFLKACELLGVKPEEAVHVGDDRRNDIWGARDAGCDAWLWGSDVRSFKEVAERIGVEVTK

SEQ ID NO: 15751 - protein, 100 aa, Zea mays subsp. mays
  peptide (1)..(100): Ceres Seq. ID no. 12350210
TANATTPTPRRAPHLKPPARRRRRRRCSPARHISWCPPSPATWAPQLHPSTACSRGNGSADDAALGGGAGARARSGARERAVAAAASGDDVRGGDGEQKE

SEQ ID NO: 15752 - DNA, 1206 bp, Zea mays subsp. mays
  misc_feature (1)..(1206): Ceres Seq. ID no. 12406819
  misc_feature: MA Experiment ID: 108528 Result: Up-regulated in Transcription
  misc_feature: MA Experiment 108528 PARAMETER Experiment Name: Zm_Imbibed_Seeds_P Parameter: Age (day) Value: 5 vs. 2
  misc_feature: MA Experiment 108528 PARAMETER Experiment Name: Zm_Imbibed_Seeds_P Parameter: Organism Value: Zea mays
  misc_feature: MA Experiment 108528 PARAMETER Experiment Name: Zm_Imbibed_Seeds_P Parameter: Plant Line Value: 35A19
  misc_feature: MA Experiment 108528 PARAMETER Experiment Name: Zm_Imbibed_Seeds_P Parameter: Tissue Value: Aerial vs. Embryo
  misc_feature: MA Experiment ID: 108530 Result: Up-regulated in Transcription
  misc_feature: MA Experiment 108530 PARAMETER Experiment Name: Zm_Imbibed_Seeds_P Parameter: Age (day) Value: 6 vs. 2
  misc_feature: MA Experiment 108530 PARAMETER Experiment Name: Zm_Imbibed_Seeds_P Parameter: Organism Value: Zea mays
  misc_feature: MA Experiment 108530 PARAMETER Experiment Name: Zm_Imbibed_Seeds_P Parameter: Plant Line Value: 35A19
  misc_feature: MA Experiment 108530 PARAMETER Experiment Name: Zm_Imbibed_Seeds_P Parameter: Tissue Value: Aerial vs. Embryo
  misc_feature: MA Experiment ID: 108535 Result: Down-regulated in Transcription
  misc_feature: MA Experiment 108535 PARAMETER Experiment Name: Zm_Meristem_P Parameter: Age (day) Value: 8
  misc_feature: MA Experiment 108535 PARAMETER Experiment Name: Zm_Meristem_P Parameter: Organism Value: Zea mays
  misc_feature: MA Experiment 108535 PARAMETER Experiment Name: Zm_Meristem_P Parameter: Plant Line Value: 35A19
  misc_feature: MA Experiment 108535 PARAMETER Experiment Name: Zm_Meristem_P Parameter: Tissue Value: Root Meristem vs. Above Root Meristem
  misc_feature: MA Experiment ID: 108687 Result: Down-regulated in Transcription
  misc_feature: MA Experiment 108687 PARAMETER Experiment Name: Zm_Embryos-Flowers__P Parameter: Tissue Value: Embryo vs. Aerial+
  misc_feature: MA Experiment ID: 20000492 Result: Down-regulated in Transcription
  misc_feature: MA Experiment 20000492 PARAMETER Experiment Name: Zm_Hybrid_Seed_Dev_P Parameter: DAP Value: 12
  misc_feature: MA Experiment 20000492 PARAMETER Experiment Name: Zm_Hybrid_Seed_Dev_P Parameter: Organism Value: Zea mays
  misc_feature: MA Experiment 20000492 PARAMETER Experiment Name: Zm_Hybrid_Seed_Dev_P Parameter: Plant Line Value: 35A19
  misc_feature: MA Experiment 20000492 PARAMETER Experiment Name: Zm_Hybrid_Seed_Dev_P Parameter: Tissue Value: Fert Kernel vs. Unfert Floret
  misc_feature: MA Experiment ID: 20000535 Result: Down-regulated in Transcription
  misc_feature: MA Experiment 20000535 PARAMETER Experiment Name: Zm_Hybrid_Seed_Dev_P Parameter: DAP Value: 30 vs. 12
  misc_feature: MA Experiment 20000535 PARAMETER Experiment Name: Zm_Hybrid_Seed_Dev_P Parameter: Organism Value: Zea mays
  misc_feature: MA Experiment 20000535 PARAMETER Experiment Name: Zm_Hybrid_Seed_Dev_P Parameter: Plant Line Value: 35A19
  misc_feature: MA Experiment 20000535 PARAMETER Experiment Name: Zm_Hybrid_Seed_Dev_P Parameter: Tissue Value: Embryo vs. Unfert Floret
gttcccccggttattctattccctttccctcccccgcctcctctgctcctcgctctcccacccgctcgggcatccgccacacggccacaccaacactgcactccaccgcggcccgccacagtcctcctcctccgtcgccgtcgttcttcagcggcgccttcgcttccccagcacggtaccctagcatcagcgattcagcgctcaatacaagccaccgcggccatggcgcccgcaccggcagctctctccgcggccaacgccctctcgctgctcgcgcccgctagagtctcctccggaaggtggagcagcctgtccgtctccgtctcagcccggcccgtgaccggggtggtgtctgtcgcggcggccacggcgcagaggaggctggtcgccgcggcggcggcgacggagatggcgcccgcggcgagcggggaagaagggagcaagccgttcgtggaggagatgcgggcggtcgcgatgaagctccacaccaaggaccaggcccgggagggggagaaggagccccaggcgccccccgtcgccaagtgggagccctccgtcgaggggtacctccgattcctcgtcgacagcaagctcgtcttccagacgctcgaagccattgtcgagcgcgccgccgtcccgtggtatgcagagtttcggaatactgggctggagagatcagaggcgctgaaaaatgatctggaatggttcaggcaacagggccacacaattccagaaccatcggctcctggcaccacatacgcttctctactggaagagctgtctgaggaggacccccaggcctttatctgccatttctataacgtgtactttgctcatactgctggaggccgaatgattggcaaaaaggtttccgagaagattctgaacaacaaagagctggagttctacaagtgggagggcaatctctcctagctgctgcagaacgtccgcaacaagcttaaccaagtcgcttcgagctggtctcgggaggagaaggaccactgcctggaggagacggagaagtcgttctcttactcaggaggcctcctccgccatatatttacctgatctatcattgctggttgatccagtctcaaacgctgtaaatacatagtcctttgaatgttaaaactttattactggtgagggggatctcctgccccaggtacggtttacctgcattcaagttgctcagtgtcttacttg

SEQ ID NO: 15753 - protein, 310 aa, Zea mays subsp. mays
  peptide (1)..(310): Ceres Seq. ID no. 12406820
  misc_feature (173)..(310): Pfam Name: Heme oxygenase Pfam Description: Heme oxygenase
  misc_feature (127)..(310): Homolog of NCBI NO: 14485575 NR Description: heme oxygenase 1 [Lycopersicon esculentum]
  misc_feature (173)..(310): Homolog of NCBI NO: 14485571 NR Description: heme oxygenase 1 [Sorghum bicolor]
VPPVILFPFPPPPPLLLALPPARASATRPHQHCTPPRPATVLLLRRRRSSAAPSLPQHGTLASAIQRSIQATAAMAPAPAALSAANALSLLAPARVSSGRWSSLSVSVSARPVTGVVSVAAATAQRRLVAAAAATEMAPAASGEEGSKPFVEEMRAVAMKLHTKDQAREGEKEPQAPPVAKWEPSVEGYLRFLVDSKLVFQTLEAIVERAAVPWYAEFRNTGLERSEALKNDLEWFRQQGHTIPEPSAPGTTYASLLEELSEEDPQAFICHFYNVYFAHTAGGRMIGKKVSEKILNNKELEFYKWEGNLS

SEQ ID NO: 15754 - protein, 236 aa, Zea mays subsp. mays
  peptide (1)..(236): Ceres Seq. ID no. 12406821
  misc_feature (99)..(236): Pfam Name: Heme oxygenase Pfam Description: Heme oxygenase
  misc_feature (53)..(236): Homolog of NCBI NO: 14485575 NR Description: heme oxygenase 1 [Lycopersicon esculentum]
  misc_feature (99)..(236): Homolog of NCBI NO: 14485571 NR Description: heme oxygenase 1 [Sorghum bicolor]
MAPAPAALSAANALSLLAPARVSSGRWSSLSVSVSARPVTGVVSVAAATAQRRLVAAAAATEMAPAASGEEGSKPFVEEMRAVAMKLHTKDQAREGEKEPQAPPVAKWEPSVEGYLRFLVDSKLVFQTLEAIVERAAVPWYAEFRNTGLERSEALKNDLEWFRQQGHTIPEPSAPGTTYASLLEELSEEDPQAFICHFYNVYFAHTAGGRMIGKKVSEKILNNKELEFYKWEGNLS

SEQ ID NO: 15755 - protein, 174 aa, Zea mays subsp. mays
  peptide (1)..(174): Ceres Seq. ID no. 12406822
  misc_feature (37)..(174): Pfam Name: Heme oxygenase Pfam Description: Heme oxygenase
  misc_feature (1)..(174): Homolog of NCBI NO: 14485575 NR Description: heme oxygenase 1 [Lycopersicon esculentum]
  misc_feature (37)..(174): Homolog of NCBI NO: 14485571 NR Description: heme oxygenase 1 [Sorghum bicolor]
MAPAASGEEGSKPFVEEMRAVAMKLHTKDQAREGEKEPQAPPVAKWEPSVEGYLRFLVDSKLVFQTLEAIVERAAVPWYAEFRNTGLERSEALKNDLEWFRQQGHTIPEPSAPGTTYASLLEELSEEDPQAFICHFYNVYFAHTAGGRMIGKKVSEKILNNKELEFYKWEGNLS

SEQ ID NO: 15756 - DNA, 1863 bp, Zea mays subsp. mays
  misc_feature (1)..(1863): Ceres Seq. ID no. 12406346
  misc_feature: MA Experiment ID: 108523 Result: Up-regulated in Transcription
  misc_feature: MA Experiment 108523 PARAMETER Experiment Name: Zm_42deg_Heat_P Parameter: Age (day) Value: 8
  misc_feature: MA Experiment 108523 PARAMETER Experiment Name: Zm_42deg_Heat_P Parameter: Organism Value: Zea mays
  misc_feature: MA Experiment 108523 PARAMETER Experiment Name: Zm_42deg_Heat_P Parameter: Plant Line Value: 35A19
  misc_feature: MA Experiment 108523 PARAMETER Experiment Name: Zm_42deg_Heat_P Parameter: Temperature (deg C) Value: 42 vs. 22
  misc_feature: MA Experiment 108523 PARAMETER Experiment Name: Zm_42deg_Heat_P Parameter: Timepoint (hr) Value: 6
  misc_feature: MA Experiment 108523 PARAMETER Experiment Name: Zm_42deg_Heat_P Parameter: Tissue Value: Aerial
  misc_feature: MA Experiment ID: 108527 Result: Up-regulated in Transcription
  misc_feature: MA Experiment 108527 PARAMETER Experiment Name: Zm_5mM_NO_P Parameter: Age (day) Value: 8
  misc_feature: MA Experiment 108527 PARAMETER Experiment Name: Zm_5mM_NO_P Parameter: Organism Value: Zea mays
  misc_feature: MA Experiment 108527 PARAMETER Experiment Name: Zm_5mM_NO_P Parameter: Plant Line Value: 35A19
  misc_feature: MA Experiment 108527 PARAMETER Experiment Name: Zm_5mM_NO_P Parameter: Timepoint (hr) Value: 6
  misc_feature: MA Experiment 108527 PARAMETER Experiment Name: Zm_5mM_NO_P Parameter: Tissue Value: Aerial
  misc_feature: MA Experiment 108527 PARAMETER Experiment Name: Zm_5mM_NO_P Parameter: Treatment Value: 5mM NO vs. No Treatment
  misc_feature: MA Experiment ID: 108534 Result: Up-regulated in Transcription
  misc_feature: MA Experiment 108534 PARAMETER Experiment Name: Zm_4deg_Cold_P Parameter: Age (hr) Value: 8
  misc_feature: MA Experiment 108534 PARAMETER Experiment Name: Zm_4deg_Cold_P Parameter: Organism Value: Zea mays
  misc_feature: MA Experiment 108534 PARAMETER Experiment Name: Zm_4deg_Cold_P Parameter: Plant Line Value: 35A19
  misc_feature: MA Experiment 108534 PARAMETER Experiment Name: Zm_4deg_Cold_P Parameter: Temperature (deg C) Value: 4 vs. 22
  misc_feature: MA Experiment 108534 PARAMETER Experiment Name: Zm_4deg_Cold_P Parameter: Timepoint (hr) Value: 6
  misc_feature: MA Experiment 108534 PARAMETER Experiment Name: Zm_4deg_Cold_P Parameter: Tissue Value: Aerial
  misc_feature: MA Experiment ID: 108543 Result: Up-regulated in Transcription
  misc_feature: MA Experiment ID: 20000535 Result: Down-regulated in Transcription
  misc_feature: MA Experiment 20000535 PARAMETER Experiment Name: Zm_Hybrid_Seed_Dev_P Parameter: DAP Value: 30 vs. 12
  misc_feature: MA Experiment 20000535 PARAMETER Experiment Name: Zm_Hybrid_Seed_Dev_P Parameter: Organism Value: Zea mays
  misc_feature: MA Experiment 20000535 PARAMETER Experiment Name: Zm_Hybrid_Seed_Dev_P Parameter: Plant Line Value: 35A19
  misc_feature: MA Experiment 20000535 PARAMETER Experiment Name: Zm_Hybrid_Seed_Dev_P Parameter: Tissue Value: Embryo vs. Unfert Floret
  misc_feature: MA Experiment ID: 20000626 Result: Down-regulated in Transcription
  misc_feature: MA Experiment 20000626 PARAMETER Experiment Name: Zm_Herbicide-Treatments_P Parameter: Timepoint (hr) Value: 12
  misc_feature: MA Experiment 20000626 PARAMETER Experiment Name: Zm_Herbicide-Treatments_P Parameter: Tissue Value: Aerial
  misc_feature: MA Experiment 20000626 PARAMETER Experiment Name: Zm_Herbicide-Treatments_P Parameter: Treatment Value: Roundup vs. No Treatment
  misc_feature: MA Experiment ID: 20000629 Result: Down-regulated in Transcription
  misc_feature: MA Experiment 20000629 PARAMETER Experiment Name: Zm_Herbicide-Treatments_P Parameter: Timepoint (hr) Value: 12
  misc_feature: MA Experiment 20000629 PARAMETER Experiment Name: Zm_Herbicide-Treatments_P Parameter: Tissue Value: Aerial
  misc_feature: MA Experiment 20000629 PARAMETER Experiment Name: Zm_Herbicide-Treatments_P Parameter: Treatment Value: Trimec vs. No Treatment
gattcctccactccggccttgcccgacgatctccagctgtccttcaatcaaattatcaacccaacgccatttcggcgctcccgcttcccacaggagtcacagctcaacaaatccctacccaaatccacctccccgccccccaccgccatggctcccccaccaacctcgcgctgcctcgccctcgctctcatcctcatcggcgccctctgcgccgccgccgccgccgcgcggttcgccccggcggacaaccacctccttgcgtgcggcgcggcggcgcccgccgtcctccccgacggccgccgcttcgtgccggactctggctgcgcatccacccgcctccggtcatcctccccgtccctctcctccgcggcgccgcccggctccccgccgccgccgtcctcgctcctcgcctccgctcgggtcttctcctgccgcgcgtcctacgacctcgatgtccgccgccgcgggcaccacatcctccgcctccatttctaccccttcgtccccgccctcgccgcggcccgcttccacgtcggcgccggggggctcctcctcctccacaacttcacggcctcgtcccccgtcgtcaaggagttcatcctccccgtggactccgacgtcctcgtgctcaccttcgtccccgactccggctccactgccttcgtcaacgccatcgagctcgtctctgcgcccgaagagctcgttggcgacatcggcaccctagtcacgtccggcggcgccgctcagatacacgagctgtcgtctcaggtgtttgagactctctacaggatcaacgtcgcggggcgcaaggtcacgccattcaacgacacactgtggcggacatgggttaacgatgagaaattcctcatcgacaccgactcctccaactacatggtgtggtcgtccagtggccggattgcttatcccaagggtagcaagcagatgacaagagaagtggctcctgacaatgtctacaactctgcaagatccgtgaggccaggggtgaatgtgacttggggtttccctgtgcctgctagcagccggtaccttgtgcgtatgcacttctgtgacattgctagcaaggctctgtatgagctctacttcaatatctacgtcaatggtgatcttgcagtcaaggatttcgatctctccagtgcaactggattcttggcctatccttattacattgactttatcgtcgatgtgaaggatgaggggatactgaaattggcgattggtggcttaaagaagagtcgatctgatgaagtaagtggtatccttaatgcactggagataatgaggatgaacaagaccagtggaggtatggatggagacttcccaattgatctacacatggaatatgtggtgagtaaggggattggagaatttgcccgctccctgctctgtggtttcatctttgttgggttgtttgtggctttggtcacgctgatggtgaggttgaggaccgagttgaggaataacggcacagcttggtcctggagacagatgaactccgatgaagggaaactggccagaacatatcagcttgtgcccagtaagacggactattgaatattgcaggctgggcatctttgaggagtgacaacctgcggctgttgtgtgcatctaatcacatcatactttttattaagttgtaagtactgtagttttatcacctctctaaaagtattgtagttttgtatcatcactcctttcatgcttggactttgcattctccatgctttgtcaatggtcaatggaggacatgctcatgatgctgtaaaagtactctaccctagatgtggctgtattgctattgcctcatttattcagtttgacttctgaaacatggattcacagctg

SEQ ID NO: 15757 - protein, 523 aa, Zea mays subsp. mays
  peptide (1)..(523): Ceres Seq. ID no. 12406347
  misc_feature (78)..(474): Homolog of NCBI NO: 15231393 NR Description: receptor protein kinase -like; protein id:
  misc_feature (64)..(444): Homolog of NCBI NO: 24796812 NR Description: putative receptor-like protein kinase
  misc_feature (61)..(505): Homolog of NCBI NO: 15240228 NR Description: receptor-like protein kinase precursor - like
  misc_feature (56)..(485): Homolog of NCBI NO: 15239630 NR Description: receptor-protein kinase-like protein; protein id:
  misc_feature (61)..(363): Homolog of NCBI NO: 24417422 NR Description: unknown [Arabidopsis thaliana]
  misc_feature (208)..(490): Homolog of NCBI NO: 18411279 NR Description: contains weak similarity to S. cerevisiae BOB1
  misc_feature (66)..(498): Homolog of NCBI NO: 15226565 NR Description: putative protein kinase; protein id: At2g21480.1
  misc_feature (53)..(446): Homolog of NCBI NO: 14488367 NR Description: putative protein kinase [Oryza sativa (japonica
  misc_feature (53)..(498): Homolog of NCBI NO: 15234944 NR Description: putative receptor-like protein kinase; protein
  misc_feature (76)..(523): Homolog of NCBI NO: 15237872 NR Description: receptor-protein kinase-like protein; protein id:
DSSTPALPDDLQLSFNQIINPTPFRRSRFPQESQLNKSLPKSTSPPPTAMAPPPTSRCLALALILIGALCAAAAAARFAPADNHLLACGAAAPAVLPDGRRFVPDSGCASTRLRSSSPSLSSAAPPGSPPPPSSLLASARVFSCRASYDLDVRRRGHHILRLHFYPFVPALAAARFHVGAGGLLLLHNFTASSPVVKEFILPVDSDVLVLTFVPDSGSTAFVNAIELVSAPEELVGDIGTLVTSGGAAQIHELSSQVFETLYRINVAGRKVTPFNDTLWRTWVNDEKFLIDTDSSNYMVWSSSGRIAYPKGSKQMTREVAPDNVYNSARSVRPGVNVTWGFPVPASSRYLVRMHFCDIASKALYELYFNIYVNGDLAVKDFDLSSATGFLAYPYYIDFIVDVKDEGILKLAIGGLKKSRSDEVSGILNALEIMRMNKTSGGMDGDFPIDLHMEYVVSKGIGEFARSLLCGFIFVGLFVALVTLMVRLRTELRNNGTAWSWRQMNSDEGKLARTYQLVPSKTDY

SEQ ID NO: 15758 - protein, 474 aa, Zea mays subsp. mays
  peptide (1)..(474): Ceres Seq. ID no. 12406348
  misc_feature (12)..(456): Homolog of NCBI NO: 15240228 NR Description: receptor-like protein kinase precursor - like
  misc_feature (7)..(436): Homolog of NCBI NO: 15239630 NR Description: receptor-protein kinase-like protein; protein id:
  misc_feature (12)..(314): Homolog of NCBI NO: 24417422 NR Description: unknown [Arabidopsis thaliana]
  misc_feature (159)..(441): Homolog of NCBI NO: 18411279 NR Description: contains weak similarity to S. cerevisiae BOB1
  misc_feature (17)..(449): Homolog of NCBI NO: 15226565 NR Description: putative protein kinase; protein id: At2g21480.1
  misc_feature (4)..(397): Homolog of NCBI NO: 14488367 NR Description: putative protein kinase [Oryza sativa (japonica
  misc_feature (4)..(449): Homolog of NCBI NO: 15234944 NR Description: putative receptor-like protein kinase; protein
  misc_feature (27)..(474): Homolog of NCBI NO: 15237872 NR Description: receptor-protein kinase-like protein; protein id:
  misc_feature (29)..(425): Homolog of NCBI NO: 15231393 NR Description: receptor protein kinase -like; protein id:
  misc_feature (15)..(395): Homolog of NCBI NO: 24796812 NR Description: putative receptor-like protein kinase
MAPPPTSRCLALALILIGALCAAAAAARFAPADNHLLACGAAAPAVLPDGRRFVPDSGCASTRLRSSSPSLSSAAPPGSPPPPSSLLASARVFSCRASYDLDVRRRGHHILRLHFYPFVPALAAARFHVGAGGLLLLHNFTASSPVVKEFILPVDSDVLVLTFVPDSGSTAFVNAIELVSAPEELVGDIGTLVTSGGAAQIHELSSQVFETLYRINVAGRKVTPFNDTLWRTWVNDEKFLIDTDSSNYMVWSSSGRIAYPKGSKQMTREVAPDNVYNSARSVRPGVNVTWGFPVPASSRYLVRMHFCDIASKALYELYFNIYVNGDLAVKDFDLSSATGFLAYPYYIDFIVDVKDEGILKLAIGGLKKSRSDEVSGILNALEIMRMNKTSGGMDGDFPIDLHMEYVVSKGIGEFARSLLCGFIFVGLFVALVTLMVRLRTELRNNGTAWSWRQMNSDEGKLARTYQLVPSKTDY

SEQ ID NO: 15759 - DNA, 1407 bp, Zea mays subsp. mays
  misc_feature (1)..(1407): Ceres Seq. ID no. 12406721
  misc_feature: MA Experiment ID: 108527 Result: Down-regulated in Transcription
  misc_feature: MA Experiment 108527 PARAMETER Experiment Name: Zm_5mM_NO_P Parameter: Age (day) Value: 8
  misc_feature: MA Experiment 108527 PARAMETER Experiment Name: Zm_5mM_NO_P Parameter: Organism Value: Zea mays
  misc_feature: MA Experiment 108527 PARAMETER Experiment Name: Zm_5mM_NO_P Parameter: Plant Line Value: 35A19
  misc_feature: MA Experiment 108527 PARAMETER Experiment Name: Zm_5mM_NO_P Parameter: Timepoint (hr) Value: 6
  misc_feature: MA Experiment 108527 PARAMETER Experiment Name: Zm_5mM_NO_P Parameter: Tissue Value: Aerial
  misc_feature: MA Experiment 108527 PARAMETER Experiment Name: Zm_5mM_NO_P Parameter: Treatment Value: 5mM NO vs. No Treatment
  misc_feature: MA Experiment ID: 108528 Result: Up-regulated in Transcription
  misc_feature: MA Experiment 108528 PARAMETER Experiment Name: Zm_Imbibed_Seeds_P Parameter: Age (day) Value: 5 vs. 2
  misc_feature: MA Experiment 108528 PARAMETER Experiment Name: Zm_Imbibed_Seeds_P Parameter: Organism Value: Zea mays
  misc_feature: MA Experiment 108528 PARAMETER Experiment Name: Zm_Imbibed_Seeds_P Parameter: Plant Line Value: 35A19
  misc_feature: MA Experiment 108528 PARAMETER Experiment Name: Zm_Imbibed_Seeds_P Parameter: Tissue Value: Aerial vs. Embryo
  misc_feature: MA Experiment ID: 108530 Result: Up-regulated in Transcription
  misc_feature: MA Experiment 108530 PARAMETER Experiment Name: Zm_Imbibed_Seeds_P Parameter: Age (day) Value: 6 vs. 2
  misc_feature: MA Experiment 108530 PARAMETER Experiment Name: Zm_Imbibed_Seeds_P Parameter: Organism Value: Zea mays
  misc_feature: MA Experiment 108530 PARAMETER Experiment Name: Zm_Imbibed_Seeds_P Parameter: Plant Line Value: 35A19
  misc_feature: MA Experiment 108530 PARAMETER Experiment Name: Zm_Imbibed_Seeds_P Parameter: Tissue Value: Aerial vs. Embryo
  misc_feature: MA Experiment ID: 108534 Result: Up-regulated in Transcription
  misc_feature: MA Experiment 108534 PARAMETER Experiment Name: Zm_4deg_Cold_P Parameter: Age (hr) Value: 8
  misc_feature: MA Experiment 108534 PARAMETER Experiment Name: Zm_4deg_Cold_P Parameter: Organism Value: Zea mays
  misc_feature: MA Experiment 108534 PARAMETER Experiment Name: Zm_4deg_Cold_P Parameter: Plant Line Value: 35A19
  misc_feature: MA Experiment 108534 PARAMETER Experiment Name: Zm_4deg_Cold_P Parameter: Temperature (deg C) Value: 4 vs. 22
  misc_feature: MA Experiment 108534 PARAMETER Experiment Name: Zm_4deg_Cold_P Parameter: Timepoint (hr) Value: 6
  misc_feature: MA Experiment 108534 PARAMETER Experiment Name: Zm_4deg_Cold_P Parameter: Tissue Value: Aerial
  misc_feature: MA Experiment ID: 108556 Result: Down-regulated in Transcription
  misc_feature: MA Experiment 108556 PARAMETER Experiment Name: Zm_Drought_P Parameter: Age (day) Value: 9
  misc_feature: MA Experiment 108556 PARAMETER Experiment Name: Zm_Drought_P Parameter: Organism Value: Zea mays
  misc_feature: MA Experiment 108556 PARAMETER Experiment Name: Zm_Drought_P Parameter: Plant Line Value: 35A19
  misc_feature: MA Experiment 108556 PARAMETER Experiment Name: Zm_Drought_P Parameter: Timepoint (hr) Value: 24
  misc_feature: MA Experiment 108556 PARAMETER Experiment Name: Zm_Drought_P Parameter: Tissue Value: Aerial
  misc_feature: MA Experiment 108556 PARAMETER Experiment Name: Zm_Drought_P Parameter: Treatment Value: Drought vs. No Drought
  misc_feature: MA Experiment ID: 108559 Result: Down-regulated in Transcription
  misc_feature: MA Experiment 108559 PARAMETER Experiment Name: Zm_5mM_NO_P Parameter: Age (day) Value: 8
  misc_feature: MA Experiment 108559 PARAMETER Experiment Name: Zm_5mM_NO_P Parameter: Organism Value: Zea mays
  misc_feature: MA Experiment 108559 PARAMETER Experiment Name: Zm_5mM_NO_P Parameter: Plant Line Value: 35A19
  misc_feature: MA Experiment 108559 PARAMETER Experiment Name: Zm_5mM_NO_P Parameter: Timepoint (hr) Value: 12
  misc_feature: MA Experiment 108559 PARAMETER Experiment Name: Zm_5mM_NO_P Parameter: Tissue Value: Aerial
  misc_feature: MA Experiment 108559 PARAMETER Experiment Name: Zm_5mM_NO_P Parameter: Treatment Value: 5mM NO vs. No Treatment
  misc_feature: MA Experiment ID: 108597 Result: Down-regulated in Transcription
  misc_feature: MA Experiment 108597 PARAMETER Experiment Name: Zm_100uM_ABA_P Parameter: Age (day) Value: 9
  misc_feature: MA Experiment 108597 PARAMETER Experiment Name: Zm_100uM_ABA_P Parameter: Organism Value: Zea mays
  misc_feature: MA Experiment 108597 PARAMETER Experiment Name: Zm_100uM_ABA_P Parameter: Plant Line Value: 35A19
  misc_feature: MA Experiment 108597 PARAMETER Experiment Name: Zm_100uM_ABA_P Parameter: Timepoint (hr) Value: 24
  misc_feature: MA Experiment 108597 PARAMETER Experiment Name: Zm_100uM_ABA_P Parameter: Tissue Value: Aerial
  misc_feature: MA Experiment 108597 PARAMETER Experiment Name: Zm_100uM_ABA_P Parameter: Treatment Value: 100uM ABA vs. No Treatment
  misc_feature: MA Experiment ID: 20000479 Result: Down-regulated in Transcription
  misc_feature: MA Experiment 20000479 PARAMETER Experiment Name: Zm_Drought_P Parameter: Age (day) Value: 10
  misc_feature: MA Experiment 20000479 PARAMETER Experiment Name: Zm_Drought_P Parameter: Organism Value: Zea mays
  misc_feature: MA Experiment 20000479 PARAMETER Experiment Name: Zm_Drought_P Parameter: Plant Line Value: 35A19
  misc_feature: MA Experiment 20000479 PARAMETER Experiment Name: Zm_Drought_P Parameter: Timepoint (hr) Value: 48
  misc_feature: MA Experiment 20000479 PARAMETER Experiment Name: Zm_Drought_P Parameter: Tissue Value: Aerial
  misc_feature: MA Experiment 20000479 PARAMETER Experiment Name: Zm_Drought_P Parameter: Treatment Value: Drought vs. No Drought
  misc_feature: MA Experiment ID: 20000480 Result: Down-regulated in Transcription
  misc_feature: MA Experiment 20000480 PARAMETER Experiment Name: Zm_Drought_P Parameter: Age (day) Value: 11
  misc_feature: MA Experiment 20000480 PARAMETER Experiment Name: Zm_Drought_P Parameter: Organism Value: Zea mays
  misc_feature: MA Experiment 20000480 PARAMETER Experiment Name: Zm_Drought_P Parameter: Plant Line Value: 35A19
  misc_feature: MA Experiment 20000480 PARAMETER Experiment Name: Zm_Drought_P Parameter: Timepoint (hr) Value: 72
  misc_feature: MA Experiment 20000480 PARAMETER Experiment Name: Zm_Drought_P Parameter: Tissue Value: Aerial
  misc_feature: MA Experiment 20000480 PARAMETER Experiment Name: Zm_Drought_P Parameter: Treatment Value: Drought vs. No Drought
  misc_feature: MA Experiment ID: 20000488 Result: Down-regulated in Transcription
  misc_feature: MA Experiment 20000488 PARAMETER Experiment Name: Zm_50mM_NH4NO3_L_to_H_P Parameter: Organism Value: Zea mays
  misc_feature: MA Experiment 20000488 PARAMETER Experiment Name: Zm_50mM_NH4NO3_L_to_H_P Parameter: Timepoint (hr) Value: 8
  misc_feature: MA Experiment 20000488 PARAMETER Experiment Name: Zm_50mM_NH4NO3_L_to_H_P Parameter: Tissue Value: Leaves
  misc_feature: MA Experiment 20000488 PARAMETER Experiment Name: Zm_50mM_NH4NO3_L_to_H_P Parameter: Treatment Value: 50mM NH4NO3 vs. 100mM Mannitol
aaaacctctgaaccctcatcgagtttctgtggacgccacgccacgcgaccatacgtgtatagcacgcagcgcggcatcggcgtcgcacgcactcgcgcttgccgctggacggaggagcggagcaccgatcggccgggctcggtgcacgcgcctagcggatgaagatggccgtgctcgcgggcgcggccgtcgttgcggtggcggcggcggcgatggtcgccgcgctcctgtcctccccggacgcgctgcgcgacgtcgcggtgctggagattggcggcggggaaaggccgtgtcgagttggtccccgtggacgccggcgccgcggggcccgagagcctggcgttcgacccggccggcggcggcccgtacgcgggcgtgtcggacggccgcgtcctccggtgggtccccggcgagcggcgctgggaagagcactcggcctcctgcgcgcccgaactgctggacagctgcaggggctcccaggacccggggcgcgagcacgagtgcgggcgcccgttgggcctcaagttcaaccccgacacgggggagctctacgtggccgacgcctaccacggcctgcgcatggtcgcgccgggcccgggcggcggcaaggcgtcgaggccggtggcgccggagtggtggcagggcgcgcgcgccttcagcttcgccaacggcgtcgaggtcgacccgggcaccggcgccgtctacttcaccgagacgagcacgaggttccagaggcgggagttcctgcgcatcgtcgtgtccggcgacacgacggggcggctgctgcggtacgacccgaggggcggcggtggggtggaggtgctggccgacggcctggcgttccccaacggcctcgcgatgagcagcgacggcacgcacctgctgctggcggagaccaccacggggaggatcctccggtactggctccgcccgacggctcccaaggcgccggcgctgctggaggaggtggcgcggctgccgtggttcccggacaacatcaggatgagcccccggggcggcttctgggtggggctccacgccaggaggggcaagctcgcccagtactgcatctcctacccctggctccggcgcctggtgctggcgctgccgccgcgccacgtccagcgcgcctcgtcgctgctcagccgcctcgggcggcaggtcatcgcgctgcggctgagcgaggaggacgggagggtggtggagatggccagcgtccacggggatcttcggagggtgttcaggtccgtcagcgaagtggcggagaggaacggcagcatctggattggctctgtcatgtcgccgtttctcggagtctacaagttgcagtagaggcatttacgcttaaatatggattcagtagcttattatagcaaaggaaaacatacatcgcatctatatttgtgt

SEQ ID NO: 15760 - protein, 404 aa, Zea mays subsp. mays
  peptide (1)..(404): Ceres Seq. ID no. 12406722
  misc_feature (1)..(363): Homolog of NCBI NO: 465445 NR Description: PROBABLE NUCLEAR ANTIGEN
  misc_feature (38)..(286): Homolog of NCBI NO: 23105951 NR Description: hypothetical protein [Azotobacter vinelandii]
MKMAVLAGAAVVAVAAAAMVAALLSSPDALRDVAVLEIGGGERPCRVGPRGRRRRGAREPGVRPGRRRPVRGRVGRPRPPVGPRRAALGRALGLLRARTAGQLQGLPGPGARARVRAPVGPQVQPRHGGALRGRRLPRPAHGRAGPGRRQGVEAGGAGVVAGRARLQLRQRRRGRPGHRRRLLHRDEHEVPEAGVPAHRRVRRHDGAAAAVRPEGRRWGGGAGRRPGVPQRPRDEQRRHAPAAGGDHHGEDPPVLAPPDGSQGAGAAGGGGAAAVVPGQHQDEPPGRLLGGAPRQEGQARPVLHLLPLAPAPGAGAAAAPRPARLVAAQPPRAAGHRAAAERGGREGGGDGQRPRGSSEGVQVRQRSGGEERQHLDWLCHVAVSRSLQVAVEAFTLKYGFSSLL

SEQ ID NO: 15761 - protein, 402 aa, Zea mays subsp. mays
  peptide (1)..(402): Ceres Seq. ID no. 12406723
  misc_feature (1)..(361): Homolog of NCBI NO: 465445 NR Description: PROBABLE NUCLEAR ANTIGEN
  misc_feature (36)..(284): Homolog of NCBI NO: 23105951 NR Description: hypothetical protein [Azotobacter vinelandii]
MAVLAGAAVVAVAAAAMVAALLSSPDALRDVAVLEIGGGERPCRVGPRGRRRRGAREPGVRPGRRRPVRGRVGRPRPPVGPRRAALGRALGLLRARTAGQLQGLPGPGARARVRAPVGPQVQPRHGGALRGRRLPRPAHGRAGPGRRQGVEAGGAGVVAGRARLQLRQRRRGRPGHRRRLLHRDEHEVPEAGVPAHRRVRRHDGAAAAVRPEGRRWGGGAGRRPGVPQRPRDEQRRHAPAAGGDHHGEDPPVLAPPDGSQGAGAAGGGGAAAVVPGQHQDEPPGRLLGGAPRQEGQARPVLHLLPLAPAPGAGAAAAPRPARLVAAQPPRAAGHRAAAERGGREGGGDGQRPRGSSEGVQVRQRSGGEERQHLDWLCHVAVSRSLQVAVEAFTLKYGFSSLL

SEQ ID NO: 15762 - protein, 386 aa, Zea mays subsp. mays
  peptide (1)..(386): Ceres Seq. ID no. 12406724
  misc_feature (1)..(345): Homolog of NCBI NO: 465445 NR Description: PROBABLE NUCLEAR ANTIGEN
  misc_feature (20)..(268): Homolog of NCBI NO: 23105951 NR Description: hypothetical protein [Azotobacter vinelandii]
MVAALLSSPDALRDVAVLEIGGGERPCRVGPRGRRRRGAREPGVRPGRRRPVRGRVGRPRPPVGPRRAALGRALGLLRARTAGQLQGLPGPGARARVRAPVGPQVQPRHGGALRGRRLPRPAHGRAGPGRRQGVEAGGAGVVAGRARLQLRQRRRGRPGHRRRLLHRDEHEVPEAGVPAHRRVRRHDGAAAAVRPEGRRWGGGAGRRPGVPQRPRDEQRRHAPAAGGDHHGEDPPVLAPPDGSQGAGAAGGGGAAAVVPGQHQDEPPGRLLGGAPRQEGQARPVLHLLPLAPAPGAGAAAAPRPARLVAAQPPRAAGHRAAAERGGREGGGDGQRPRGSSEGVQVRQRSGGEERQHLDWLCHVAVSRSLQVAVEAFTLKYGFSSLL

SEQ ID NO: 15763 - DNA, 1517 bp, Zea mays subsp. mays; identical to SEQ ID NO: 6004
  misc_feature (1)..(1517): Ceres Seq. ID no. 13570867
  misc_feature: MA Experiment ID: 108527 Result: Down-regulated in Transcription
  misc_feature: MA Experiment 108527 PARAMETER Experiment Name: Zm_5mM_NO_P Parameter: Age (day) Value: 8
  misc_feature: MA Experiment 108527 PARAMETER Experiment Name: Zm_5mM_NO_P Parameter: Organism Value: Zea mays
  misc_feature: MA Experiment 108527 PARAMETER Experiment Name: Zm_5mM_NO_P Parameter: Plant Line Value: 35A19
  misc_feature: MA Experiment 108527 PARAMETER Experiment Name: Zm_5mM_NO_P Parameter: Timepoint (hr) Value: 6
  misc_feature: MA Experiment 108527 PARAMETER Experiment Name: Zm_5mM_NO_P Parameter: Tissue Value: Aerial
  misc_feature: MA Experiment 108527 PARAMETER Experiment Name: Zm_5mM_NO_P Parameter: Treatment Value: 5mM NO vs. No Treatment
  misc_feature: MA Experiment ID: 108528 Result: Up-regulated in Transcription
  misc_feature: MA Experiment 108528 PARAMETER Experiment Name: Zm_Imbibed_Seeds_P Parameter: Age (day) Value: 5 vs. 2
  misc_feature: MA Experiment 108528 PARAMETER Experiment Name: Zm_Imbibed_Seeds_P Parameter: Organism Value: Zea mays
  misc_feature: MA Experiment 108528 PARAMETER Experiment Name: Zm_Imbibed_Seeds_P Parameter: Plant Line Value: 35A19
  misc_feature: MA Experiment 108528 PARAMETER Experiment Name: Zm_Imbibed_Seeds_P Parameter: Tissue Value: Aerial vs. Embryo
  misc_feature: MA Experiment ID: 108530 Result: Up-regulated in Transcription
  misc_feature: MA Experiment 108530 PARAMETER Experiment Name: Zm_Imbibed_Seeds_P Parameter: Age (day) Value: 6 vs. 2
  misc_feature: MA Experiment 108530 PARAMETER Experiment Name: Zm_Imbibed_Seeds_P Parameter: Organism Value: Zea mays
  misc_feature: MA Experiment 108530 PARAMETER Experiment Name: Zm_Imbibed_Seeds_P Parameter: Plant Line Value: 35A19
  misc_feature: MA Experiment 108530 PARAMETER Experiment Name: Zm_Imbibed_Seeds_P Parameter: Tissue Value: Aerial vs. Embryo
  misc_feature: MA Experiment ID: 108547 Result: Up-regulated in Transcription
  misc_feature: MA Experiment 108547 PARAMETER Experiment Name: Zm_Imbibed_Seeds_P Parameter: Age (day) Value: 4 vs. 2
  misc_feature: MA Experiment 108547 PARAMETER Experiment Name: Zm_Imbibed_Seeds_P Parameter: Organism Value: Zea mays
  misc_feature: MA Experiment 108547 PARAMETER Experiment Name: Zm_Imbibed_Seeds_P Parameter: Plant Line Value: 35A19
  misc_feature: MA Experiment 108547 PARAMETER Experiment Name: Zm_Imbibed_Seeds_P Parameter: Tissue Value: Aerial vs. Embryo
  misc_feature: MA Experiment ID: 108556 Result: Down-regulated in Transcription
  misc_feature: MA Experiment 108556 PARAMETER Experiment Name: Zm_Drought_P Parameter: Age (day) Value: 9
  misc_feature: MA Experiment 108556 PARAMETER Experiment Name: Zm_Drought_P Parameter: Organism Value: Zea mays
  misc_feature: MA Experiment 108556 PARAMETER Experiment Name: Zm_Drought_P Parameter: Plant Line Value: 35A19
  misc_feature: MA Experiment 108556 PARAMETER Experiment Name: Zm_Drought_P Parameter: Timepoint (hr) Value: 24
  misc_feature: MA Experiment 108556 PARAMETER Experiment Name: Zm_Drought_P Parameter: Tissue Value: Aerial
  misc_feature: MA Experiment 108556 PARAMETER Experiment Name: Zm_Drought_P Parameter: Treatment Value: Drought vs. No Drought
  misc_feature: MA Experiment ID: 108688 Result: Down-regulated in Transcription
  misc_feature: MA Experiment 108688 PARAMETER Experiment Name: Zm_Embryos-Flowers__P Parameter: Tissue Value: Immature Flowers vs. Aerial+
  misc_feature: MA Experiment ID: 20000108 Result: Up-regulated in Transcription
  misc_feature: MA Experiment 20000108 PARAMETER Experiment Name: Zm_Root-Tips_P Parameter: Age (day) Value: 12
  misc_feature: MA Experiment 20000108 PARAMETER Experiment Name: Zm_Root-Tips_P Parameter: Organism Value: Zea mays
  misc_feature: MA Experiment 20000108 PARAMETER Experiment Name: Zm_Root-Tips_P Parameter: Tissue Value: Root tips vs. Root mid region    35
  misc_feature: MA Experiment 20000108 PARAMETER Experiment Name: Zm_Root-Tips_P Parameter: Tissue Value: Root tips vs. Root mid region   Sequence Listing-Misc Features (4)
  misc_feature: MA Experiment ID: 20000478 Result: Down-regulated in Transcription
  misc_feature: MA Experiment 20000478 PARAMETER Experiment Name: Zm_5mM_SA_P Parameter: Age (day) Value: 11
  misc_feature: MA Experiment 20000478 PARAMETER Experiment Name: Zm_5mM_SA_P Parameter: Organism Value: Zea mays
  misc_feature: MA Experiment 20000478 PARAMETER Experiment Name: Zm_5mM_SA_P Parameter: Plant Line Value: 35A19
  misc_feature: MA Experiment 20000478 PARAMETER Experiment Name: Zm_5mM_SA_P Parameter: Timepoint (hr) Value: 72
  misc_feature: MA Experiment 20000478 PARAMETER Experiment Name: Zm_5mM_SA_P Parameter: Tissue Value: Aerial
  misc_feature: MA Experiment 20000478 PARAMETER Experiment Name: Zm_5mM_SA_P Parameter: Treatment Value: 5mM SA vs. No Treatment

SEQ ID NO: 15764 - protein, 413 aa, Zea mays subsp. mays; identical to SEQ ID NO: 6005
  peptide (1)..(413): Ceres Seq. ID no. 13570868
  misc_feature (75)..(400): Pfam Name: GDSL-like Lipase/Acylhydrolase Pfam Description: GDSL-like Lipase/Acylhydrolase
  misc_feature (50)..(411): Homolog of NCBI NO: 34903956 NR Description: OSJNBa0038J17.23 [Oryza sativa (japonica >gi|7523511|dbj|BAA94239.1| unnamed protein product [Oryza sativa
  misc_feature (52)..(413): Homolog of NCBI NO: 34903958 NR Description: OSJNBa0038J17.24 [Oryza sativa (japonica >gi|7523510|dbj|BAA94238.1| unnamed protein product [Oryza sativa
  misc_feature (70)..(411): Homolog of NCBI NO: 34903978 NR Description: unnamed protein product [Oryza sativa (japonica group)] >gi|7523500|dbj|BAA94228.1| unnamed protein product
  misc_feature (39)..(411): Homolog of NCBI NO: 34903996 NR Description: unnamed protein product [Oryza sativa (japonica group)] >gi|7523491|dbj|BAA94219.1| unnamed protein product
  misc_feature (39)..(411): Homolog of NCBI NO: 34903994 NR Description: unnamed protein product [Oryza sativa (japonica group)] >gi|7523492|dbj|BAA94220.1| unnamed protein product
  misc_feature (39)..(413): Homolog of NCBI NO: 34903986 NR Description: unnamed protein product [Oryza sativa (japonica group)] >gi|7523496|dbj|BAA94224.1| unnamed protein product
  misc_feature (49)..(408): Homolog of NCBI NO: 15242538 NR Description: GDSL-motif lipase/hydrolase protein [Arabidopsis
  misc_feature (51)..(413): Homolog of NCBI NO: 21593234 NR Description: lipase, putative [Arabidopsis thaliana]
  misc_feature (49)..(408): Homolog of NCBI NO: 21553708 NR Description: GDSL-motif lipase/hydrolase-like protein
  misc_feature (51)..(413): Homolog of NCBI NO: 10764858 NR Description: F1K23.17 [Arabidopsis thaliana]

SEQ ID NO: 15765 - protein, 397 aa, Zea mays subsp. mays; identical to SEQ ID NO: 6006
  peptide (1)..(397): Ceres Seq. ID no. 13570869
  misc_feature (59)..(384): Pfam Name: GDSL-like Lipase/Acylhydrolase Pfam Description: GDSL-like Lipase/Acylhydrolase
  misc_feature (23)..(395): Homolog of NCBI NO: 34903996 NR Description: unnamed protein product [Oryza sativa (japonica group)] >gi|7523491|dbj|BAA94219.1| unnamed protein product
  misc_feature (23)..(395): Homolog of NCBI NO: 34903994 NR Description: unnamed protein product [Oryza sativa (japonica group)] >gi|7523492|dbj|BAA94220.1| unnamed protein product
  misc_feature (23)..(397): Homolog of NCBI NO: 34903986 NR Description: unnamed protein product [Oryza sativa (japonica group)] >gi|7523496|dbj|BAA94224.1| unnamed protein product
  misc_feature (33)..(392): Homolog of NCBI NO: 15242538 NR Description: GDSL-motif lipase/hydrolase protein [Arabidopsis
  misc_feature (36)..(397): Homolog of NCBI NO: 34903958 NR Description: OSJNBa0038J17.24 [Oryza sativa (japonica >gi|7523510|dbj|BAA94238.1| unnamed protein product [Oryza sativa
  misc_feature (54)..(395): Homolog of NCBI NO: 34903978 NR Description: unnamed protein product [Oryza sativa (japonica group)] >gi|7523500|dbj|BAA94228.1| unnamed protein product
  misc_feature (34)..(395): Homolog of NCBI NO: 34903956 NR Description: OSJNBa0038J17.23 [Oryza sativa (japonica >gi|7523511|dbj|BAA94239.1| unnamed protein product [Oryza sativa
  misc_feature (35)..(397): Homolog of NCBI NO: 21593234 NR Description: lipase, putative [Arabidopsis thaliana]
  misc_feature (33)..(392): Homolog of NCBI NO: 21553708 NR Description: GDSL-motif lipase/hydrolase-like protein
  misc_feature (35)..(397): Homolog of NCBI NO: 10764858 NR Description: F1K23.17 [Arabidopsis thaliana]

SEQ ID NO: 15766 - protein, 379 aa, Zea mays subsp. mays; identical to SEQ ID NO: 6007
  peptide (1)..(379): Ceres Seq. ID no. 13570870
  misc_feature (41)..(366): Pfam Name: GDSL-like Lipase/Acylhydrolase Pfam Description: GDSL-like Lipase/Acylhydrolase
  misc_feature (16)..(377): Homolog of NCBI NO: 34903956 NR Description: OSJNBa0038J17.23 [Oryza sativa (japonica >gi|7523511|dbj|BAA94239.1| unnamed protein product [Oryza sativa
  misc_feature (18)..(379): Homolog of NCBI NO: 34903958 NR Description: OSJNBa0038J17.24 [Oryza sativa (japonica >gi|7523510|dbj|BAA94238.1| unnamed protein product [Oryza sativa
  misc_feature (36)..(377): Homolog of NCBI NO: 34903978 NR Description: unnamed protein product [Oryza sativa (japonica group)] >gi|7523500|dbj|BAA94228.1| unnamed protein product
  misc_feature (5)..(377): Homolog of NCBI NO: 34903996 NR Description: unnamed protein product [Oryza sativa (japonica group)] >gi|7523491|dbj|BAA94219.1| unnamed protein product
  misc_feature (5)..(377): Homolog of NCBI NO: 34903994 NR Description: unnamed protein product [Oryza sativa (japonica group)] >gi|7523492|dbj|BAA94220.1| unnamed protein product
  misc_feature (5)..(379): Homolog of NCBI NO: 34903986 NR Description: unnamed protein product [Oryza sativa (japonica group)] >gi|7523496|dbj|BAA94224.1| unnamed protein product
  misc_feature (15)..(374): Homolog of NCBI NO: 15242538 NR Description: GDSL-motif lipase/hydrolase protein [Arabidopsis
  misc_feature (17)..(379): Homolog of NCBI NO: 21593234 NR Description: lipase, putative [Arabidopsis thaliana]
  misc_feature (15)..(374): Homolog of NCBI NO: 21553708 NR Description: GDSL-motif lipase/hydrolase-like protein
  misc_feature (17)..(379): Homolog of NCBI NO: 10764858 NR Description: F1K23.17 [Arabidopsis thaliana]

SEQ ID NO: 15767 - DNA, 1392 bp, Zea mays subsp. mays
  misc_feature (1)..(1392): Ceres Seq. ID no. 12381052
  misc_feature: MA Experiment ID: 108503 Result: Up-regulated in Transcription
  misc_feature: MA Experiment 108503 PARAMETER Experiment Name: Zm_Drought_P Parameter: Age (day) Value: 8
  misc_feature: MA Experiment 108503 PARAMETER Experiment Name: Zm_Drought_P Parameter: Organism Value: Zea mays
  misc_feature: MA Experiment 108503 PARAMETER Experiment Name: Zm_Drought_P Parameter: Plant Line Value: 35A19
  misc_feature: MA Experiment 108503 PARAMETER Experiment Name: Zm_Drought_P Parameter: Timepoint (hr) Value: 6
  misc_feature: MA Experiment 108503 PARAMETER Experiment Name: Zm_Drought_P Parameter: Tissue Value: Aerial
  misc_feature: MA Experiment 108503 PARAMETER Experiment Name: Zm_Drought_P Parameter: Treatment Value: Drought vs. No Drought
  misc_feature: MA Experiment ID: 108504 Result: Up-regulated in Transcription
  misc_feature: MA Experiment 108504 PARAMETER Experiment Name: Zm_Drought_P Parameter: Age (day) Value: 8
  misc_feature: MA Experiment 108504 PARAMETER Experiment Name: Zm_Drought_P Parameter: Organism Value: Zea mays
  misc_feature: MA Experiment 108504 PARAMETER Experiment Name: Zm_Drought_P Parameter: Plant Line Value: 35A19
  misc_feature: MA Experiment 108504 PARAMETER Experiment Name: Zm_Drought_P Parameter: Timepoint (hr) Value: 12
  misc_feature: MA Experiment 108504 PARAMETER Experiment Name: Zm_Drought_P Parameter: Tissue Value: Aerial
  misc_feature: MA Experiment 108504 PARAMETER Experiment Name: Zm_Drought_P Parameter: Treatment Value: Drought vs. No Drought
  misc_feature: MA Experiment ID: 108528 Result: Up-regulated in Transcription
  misc_feature: MA Experiment 108528 PARAMETER Experiment Name: Zm_Imbibed_Seeds_P Parameter: Age (day) Value: 5 vs. 2
  misc_feature: MA Experiment 108528 PARAMETER Experiment Name: Zm_Imbibed_Seeds_P Parameter: Organism Value: Zea mays
  misc_feature: MA Experiment 108528 PARAMETER Experiment Name: Zm_Imbibed_Seeds_P Parameter: Plant Line Value: 35A19
  misc_feature: MA Experiment 108528 PARAMETER Experiment Name: Zm_Imbibed_Seeds_P Parameter: Tissue Value: Aerial vs. Embryo
  misc_feature: MA Experiment ID: 108530 Result: Up-regulated in Transcription
  misc_feature: MA Experiment 108530 PARAMETER Experiment Name: Zm_Imbibed_Seeds_P Parameter: Age (day) Value: 6 vs. 2
  misc_feature: MA Experiment 108530 PARAMETER Experiment Name: Zm_Imbibed_Seeds_P Parameter: Organism Value: Zea mays
  misc_feature: MA Experiment 108530 PARAMETER Experiment Name: Zm_Imbibed_Seeds_P Parameter: Plant Line Value: 35A19
  misc_feature: MA Experiment 108530 PARAMETER Experiment Name: Zm_Imbibed_Seeds_P Parameter: Tissue Value: Aerial vs. Embryo
  misc_feature: MA Experiment ID: 108533 Result: Down-regulated in Transcription
  misc_feature: MA Experiment 108533 PARAMETER Experiment Name: Zm_4deg_Cold_P Parameter: Age (hr) Value: 8
  misc_feature: MA Experiment 108533 PARAMETER Experiment Name: Zm_4deg_Cold_P Parameter: Organism Value: Zea mays
  misc_feature: MA Experiment 108533 PARAMETER Experiment Name: Zm_4deg_Cold_P Parameter: Plant Line Value: 35A19
  misc_feature: MA Experiment 108533 PARAMETER Experiment Name: Zm_4deg_Cold_P Parameter: Temperature (deg C) Value: 4 vs. 22
  misc_feature: MA Experiment 108533 PARAMETER Experiment Name: Zm_4deg_Cold_P Parameter: Timepoint (hr) Value: 1
  misc_feature: MA Experiment 108533 PARAMETER Experiment Name: Zm_4deg_Cold_P Parameter: Tissue Value: Aerial
  misc_feature: MA Experiment ID: 108534 Result: Down-regulated in Transcription
  misc_feature: MA Experiment 108534 PARAMETER Experiment Name: Zm_4deg_Cold_P Parameter: Age (hr) Value: 8
  misc_feature: MA Experiment 108534 PARAMETER Experiment Name: Zm_4deg_Cold_P Parameter: Organism Value: Zea mays
  misc_feature: MA Experiment 108534 PARAMETER Experiment Name: Zm_4deg_Cold_P Parameter: Plant Line Value: 35A19
  misc_feature: MA Experiment 108534 PARAMETER Experiment Name: Zm_4deg_Cold_P Parameter: Temperature (deg C) Value: 4 vs. 22
  misc_feature: MA Experiment 108534 PARAMETER Experiment Name: Zm_4deg_Cold_P Parameter: Timepoint (hr) Value: 6
  misc_feature: MA Experiment 108534 PARAMETER Experiment Name: Zm_4deg_Cold_P Parameter: Tissue Value: Aerial
  misc_feature: MA Experiment ID: 108539 Result: Up-regulated in Transcription
  misc_feature: MA Experiment 108539 PARAMETER Experiment Name: Zm_20percent_PEG_P Parameter: Age (day) Value: 8
  misc_feature: MA Experiment 108539 PARAMETER Experiment Name: Zm_20percent_PEG_P Parameter: Organism Value: Zea mays
  misc_feature: MA Experiment 108539 PARAMETER Experiment Name: Zm_20percent_PEG_P Parameter: Plant Line Value: 35A19
  misc_feature: MA Experiment 108539 PARAMETER Experiment Name: Zm_20percent_PEG_P Parameter: Timepoint (hr) Value: 1
  misc_feature: MA Experiment 108539 PARAMETER Experiment Name: Zm_20percent_PEG_P Parameter: Tissue Value: Aerial
  misc_feature: MA Experiment 108539 PARAMETER Experiment Name: Zm_20percent_PEG_P Parameter: Treatment Value: 20percent PEG vs. No Treatment
  misc_feature: MA Experiment ID: 108540 Result: Up-regulated in Transcription
  misc_feature: MA Experiment 108540 PARAMETER Experiment Name: Zm_20percent_PEG_P Parameter: Age (day) Value: 8
  misc_feature: MA Experiment 108540 PARAMETER Experiment Name: Zm_20percent_PEG_P Parameter: Organism Value: Zea mays
  misc_feature: MA Experiment 108540 PARAMETER Experiment Name: Zm_20percent_PEG_P Parameter: Plant Line Value: 35A19
  misc_feature: MA Experiment 108540 PARAMETER Experiment Name: Zm_20percent_PEG_P Parameter: Timepoint (hr) Value: 6
  misc_feature: MA Experiment 108540 PARAMETER Experiment Name: Zm_20percent_PEG_P Parameter: Tissue Value: Aerial
  misc_feature: MA Experiment 108540 PARAMETER Experiment Name: Zm_20percent_PEG_P Parameter: Treatment Value: 20percent PEG vs. No Treatment
  misc_feature: MA Experiment ID: 108542 Result: Up-regulated in Transcription
  misc_feature: MA Experiment 108542 PARAMETER Experiment Name: Zm_150mM_NaCl_P Parameter: Age (day) Value: 8
  misc_feature: MA Experiment 108542 PARAMETER Experiment Name: Zm_150mM_NaCl_P Parameter: Organism Value: Zea mays
  misc_feature: MA Experiment 108542 PARAMETER Experiment Name: Zm_150mM_NaCl_P Parameter: Plant Line Value: 35A19
  misc_feature: MA Experiment 108542 PARAMETER Experiment Name: Zm_150mM_NaCl_P Parameter: Timepoint (hr) Value: 6
  misc_feature: MA Experiment 108542 PARAMETER Experiment Name: Zm_150mM_NaCl_P Parameter: Tissue Value: Aerial
  misc_feature: MA Experiment 108542 PARAMETER Experiment Name: Zm_150mM_NaCl_P Parameter: Treatment Value: 150mM NaCl vs. No Treatment
  misc_feature: MA Experiment ID: 108543 Result: Down-regulated in Transcription
  misc_feature: MA Experiment ID: 108556 Result: Up-regulated in Transcription
  misc_feature: MA Experiment 108556 PARAMETER Experiment Name: Zm_Drought_P Parameter: Age (day) Value: 9
  misc_feature: MA Experiment 108556 PARAMETER Experiment Name: Zm_Drought_P Parameter: Organism Value: Zea mays
  misc_feature: MA Experiment 108556 PARAMETER Experiment Name: Zm_Drought_P Parameter: Plant Line Value: 35A19
  misc_feature: MA Experiment 108556 PARAMETER Experiment Name: Zm_Drought_P Parameter: Timepoint (hr) Value: 24
  misc_feature: MA Experiment 108556 PARAMETER Experiment Name: Zm_Drought_P Parameter: Tissue Value: Aerial
  misc_feature: MA Experiment 108556 PARAMETER Experiment Name: Zm_Drought_P Parameter: Treatment Value: Drought vs. No Drought
  misc_feature: MA Experiment ID: 108597 Result: Up-regulated in Transcription
  misc_feature: MA Experiment 108597 PARAMETER Experiment Name: Zm_100uM_ABA_P Parameter: Age (day) Value: 9
  misc_feature: MA Experiment 108597 PARAMETER Experiment Name: Zm_100uM_ABA_P Parameter: Organism Value: Zea mays
  misc_feature: MA Experiment 108597 PARAMETER Experiment Name: Zm_100uM_ABA_P Parameter: Plant Line Value: 35A19
  misc_feature: MA Experiment 108597 PARAMETER Experiment Name: Zm_100uM_ABA_P Parameter: Timepoint (hr) Value: 24
  misc_feature: MA Experiment 108597 PARAMETER Experiment Name: Zm_100uM_ABA_P Parameter: Tissue Value: Aerial
  misc_feature: MA Experiment 108597 PARAMETER Experiment Name: Zm_100uM_ABA_P Parameter: Treatment Value: 100uM ABA vs. No Treatment
  misc_feature: MA Experiment ID: 108689 Result: Up-regulated in Transcription
  misc_feature: MA Experiment 108689 PARAMETER Experiment Name: Zm_Drought_Roots_P Parameter: Age (day) Value: 9
  misc_feature: MA Experiment 108689 PARAMETER Experiment Name: Zm_Drought_Roots_P Parameter: Organism Value: Zea mays
  misc_feature: MA Experiment 108689 PARAMETER Experiment Name: Zm_Drought_Roots_P Parameter: Plant Line Value: 35A19
  misc_feature: MA Experiment 108689 PARAMETER Experiment Name: Zm_Drought_Roots_P Parameter: Timepoint (hr) Value: 24
  misc_feature: MA Experiment 108689 PARAMETER Experiment Name: Zm_Drought_Roots_P Parameter: Tissue Value: Roots
  misc_feature: MA Experiment 108689 PARAMETER Experiment Name: Zm_Drought_Roots_P Parameter: Treatment Value: Drought vs. No Drought
  misc_feature: MA Experiment ID: 20000477 Result: Up-regulated in Transcription
  misc_feature: MA Experiment 20000477 PARAMETER Experiment Name: Zm_5mM_SA_P Parameter: Age (day) Value: 10
  misc_feature: MA Experiment 20000477 PARAMETER Experiment Name: Zm_5mM_SA_P Parameter: Organism Value: Zea mays
  misc_feature: MA Experiment 20000477 PARAMETER Experiment Name: Zm_5mM_SA_P Parameter: Plant Line Value: 35A19
  misc_feature: MA Experiment 20000477 PARAMETER Experiment Name: Zm_5mM_SA_P Parameter: Timepoint (hr) Value: 48
  misc_feature: MA Experiment 20000477 PARAMETER Experiment Name: Zm_5mM_SA_P Parameter: Tissue Value: Aerial
  misc_feature: MA Experiment 20000477 PARAMETER Experiment Name: Zm_5mM_SA_P Parameter: Treatment Value: 5mM SA vs. No Treatment
  misc_feature: MA Experiment ID: 20000478 Result: Up-regulated in Transcription
  misc_feature: MA Experiment 20000478 PARAMETER Experiment Name: Zm_5mM_SA_P Parameter: Age (day) Value: 11
  misc_feature: MA Experiment 20000478 PARAMETER Experiment Name: Zm_5mM_SA_P Parameter: Organism Value: Zea mays
  misc_feature: MA Experiment 20000478 PARAMETER Experiment Name: Zm_5mM_SA_P Parameter: Plant Line Value: 35A19
  misc_feature: MA Experiment 20000478 PARAMETER Experiment Name: Zm_5mM_SA_P Parameter: Timepoint (hr) Value: 72
  misc_feature: MA Experiment 20000478 PARAMETER Experiment Name: Zm_5mM_SA_P Parameter: Tissue Value: Aerial
  misc_feature: MA Experiment 20000478 PARAMETER Experiment Name: Zm_5mM_SA_P Parameter: Treatment Value: 5mM SA vs. No Treatment
  misc_feature: MA Experiment ID: 20000479 Result: Up-regulated in Transcription
  misc_feature: MA Experiment 20000479 PARAMETER Experiment Name: Zm_Drought_P Parameter: Age (day) Value: 10
  misc_feature: MA Experiment 20000479 PARAMETER Experiment Name: Zm_Drought_P Parameter: Organism Value: Zea mays
  misc_feature: MA Experiment 20000479 PARAMETER Experiment Name: Zm_Drought_P Parameter: Plant Line Value: 35A19
  misc_feature: MA Experiment 20000479 PARAMETER Experiment Name: Zm_Drought_P Parameter: Timepoint (hr) Value: 48
  misc_feature: MA Experiment 20000479 PARAMETER Experiment Name: Zm_Drought_P Parameter: Tissue Value: Aerial
  misc_feature: MA Experiment 20000479 PARAMETER Experiment Name: Zm_Drought_P Parameter: Treatment Value: Drought vs. No Drought
  misc_feature: MA Experiment ID: 20000480 Result: Up-regulated in Transcription
  misc_feature: MA Experiment 20000480 PARAMETER Experiment Name: Zm_Drought_P Parameter: Age (day) Value: 11
  misc_feature: MA Experiment 20000480 PARAMETER Experiment Name: Zm_Drought_P Parameter: Organism Value: Zea mays
  misc_feature: MA Experiment 20000480 PARAMETER Experiment Name: Zm_Drought_P Parameter: Plant Line Value: 35A19
  misc_feature: MA Experiment 20000480 PARAMETER Experiment Name: Zm_Drought_P Parameter: Timepoint (hr) Value: 72
  misc_feature: MA Experiment 20000480 PARAMETER Experiment Name: Zm_Drought_P Parameter: Tissue Value: Aerial
  misc_feature: MA Experiment 20000480 PARAMETER Experiment Name: Zm_Drought_P Parameter: Treatment Value: Drought vs. No Drought
  misc_feature: MA Experiment ID: 20000488 Result: Down-regulated in Transcription
  misc_feature: MA Experiment 20000488 PARAMETER Experiment Name: Zm_50mM_NH4NO3_L_to_H_P Parameter: Organism Value: Zea mays
  misc_feature: MA Experiment 20000488 PARAMETER Experiment Name: Zm_50mM_NH4NO3_L_to_H_P Parameter: Timepoint (hr) Value: 8
  misc_feature: MA Experiment 20000488 PARAMETER Experiment Name: Zm_50mM_NH4NO3_L_to_H_P Parameter: Tissue Value: Leaves
  misc_feature: MA Experiment 20000488 PARAMETER Experiment Name: Zm_50mM_NH4NO3_L_to_H_P Parameter: Treatment Value: 50mM NH4NO3 vs. 100mM Mannitol
  misc_feature: MA Experiment ID: 20000534 Result: Down-regulated in Transcription
  misc_feature: MA Experiment 20000534 PARAMETER Experiment Name: Zm_Hybrid_Pollen_P Parameter: Age (day) Value: 8
  misc_feature: MA Experiment 20000534 PARAMETER Experiment Name: Zm_Hybrid_Pollen_P Parameter: Organism Value: Zea mays
  misc_feature: MA Experiment 20000534 PARAMETER Experiment Name: Zm_Hybrid_Pollen_P Parameter: Plant Line Value: 35A19
  misc_feature: MA Experiment 20000534 PARAMETER Experiment Name: Zm_Hybrid_Pollen_P Parameter: Tissue Value: Pollen vs. Aerial
  misc_feature: MA Experiment ID: 20000535 Result: Up-regulated in Transcription
  misc_feature: MA Experiment 20000535 PARAMETER Experiment Name: Zm_Hybrid_Seed_Dev_P Parameter: DAP Value: 30 vs. 12
  misc_feature: MA Experiment 20000535 PARAMETER Experiment Name: Zm_Hybrid_Seed_Dev_P Parameter: Organism Value: Zea mays
  misc_feature: MA Experiment 20000535 PARAMETER Experiment Name: Zm_Hybrid_Seed_Dev_P Parameter: Plant Line Value: 35A19
  misc_feature: MA Experiment 20000535 PARAMETER Experiment Name: Zm_Hybrid_Seed_Dev_P Parameter: Tissue Value: Embryo vs. Unfert Floret
gcacgagaccattacctagaacatcctaatcaaaaagtttcttcgccgtcgctttgcgagtgtggacgggacggatacatgagggagaacggcgccgccagggacgagggccccgccttgtgcaaggccgctgcggcggacgggggcggggatgtgggcgccgcctccgcccgccgccgccgccggctcgggcgtgccacggaggggcctgctccgacgaagagaatccggtcggggtcgcagaggtcgccgtacgactcgtctctggagacggcgacggacggctgctgctggccggcgcgcctatcgcatggcgccgtgtcggtgatcgggcggcggagggagatggaggacgcgttcgccgtcgcgctctcgttcctggcctcggaggcggtgggcggcgagcaggagcaggagctggacttcttcgccgtgtacgatggccacggcggtgcaagggtggcggaggcgtgccgggagcggatgcacgtggtgctggccgaggaggtcagcctgcgccgccgccgcagcggcagcgacgacctgcgctgggaggaggccatggcggccagcttcgcccgagtggacggcgaggtgaccggcggcttgtcgtccccgcaccatgacgacgccggcagcagcttgccctaccgcaccgtcgggtccaccgccgtcgtcgccgtcgtgggccggcgccgcatcgtcgtcggcaactgcggcgactcccgcgccgtgctctcacgcggcggcgtcgcggtgccgctctccagcgatcacaagccggaccgtccggacgagatgcagagggtggaagcagccggcggcagagtcgtcaactggaacggctaccgcgtgctgggagtcctggcaacctccaggtccatcggcgactactacctgaagccgtacgtgagcgcggagccggaggtgacggtggtggagcggacggagcgggacgagttcctcatcctggccagcgacgggctgtgggacgtggtctccaacgaggcggcgtgcaagatcgccaggagctgcctgagcgggcgcgcggcctccaggttccccgggtccgtggccggccgcaccgccgcggacgccgccgcgctgctcgcggagctggccttgtcccgcggcagcagggacaacatcagcgtcgtcgtggtcgagctgcggcggctccagacggaccagatgacgagggtttagtttgctgagactgagttgagttgagttgagagcgtaccgagtagtagatgatgatgacattgttaagtatttgagcagcctgtgctgagaagctgtggggggattaagagagtctccctcccgccttcagcacttgggtgccgtttggttcacatatttgtaacgtaatgggtaacggataacgtt

SEQ ID NO: 15768 - protein, 401 aa, Zea mays subsp. mays
  peptide (1)..(401): Ceres Seq. ID no. 12381053
  misc_feature (141)..(382): Pfam Name: Protein phosphatase 2C Pfam Description: Protein phosphatase 2C
  misc_feature (141)..(382): Pfam Name: Protein phosphatase 2C Pfam Description: Protein phosphatase 2C
  misc_feature (356)..(392): Homolog of NCBI NO: 21537020 NR Description: protein phosphatase 2C, putative [Arabidopsis
  misc_feature (101)..(382): Homolog of NCBI NO: 21537020 NR Description: protein phosphatase 2C, putative [Arabidopsis
  misc_feature (356)..(392): Homolog of NCBI NO: 15222398 NR Description: protein phosphatase 2C (PP2C), putative
  misc_feature (101)..(382): Homolog of NCBI NO: 15222398 NR Description: protein phosphatase 2C (PP2C), putative
  misc_feature (105)..(392): Homolog of NCBI NO: 10432446 NR Description: protein phosphatase 2C [Nicotiana tabacum]
  misc_feature (356)..(392): Homolog of NCBI NO: 21537020 NR Description: protein phosphatase 2C, putative [Arabidopsis
  misc_feature (356)..(392): Homolog of NCBI NO: 15222398 NR Description: protein phosphatase 2C (PP2C), putative
  misc_feature (105)..(392): Homolog of NCBI NO: 10432446 NR Description: protein phosphatase 2C [Nicotiana tabacum]
  misc_feature (141)..(391): Homolog of NCBI NO: 4336434 NR Description: nodule-enhanced protein phosphatase type 2C
  misc_feature (39)..(372): Homolog of NCBI NO: 34908256 NR Description: putative protein phosphatase 2C
  misc_feature (361)..(392): Homolog of NCBI NO: 34908256 NR Description: putative protein phosphatase 2C
  misc_feature (44)..(349): Homolog of NCBI NO: 34902050 NR Description: putative Serine/threonine phosphatases
  misc_feature (335)..(392): Homolog of NCBI NO: 34902050 NR Description: putative Serine/threonine phosphatases
  misc_feature (101)..(382): Homolog of NCBI NO: 15222398 NR Description: protein phosphatase 2C (PP2C), putative
  misc_feature (101)..(382): Homolog of NCBI NO: 21537020 NR Description: protein phosphatase 2C, putative [Arabidopsis
  misc_feature (335)..(392): Homolog of NCBI NO: 34902050 NR Description: putative Serine/threonine phosphatases
  misc_feature (44)..(349): Homolog of NCBI NO: 34902050 NR Description: putative Serine/threonine phosphatases
  misc_feature (361)..(392): Homolog of NCBI NO: 34908256 NR Description: putative protein phosphatase 2C
  misc_feature (39)..(372): Homolog of NCBI NO: 34908256 NR Description: putative protein phosphatase 2C
  misc_feature (141)..(391): Homolog of NCBI NO: 4336434 NR Description: nodule-enhanced protein phosphatase type 2C
ARDHYLEHPNQKVSSPSLCECGRDGYMRENGAARDEGPALCKAAAADGGGDVGAASARRRRRLGRATEGPAPTKRIRSGSQRSPYDSSLETATDGCCWPARLSHGAVSVIGRRREMEDAFAVALSFLASEAVGGEQEQELDFFAVYDGHGGARVAEACRERMHVVLAEEVSLRRRRSGSDDLRWEEAMAASFARVDGEVTGGLSSPHHDDAGSSLPYRTVGSTAVVAVVGRRRIVVGNCGDSRAVLSRGGVAVPLSSDHKPDRPDEMQRVEAAGGRVVNWNGYRVLGVLATSRSIGDYYLKPYVSAEPEVTVVERTERDEFLILASDGLWDVVSNEAACKIARSCLSGRAASRFPGSVAGRTAADAAALLAELALSRGSRDNISVVVVELRRLQTDQMTRV

SEQ ID NO: 15769 - protein, 375 aa, Zea mays subsp. mays
  peptide (1)..(375): Ceres Seq. ID no. 12381054
  misc_feature (115)..(356): Pfam Name: Protein phosphatase 2C Pfam Description: Protein phosphatase 2C
  misc_feature (115)..(356): Pfam Name: Protein phosphatase 2C Pfam Description: Protein phosphatase 2C
  misc_feature (330)..(366): Homolog of NCBI NO: 21537020 NR Description: protein phosphatase 2C, putative [Arabidopsis
  misc_feature (75)..(356): Homolog of NCBI NO: 21537020 NR Description: protein phosphatase 2C, putative [Arabidopsis
  misc_feature (330)..(366): Homolog of NCBI NO: 15222398 NR Description: protein phosphatase 2C (PP2C), putative
  misc_feature (75)..(356): Homolog of NCBI NO: 15222398 NR Description: protein phosphatase 2C (PP2C), putative
  misc_feature (79)..(366): Homolog of NCBI NO: 10432446 NR Description: protein phosphatase 2C [Nicotiana tabacum]
  misc_feature (330)..(366): Homolog of NCBI NO: 21537020 NR Description: protein phosphatase 2C, putative [Arabidopsis
  misc_feature (330)..(366): Homolog of NCBI NO: 15222398 NR Description: protein phosphatase 2C (PP2C), putative
  misc_feature (79)..(366): Homolog of NCBI NO: 10432446 NR Description: protein phosphatase 2C [Nicotiana tabacum]
  misc_feature (115)..(365): Homolog of NCBI NO: 4336434 NR Description: nodule-enhanced protein phosphatase type 2C
  misc_feature (13)..(346): Homolog of NCBI NO: 34908256 NR Description: putative protein phosphatase 2C
  misc_feature (335)..(366): Homolog of NCBI NO: 34908256 NR Description: putative protein phosphatase 2C
  misc_feature (18)..(323): Homolog of NCBI NO: 34902050 NR Description: putative Serine/threonine phosphatases
  misc_feature (309)..(366): Homolog of NCBI NO: 34902050 NR Description: putative Serine/threonine phosphatases
  misc_feature (75)..(356): Homolog of NCBI NO: 15222398 NR Description: protein phosphatase 2C (PP2C), putative
  misc_feature (75)..(356): Homolog of NCBI NO: 21537020 NR Description: protein phosphatase 2C, putative [Arabidopsis
  misc_feature (309)..(366): Homolog of NCBI NO: 34902050 NR Description: putative Serine/threonine phosphatases
  misc_feature (18)..(323): Homolog of NCBI NO: 34902050 NR Description: putative Serine/threonine phosphatases
  misc_feature (335)..(366): Homolog of NCBI NO: 34908256 NR Description: putative protein phosphatase 2C
  misc_feature (13)..(346): Homolog of NCBI NO: 34908256 NR Description: putative protein phosphatase 2C
  misc_feature (115)..(365): Homolog of NCBI NO: 4336434 NR Description: nodule-enhanced protein phosphatase type 2C
MRENGAARDEGPALCKAAAADGGGDVGAASARRRRRLGRATEGPAPTKRIRSGSQRSPYDSSLETATDGCCWPARLSHGAVSVIGRRREMEDAFAVALSFLASEAVGGEQEQELDFFAVYDGHGGARVAEACRERMHVVLAEEVSLRRRRSGSDDLRWEEAMAASFARVDGEVTGGLSSPHHDDAGSSLPYRTVGSTAVVAVVGRRRIVVGNCGDSRAVLSRGGVAVPLSSDHKPDRPDEMQRVEAAGGRVVNWNGYRVLGVLATSRSIGDYYLKPYVSAEPEVTVVERTERDEFLILASDGLWDVVSNEAACKIARSCLSGRAASRFPGSVAGRTAADAAALLAELALSRGSRDNISVVVVELRRLQTDQMTRV

SEQ ID NO: 15770 - protein, 286 aa, Zea mays subsp. mays
  peptide (1)..(286): Ceres Seq. ID no. 12381055
  misc_feature (26)..(267): Pfam Name: Protein phosphatase 2C Pfam Description: Protein phosphatase 2C
  misc_feature (26)..(267): Pfam Name: Protein phosphatase 2C Pfam Description: Protein phosphatase 2C
  misc_feature (241)..(277): Homolog of NCBI NO: 21537020 NR Description: protein phosphatase 2C, putative [Arabidopsis
  misc_feature (1)..(267): Homolog of NCBI NO: 21537020 NR Description: protein phosphatase 2C, putative [Arabidopsis
  misc_feature (241)..(277): Homolog of NCBI NO: 15222398 NR Description: protein phosphatase 2C (PP2C), putative
  misc_feature (1)..(267): Homolog of NCBI NO: 15222398 NR Description: protein phosphatase 2C (PP2C), putative
  misc_feature (1)..(277): Homolog of NCBI NO: 10432446 NR Description: protein phosphatase 2C [Nicotiana tabacum]
  misc_feature (241)..(277): Homolog of NCBI NO: 21537020 NR Description: protein phosphatase 2C, putative [Arabidopsis
  misc_feature (241)..(277): Homolog of NCBI NO: 15222398 NR Description: protein phosphatase 2C (PP2C), putative
  misc_feature (1)..(277): Homolog of NCBI NO: 10432446 NR Description: protein phosphatase 2C [Nicotiana tabacum]
  misc_feature (26)..(276): Homolog of NCBI NO: 4336434 NR Description: nodule-enhanced protein phosphatase type 2C
  misc_feature (1)..(257): Homolog of NCBI NO: 34908256 NR Description: putative protein phosphatase 2C
  misc_feature (246)..(277): Homolog of NCBI NO: 34908256 NR Description: putative protein phosphatase 2C
  misc_feature (1)..(234): Homolog of NCBI NO: 34902050 NR Description: putative Serine/threonine phosphatases
  misc_feature (220)..(277): Homolog of NCBI NO: 34902050 NR Description: putative Serine/threonine phosphatases
  misc_feature (1)..(267): Homolog of NCBI NO: 15222398 NR Description: protein phosphatase 2C (PP2C), putative
  misc_feature (1)..(267): Homolog of NCBI NO: 21537020 NR Description: protein phosphatase 2C, putative [Arabidopsis
  misc_feature (220)..(277): Homolog of NCBI NO: 34902050 NR Description: putative Serine/threonine phosphatases
  misc_feature (1)..(234): Homolog of NCBI NO: 34902050 NR Description: putative Serine/threonine phosphatases
  misc_feature (246)..(277): Homolog of NCBI NO: 34908256 NR Description: putative protein phosphatase 2C
  misc_feature (1)..(257): Homolog of NCBI NO: 34908256 NR Description: putative protein phosphatase 2C
  misc_feature (26)..(276): Homolog of NCBI NO: 4336434 NR Description: nodule-enhanced protein phosphatase type 2C
MEDAFAVALSFLASEAVGGEQEQELDFFAVYDGHGGARVAEACRERMHVVLAEEVSLRRRRSGSDDLRWEEAMAASFARVDGEVTGGLSSPHHDDAGSSLPYRTVGSTAVVAVVGRRRIVVGNCGDSRAVLSRGGVAVPLSSDHKPDRPDEMQRVEAAGGRVVNWNGYRVLGVLATSRSIGDYYLKPYVSAEPEVTVVERTERDEFLILASDGLWDVVSNEAACKIARSCLSGRAASRFPGSVAGRTAADAAALLAELALSRGSRDNISVVVVELRRLQTDQMTRV

SEQ ID NO: 15771 - DNA, 1411 bp, Zea mays subsp. mays
  misc_feature (1)..(1411): Ceres Seq. ID no. 12382286
  misc_feature: MA Experiment ID: 108529 Result: Up-regulated in Transcription
  misc_feature: MA Experiment 108529 PARAMETER Experiment Name: Zm_Imbibed_Seeds_P Parameter: Age (day) Value: 5 vs. 2
  misc_feature: MA Experiment 108529 PARAMETER Experiment Name: Zm_Imbibed_Seeds_P Parameter: Organism Value: Zea mays
  misc_feature: MA Experiment 108529 PARAMETER Experiment Name: Zm_Imbibed_Seeds_P Parameter: Plant Line Value: 35A19
  misc_feature: MA Experiment 108529 PARAMETER Experiment Name: Zm_Imbibed_Seeds_P Parameter: Tissue Value: Roots vs. Embryo
  misc_feature: MA Experiment ID: 108535 Result: Down-regulated in Transcription
  misc_feature: MA Experiment 108535 PARAMETER Experiment Name: Zm_Meristem_P Parameter: Age (day) Value: 8
  misc_feature: MA Experiment 108535 PARAMETER Experiment Name: Zm_Meristem_P Parameter: Organism Value: Zea mays
  misc_feature: MA Experiment 108535 PARAMETER Experiment Name: Zm_Meristem_P Parameter: Plant Line Value: 35A19
  misc_feature: MA Experiment 108535 PARAMETER Experiment Name: Zm_Meristem_P Parameter: Tissue Value: Root Meristem vs. Above Root Meristem
  misc_feature: MA Experiment ID: 20001610 Result: Up-regulated in Transcription
  misc_feature: MA Experiment 20001610 PARAMETER Experiment Name: Zm_50ppm_KNO3_L-to-H_P Parameter: Age (day) Value: 19
  misc_feature: MA Experiment 20001610 PARAMETER Experiment Name: Zm_50ppm_KNO3_L-to-H_P Parameter: Organism Value: Zea mays
  misc_feature: MA Experiment 20001610 PARAMETER Experiment Name: Zm_50ppm_KNO3_L-to-H_P Parameter: Plant Line Value: 35A19
  misc_feature: MA Experiment 20001610 PARAMETER Experiment Name: Zm_50ppm_KNO3_L-to-H_P Parameter: Timepoint (hr) Value: 2
  misc_feature: MA Experiment 20001610 PARAMETER Experiment Name: Zm_50ppm_KNO3_L-to-H_P Parameter: Tissue Value: Roots
  misc_feature: MA Experiment 20001610 PARAMETER Experiment Name: Zm_50ppm_KNO3_L-to-H_P Parameter: Treatment Value: 50ppm KNO3 vs. 50ppm KCl
gcacgagaccattacctagaacatcctaatcgaaaactctctctctctctctctctctctataacaaacaggacgaggggagattgtggaatgctcacccagcaaggaggccgacctgttcaatgccgtcctgggaggcctaggccagttcggcatcataaccagggccaggatcctgctgcaggaggctccggagaaggtgacgtgggtgagggccttctacgacgacttgggcgccttcaccagggaccaggagctgctggtgtcgattccggattcggtggactacgtggaagggttcatggtcctgaacgagcggtccctccacagctcctccatcgccttccccgcgagcgtggacttcagcccggatttcggcaccaggagcagccctaggatctactactgcgtcgagttcgcggtccaccaccaccacggttaccagcagcagtctcaggcggccgtggaggccatctcgaggcggatgagccacatggcgtcccagctgtacagcgtggaggtgtcctacttggacttcctgaaccgggtcaggatggaggaggtgagcctgcggagcgccgggatgtgggaggaggtgcaccacccgtggctcaacatgttcgtgcccaaggccggggtcgctggcttcagggatctgctcatggacaacgtctcgccggatagcttccagggcctcatcctcatctacccactcctcagagacaagtgggacaccaacacgtcggtcgtgatcccggactccgggcccaccgcggacgacccggtgatgtacgtggtcggcatcctcaggtccgcgaaccctggtccagaagaagacggtgacggctgctcccaccnctgcctgcncgagctnctccncannnnncgcnggatcgccgacgccncggaggcgcncctcggcgccaagcagtacctgcctcaccacccgaccccggcccgctggcagcagcacctggnccggcgttgggagcgcttcgcggaccgcaaggcccggttcgacccgctgcgcatcntggggcccggccagggcatattccctcggacggcccaggatgctgccgccgctgctgcgtacgggagctagcattttatatatatacggcatgaaacagtatagattattaattatcagctgactagctaggatgcgatcttctttcttcttcttcttctctcttcagtttcctctgcattttgagggcatgtggggccggttgttgggttattctgtgaggctctggcctccggggcactttgagaggacctgatggtggtggtggtggtggtgattggtgattggtgaatgtcactgggaattttggaacttttgtacaggttgatggaggaagcacaggctttaagtttataagggaatagacatagcgcttct

SEQ ID NO: 15772 - protein, 267 aa, Zea mays subsp. mays
  peptide (1)..(267): Ceres Seq. ID no. 12382287
  misc_feature (1)..(252): Homolog of NCBI NO: 11120516 NR Description: cytokinin oxidase [Arabidopsis thaliana]
  misc_feature (1)..(254): Homolog of NCBI NO: 27312007 NR Description: cytokinin dehydrogenase 2 [Hordeum vulgare]
  misc_feature (1)..(255): Homolog of NCBI NO: 15227374 NR Description: putative cytokinin oxidase; protein id:
  misc_feature (1)..(254): Homolog of NCBI NO: 23267157 NR Description: cytokinin dehydrogenase 2 [Hordeum vulgare]
  misc_feature (1)..(256): Homolog of NCBI NO: 20161335 NR Description: putative cytokinin oxidase
  misc_feature (1)..(256): Homolog of NCBI NO: 38520865 NR Description: cytokinin oxidase 3 [Zea mays]
  misc_feature (1)..(256): Homolog of NCBI NO: 38520863 NR Description: cytokinin oxidase 3 [Zea mays]
  misc_feature (1)..(256): Homolog of NCBI NO: 38520861 NR Description: cytokinin oxidase 2 [Zea mays var. nobilis]
  misc_feature (1)..(262): Homolog of NCBI NO: 32489847 NR Description: OSJNBb0065J09.7 [Oryza sativa (japonica
  misc_feature (1)..(265): Homolog of NCBI NO: 37535474 NR Description: putative cytokinin oxidase
  misc_feature (186)..(186): Xaa is any aa, unknown or other
  misc_feature (189)..(189): Xaa is any aa, unknown or other
  misc_feature (191)..(191): Xaa is any aa, unknown or other
  misc_feature (193)..(193): Xaa is any aa, unknown or other
  misc_feature (194)..(194): Xaa is any aa, unknown or other
  misc_feature (195)..(195): Xaa is any aa, unknown or other
  misc_feature (197)..(197): Xaa is any aa, unknown or other
  misc_feature (202)..(202): Xaa is any aa, unknown or other
  misc_feature (205)..(205): Xaa is any aa, unknown or other
  misc_feature (226)..(226): Xaa is any aa, unknown or other
  misc_feature (245)..(245): Xaa is any aa, unknown or other
MVLNERSLHSSSIAFPASVDFSPDFGTRSSPRIYYCVEFAVHHHHGYQQQSQAAVEAISRRMSHMASQLYSVEVSYLDFLNRVRMEEVSLRSAGMWEEVHHPWLNMFVPKAGVAGFRDLLMDNVSPDSFQGLILIYPLLRDKWDTNTSVVIPDSGPTADDPVMYVVGILRSANPGPEEDGDGCSHXCLXEXLXXXRXIADAXEAXLGAKQYLPHHPTPARWQQHLXRRWERFADRKARFDPLRIXGPGQGIFPRTAQDAAAAAAYGS

SEQ ID NO: 15773 - protein, 206 aa, Zea mays subsp. mays
  peptide (1)..(206): Ceres Seq. ID no. 12382288
  misc_feature (1)..(195): Homolog of NCBI NO: 38520863 NR Description: cytokinin oxidase 3 [Zea mays]
  misc_feature (1)..(195): Homolog of NCBI NO: 38520861 NR Description: cytokinin oxidase 2 [Zea mays var. nobilis]
  misc_feature (1)..(201): Homolog of NCBI NO: 32489847 NR Description: OSJNBb0065J09.7 [Oryza sativa (japonica
  misc_feature (1)..(204): Homolog of NCBI NO: 37535474 NR Description: putative cytokinin oxidase
  misc_feature (1)..(191): Homolog of NCBI NO: 11120516 NR Description: cytokinin oxidase [Arabidopsis thaliana]
  misc_feature (1)..(193): Homolog of NCBI NO: 27312007 NR Description: cytokinin dehydrogenase 2 [Hordeum vulgare]
  misc_feature (1)..(194): Homolog of NCBI NO: 15227374 NR Description: putative cytokinin oxidase; protein id:
  misc_feature (1)..(193): Homolog of NCBI NO: 23267157 NR Description: cytokinin dehydrogenase 2 [Hordeum vulgare]
  misc_feature (1)..(195): Homolog of NCBI NO: 20161335 NR Description: putative cytokinin oxidase
  misc_feature (1)..(195): Homolog of NCBI NO: 38520865 NR Description: cytokinin oxidase 3 [Zea mays]
  misc_feature (125)..(125): Xaa is any aa, unknown or other
  misc_feature (128)..(128): Xaa is any aa, unknown or other
  misc_feature (130)..(130): Xaa is any aa, unknown or other
  misc_feature (132)..(132): Xaa is any aa, unknown or other
  misc_feature (133)..(133): Xaa is any aa, unknown or other
  misc_feature (134)..(134): Xaa is any aa, unknown or other
  misc_feature (136)..(136): Xaa is any aa, unknown or other
  misc_feature (141)..(141): Xaa is any aa, unknown or other
  misc_feature (144)..(144): Xaa is any aa, unknown or other
  misc_feature (165)..(165): Xaa is any aa, unknown or other
  misc_feature (184)..(184): Xaa is any aa, unknown or other
MSHMASQLYSVEVSYLDFLNRVRMEEVSLRSAGMWEEVHHPWLNMFVPKAGVAGFRDLLMDNVSPDSFQGLILIYPLLRDKWDTNTSVVIPDSGPTADDPVMYVVGILRSANPGPEEDGDGCSHXCLXEXLXXXRXIADAXEAXLGAKQYLPHHPTPARWQQHLXRRWERFADRKARFDPLRIXGPGQGIFPRTAQDAAAAAAYGS

SEQ ID NO: 15774 - protein, 203 aa, Zea mays subsp. mays
  peptide (1)..(203): Ceres Seq. ID no. 12382289
  misc_feature (1)..(188): Homolog of NCBI NO: 11120516 NR Description: cytokinin oxidase [Arabidopsis thaliana]
  misc_feature (1)..(190): Homolog of NCBI NO: 27312007 NR Description: cytokinin dehydrogenase 2 [Hordeum vulgare]
  misc_feature (1)..(191): Homolog of NCBI NO: 15227374 NR Description: putative cytokinin oxidase; protein id:
  misc_feature (1)..(190): Homolog of NCBI NO: 23267157 NR Description: cytokinin dehydrogenase 2 [Hordeum vulgare]
  misc_feature (1)..(192): Homolog of NCBI NO: 20161335 NR Description: putative cytokinin oxidase
  misc_feature (1)..(192): Homolog of NCBI NO: 38520865 NR Description: cytokinin oxidase 3 [Zea mays]
  misc_feature (1)..(192): Homolog of NCBI NO: 38520863 NR Description: cytokinin oxidase 3 [Zea mays]
  misc_feature (1)..(192): Homolog of NCBI NO: 38520861 NR Description: cytokinin oxidase 2 [Zea mays var. nobilis]
  misc_feature (1)..(198): Homolog of NCBI NO: 32489847 NR Description: OSJNBb0065J09.7 [Oryza sativa (japonica
  misc_feature (1)..(201): Homolog of NCBI NO: 37535474 NR Description: putative cytokinin oxidase
  misc_feature (122)..(122): Xaa is any aa, unknown or other
  misc_feature (125)..(125): Xaa is any aa, unknown or other
  misc_feature (127)..(127): Xaa is any aa, unknown or other
  misc_feature (129)..(129): Xaa is any aa, unknown or other
  misc_feature (130)..(130): Xaa is any aa, unknown or other
  misc_feature (131)..(131): Xaa is any aa, unknown or other
  misc_feature (133)..(133): Xaa is any aa, unknown or other
  misc_feature (138)..(138): Xaa is any aa, unknown or other
  misc_feature (141)..(141): Xaa is any aa, unknown or other
  misc_feature (162)..(162): Xaa is any aa, unknown or other
  misc_feature (181)..(181): Xaa is any aa, unknown or other
MASQLYSVEVSYLDFLNRVRMEEVSLRSAGMWEEVHHPWLNMFVPKAGVAGFRDLLMDNVSPDSFQGLILIYPLLRDKWDTNTSVVIPDSGPTADDPVMYVVGILRSANPGPEEDGDGCSHXCLXEXLXXXRXIADAXEAXLGAKQYLPHHPTPARWQQHLXRRWERFADRKARFDPLRIXGPGQGIFPRTAQDAAAAAAYGS

SEQ ID NO: 15775 - DNA, 783 bp, Zea mays subsp. mays
  misc_feature (1)..(783): Ceres Seq. ID no. 12354505
  misc_feature: MA Experiment ID: 108528 Result: Up-regulated in Transcription
  misc_feature: MA Experiment 108528 PARAMETER Experiment Name: Zm_Imbibed_Seeds_P Parameter: Age (day) Value: 5 vs. 2
  misc_feature: MA Experiment 108528 PARAMETER Experiment Name: Zm_Imbibed_Seeds_P Parameter: Organism Value: Zea mays
  misc_feature: MA Experiment 108528 PARAMETER Experiment Name: Zm_Imbibed_Seeds_P Parameter: Plant Line Value: 35A19
  misc_feature: MA Experiment 108528 PARAMETER Experiment Name: Zm_Imbibed_Seeds_P Parameter: Tissue Value: Aerial vs. Embryo
  misc_feature: MA Experiment ID: 108530 Result: Up-regulated in Transcription
  misc_feature: MA Experiment 108530 PARAMETER Experiment Name: Zm_Imbibed_Seeds_P Parameter: Age (day) Value: 6 vs. 2
  misc_feature: MA Experiment 108530 PARAMETER Experiment Name: Zm_Imbibed_Seeds_P Parameter: Organism Value: Zea mays
  misc_feature: MA Experiment 108530 PARAMETER Experiment Name: Zm_Imbibed_Seeds_P Parameter: Plant Line Value: 35A19
  misc_feature: MA Experiment 108530 PARAMETER Experiment Name: Zm_Imbibed_Seeds_P Parameter: Tissue Value: Aerial vs. Embryo
  misc_feature: MA Experiment ID: 108536 Result: Down-regulated in Transcription
  misc_feature: MA Experiment 108536 PARAMETER Experiment Name: Zm_Meristem_P Parameter: Age (day) Value: 8
  misc_feature: MA Experiment 108536 PARAMETER Experiment Name: Zm_Meristem_P Parameter: Organism Value: Zea mays
  misc_feature: MA Experiment 108536 PARAMETER Experiment Name: Zm_Meristem_P Parameter: Plant Line Value: 35A19
  misc_feature: MA Experiment 108536 PARAMETER Experiment Name: Zm_Meristem_P Parameter: Tissue Value: Shoot Meristem vs. Above Shoot Meristem
  misc_feature: MA Experiment ID: 108543 Result: Up-regulated in Transcription
  misc_feature: MA Experiment ID: 108545 Result: Up-regulated in Transcription
  misc_feature: MA Experiment 108545 PARAMETER Experiment Name: Zm_Imbibed_Seeds_P Parameter: Age (day) Value: 3 vs. 2
  misc_feature: MA Experiment 108545 PARAMETER Experiment Name: Zm_Imbibed_Seeds_P Parameter: Organism Value: Zea mays
  misc_feature: MA Experiment 108545 PARAMETER Experiment Name: Zm_Imbibed_Seeds_P Parameter: Plant Line Value: 35A19
  misc_feature: MA Experiment 108545 PARAMETER Experiment Name: Zm_Imbibed_Seeds_P Parameter: Tissue Value: Aerial vs. Embryo
  misc_feature: MA Experiment ID: 108547 Result: Up-regulated in Transcription
  misc_feature: MA Experiment 108547 PARAMETER Experiment Name: Zm_Imbibed_Seeds_P Parameter: Age (day) Value: 4 vs. 2
  misc_feature: MA Experiment 108547 PARAMETER Experiment Name: Zm_Imbibed_Seeds_P Parameter: Organism Value: Zea mays
  misc_feature: MA Experiment 108547 PARAMETER Experiment Name: Zm_Imbibed_Seeds_P Parameter: Plant Line Value: 35A19
  misc_feature: MA Experiment 108547 PARAMETER Experiment Name: Zm_Imbibed_Seeds_P Parameter: Tissue Value: Aerial vs. Embryo
  misc_feature: MA Experiment ID: 108687 Result: Down-regulated in Transcription
  misc_feature: MA Experiment 108687 PARAMETER Experiment Name: Zm_Embryos-Flowers__P Parameter: Tissue Value: Embryo vs. Aerial+
  misc_feature: MA Experiment ID: 108688 Result: Down-regulated in Transcription
  misc_feature: MA Experiment 108688 PARAMETER Experiment Name: Zm_Embryos-Flowers__P Parameter: Tissue Value: Immature Flowers vs. Aerial+
  misc_feature: MA Experiment ID: 20000492 Result: Down-regulated in Transcription
  misc_feature: MA Experiment 20000492 PARAMETER Experiment Name: Zm_Hybrid_Seed_Dev_P Parameter: DAP Value: 12
  misc_feature: MA Experiment 20000492 PARAMETER Experiment Name: Zm_Hybrid_Seed_Dev_P Parameter: Organism Value: Zea mays
  misc_feature: MA Experiment 20000492 PARAMETER Experiment Name: Zm_Hybrid_Seed_Dev_P Parameter: Plant Line Value: 35A19
  misc_feature: MA Experiment 20000492 PARAMETER Experiment Name: Zm_Hybrid_Seed_Dev_P Parameter: Tissue Value: Fert Kernel vs. Unfert Floret
gaccacctctcgtatcgattctccaagcgccgcgccgcgccgagcgaagaagctcgtctcgtctccatggcggccgcagcggtggccgtctccacctctgtgtgcacgtcctcaaggcgtagcacgggctgtccgaacgtgaggccccaggcccgtccgctcctaggcaggccgtcgccgcgccggaggctgcagacggccttggccgcgacgggcaagacgccgggcgaggcggaggagcaggtccccgcgtgggccaagcccggcgcggacgagccgccaccctgggagcgcgagggcggggccgcgcgtggacaggaggcccggcaggtccccttctacgcgtacctgctcgcgtccacgatcaccgccatcgccgcgatcggctccatcttcgagtacaccaaccagcggccggtgttcgggatcgtcggccccgacagcgtcctgtacgcgccgctcctgggcttcttcggtcttcaccggcatcccgacctccgcgtttctgtggttcaaggccgtgcagacggccaacagagaggccgaggagcaagaccgcagagacggattcctgtgagaggctgtgggtgactccggcgcactcgccggtgccgtcgccgtgcagaagaacgcgcaccgcaccaccggtattcgcagcgacgggtgacgggtcatgttgtcatgttatgtatgtcggtgtactgtatactagaatttgagagagcggatggatttgcggcacaaatcagagaaaatatcttaatcatcattcgtatgagtggc

SEQ ID NO: 15776 - protein, 196 aa, Zea mays subsp. mays
  peptide (1)..(196): Ceres Seq. ID no. 12354506
  misc_feature (23)..(160): Homolog of NCBI NO: 15230505 NR Description: putative protein
DHLSYRFSKRRAAPSEEARLVSMAAAAVAVSTSVCTSSRRSTGCPNVRPQARPLLGRPSPRRRLQTALAATGKTPGEAEEQVPAWAKPGADEPPPWEREGGAARGQEARQVPFYAYLLASTITAIAAIGSIFEYTNQRPVFGIVGPDSVLYAPLLGFFGLHRHPDLRVSVVQGRADGQQRGRGARPQRRIPVRGCG

SEQ ID NO: 15777 - protein, 174 aa, Zea mays subsp. mays
  peptide (1)..(174): Ceres Seq. ID no. 12354507
  misc_feature (1)..(138): Homolog of NCBI NO: 15230505 NR Description: putative protein
MAAAAVAVSTSVCTSSRRSTGCPNVRPQARPLLGRPSPRRRLQTALAATGKTPGEAEEQVPAWAKPGADEPPPWEREGGAARGQEARQVPFYAYLLASTITAIAAIGSIFEYTNQRPVFGIVGPDSVLYAPLLGFFGLHRHPDLRVSVVQGRADGQQRGRGARPQRRIPVRGCG

SEQ ID NO: 15778 - DNA, 1349 bp, Zea mays subsp. mays
  misc_feature (1)..(1349): Ceres Seq. ID no. 12364087
  misc_feature: MA Experiment ID: 108526 Result: Up-regulated in Transcription
  misc_feature: MA Experiment 108526 PARAMETER Experiment Name: Zm_5mM_NO_P Parameter: Age (day) Value: 8
  misc_feature: MA Experiment 108526 PARAMETER Experiment Name: Zm_5mM_NO_P Parameter: Organism Value: Zea mays
  misc_feature: MA Experiment 108526 PARAMETER Experiment Name: Zm_5mM_NO_P Parameter: Plant Line Value: 35A19
  misc_feature: MA Experiment 108526 PARAMETER Experiment Name: Zm_5mM_NO_P Parameter: Timepoint (hr) Value: 1
  misc_feature: MA Experiment 108526 PARAMETER Experiment Name: Zm_5mM_NO_P Parameter: Tissue Value: Aerial
  misc_feature: MA Experiment 108526 PARAMETER Experiment Name: Zm_5mM_NO_P Parameter: Treatment Value: 5mM NO vs. No Treatment
  misc_feature: MA Experiment ID: 108527 Result: Up-regulated in Transcription
  misc_feature: MA Experiment 108527 PARAMETER Experiment Name: Zm_5mM_NO_P Parameter: Age (day) Value: 8
  misc_feature: MA Experiment 108527 PARAMETER Experiment Name: Zm_5mM_NO_P Parameter: Organism Value: Zea mays
  misc_feature: MA Experiment 108527 PARAMETER Experiment Name: Zm_5mM_NO_P Parameter: Plant Line Value: 35A19
  misc_feature: MA Experiment 108527 PARAMETER Experiment Name: Zm_5mM_NO_P Parameter: Timepoint (hr) Value: 6
  misc_feature: MA Experiment 108527 PARAMETER Experiment Name: Zm_5mM_NO_P Parameter: Tissue Value: Aerial
  misc_feature: MA Experiment 108527 PARAMETER Experiment Name: Zm_5mM_NO_P Parameter: Treatment Value: 5mM NO vs. No Treatment
  misc_feature: MA Experiment ID: 108529 Result: Up-regulated in Transcription
  misc_feature: MA Experiment 108529 PARAMETER Experiment Name: Zm_Imbibed_Seeds_P Parameter: Age (day) Value: 5 vs. 2
  misc_feature: MA Experiment 108529 PARAMETER Experiment Name: Zm_Imbibed_Seeds_P Parameter: Organism Value: Zea mays
  misc_feature: MA Experiment 108529 PARAMETER Experiment Name: Zm_Imbibed_Seeds_P Parameter: Plant Line Value: 35A19
  misc_feature: MA Experiment 108529 PARAMETER Experiment Name: Zm_Imbibed_Seeds_P Parameter: Tissue Value: Roots vs. Embryo
  misc_feature: MA Experiment ID: 108533 Result: Up-regulated in Transcription
  misc_feature: MA Experiment 108533 PARAMETER Experiment Name: Zm_4deg_Cold_P Parameter: Age (hr) Value: 8
  misc_feature: MA Experiment 108533 PARAMETER Experiment Name: Zm_4deg_Cold_P Parameter: Organism Value: Zea mays
  misc_feature: MA Experiment 108533 PARAMETER Experiment Name: Zm_4deg_Cold_P Parameter: Plant Line Value: 35A19
  misc_feature: MA Experiment 108533 PARAMETER Experiment Name: Zm_4deg_Cold_P Parameter: Temperature (deg C) Value: 4 vs. 22
  misc_feature: MA Experiment 108533 PARAMETER Experiment Name: Zm_4deg_Cold_P Parameter: Timepoint (hr) Value: 1
  misc_feature: MA Experiment 108533 PARAMETER Experiment Name: Zm_4deg_Cold_P Parameter: Tissue Value: Aerial
  misc_feature: MA Experiment ID: 108534 Result: Up-regulated in Transcription
  misc_feature: MA Experiment 108534 PARAMETER Experiment Name: Zm_4deg_Cold_P Parameter: Age (hr) Value: 8
  misc_feature: MA Experiment 108534 PARAMETER Experiment Name: Zm_4deg_Cold_P Parameter: Organism Value: Zea mays
  misc_feature: MA Experiment 108534 PARAMETER Experiment Name: Zm_4deg_Cold_P Parameter: Plant Line Value: 35A19
  misc_feature: MA Experiment 108534 PARAMETER Experiment Name: Zm_4deg_Cold_P Parameter: Temperature (deg C) Value: 4 vs. 22
  misc_feature: MA Experiment 108534 PARAMETER Experiment Name: Zm_4deg_Cold_P Parameter: Timepoint (hr) Value: 6
  misc_feature: MA Experiment 108534 PARAMETER Experiment Name: Zm_4deg_Cold_P Parameter: Tissue Value: Aerial
  misc_feature: MA Experiment ID: 108535 Result: Down-regulated in Transcription
  misc_feature: MA Experiment 108535 PARAMETER Experiment Name: Zm_Meristem_P Parameter: Age (day) Value: 8
  misc_feature: MA Experiment 108535 PARAMETER Experiment Name: Zm_Meristem_P Parameter: Organism Value: Zea mays
  misc_feature: MA Experiment 108535 PARAMETER Experiment Name: Zm_Meristem_P Parameter: Plant Line Value: 35A19
  misc_feature: MA Experiment 108535 PARAMETER Experiment Name: Zm_Meristem_P Parameter: Tissue Value: Root Meristem vs. Above Root Meristem
  misc_feature: MA Experiment ID: 108559 Result: Up-regulated in Transcription
  misc_feature: MA Experiment 108559 PARAMETER Experiment Name: Zm_5mM_NO_P Parameter: Age (day) Value: 8
  misc_feature: MA Experiment 108559 PARAMETER Experiment Name: Zm_5mM_NO_P Parameter: Organism Value: Zea mays
  misc_feature: MA Experiment 108559 PARAMETER Experiment Name: Zm_5mM_NO_P Parameter: Plant Line Value: 35A19
  misc_feature: MA Experiment 108559 PARAMETER Experiment Name: Zm_5mM_NO_P Parameter: Timepoint (hr) Value: 12
  misc_feature: MA Experiment 108559 PARAMETER Experiment Name: Zm_5mM_NO_P Parameter: Tissue Value: Aerial
  misc_feature: MA Experiment 108559 PARAMETER Experiment Name: Zm_5mM_NO_P Parameter: Treatment Value: 5mM NO vs. No Treatment
  misc_feature: MA Experiment ID: 20000108 Result: Down-regulated in Transcription
  misc_feature: MA Experiment 20000108 PARAMETER Experiment Name: Zm_Root-Tips_P Parameter: Age (day) Value: 12
  misc_feature: MA Experiment 20000108 PARAMETER Experiment Name: Zm_Root-Tips_P Parameter: Organism Value: Zea mays
  misc_feature: MA Experiment 20000108 PARAMETER Experiment Name: Zm_Root-Tips_P Parameter: Tissue Value: Root tips vs. Root mid region    35
  misc_feature: MA Experiment 20000108 PARAMETER Experiment Name: Zm_Root-Tips_P Parameter: Tissue Value: Root tips vs. Root mid region   Sequence Listing-Misc Features (4)
  misc_feature: MA Experiment ID: 20000478 Result: Up-regulated in Transcription
  misc_feature: MA Experiment 20000478 PARAMETER Experiment Name: Zm_5mM_SA_P Parameter: Age (day) Value: 11
  misc_feature: MA Experiment 20000478 PARAMETER Experiment Name: Zm_5mM_SA_P Parameter: Organism Value: Zea mays
  misc_feature: MA Experiment 20000478 PARAMETER Experiment Name: Zm_5mM_SA_P Parameter: Plant Line Value: 35A19
  misc_feature: MA Experiment 20000478 PARAMETER Experiment Name: Zm_5mM_SA_P Parameter: Timepoint (hr) Value: 72
  misc_feature: MA Experiment 20000478 PARAMETER Experiment Name: Zm_5mM_SA_P Parameter: Tissue Value: Aerial
  misc_feature: MA Experiment 20000478 PARAMETER Experiment Name: Zm_5mM_SA_P Parameter: Treatment Value: 5mM SA vs. No Treatment
acaactgttatattcccaccggcgccgccggctcttcgtcgtcctcctccgggtgtgccccagttcgctgcccgttccccagccgccgatccctcgatctccgctagcttcgttccttcgtacaggaacggtcgagcagaaactagcagccactcccgagtcccgactcccgatcgcgattacttgccgcggcaccagtactccagcggccaccatgagcagcgggaagcgatccttcttcgcgcccaagaagaaggccaccaacccgttcgattccgactccgacgacgacaaaccgcagcagcggccagcgcgggcgtcctccgtgcctcccccggacgagcagcggggctcctcctctctcttcggcgccggcgacagaggcgggctcttctcttccgcggccaaccatcactaccggaacgacttccgcgacgctggcggccttgagggccagtccgtgcaggagctggagggcctacgcggcgtacaaggccgaggagaccacgcgccggacgcgggggtgcgtcaggatcgccgaggagatgagggacaccgcatccaagacgctcgtcaccgtccaccagcaggggcagcagatccaccgcacgcacatgatggccgtcgacatcgaccaggatctcttcaggagtgagaagctattgggcgatcttgggggtctattttccaaaaagtggaagccaaagaagaatggcgccatcaggggtcctatgctaactagagatgattccttcataaggaaggggagtcatttggagcaaaggcagaaactagggctggcagatcatccacctccatcaaatgcgcgccaattccgttctgaaccctcatcagcacttgagaaagttgagatagagaaggcaaagcaggatgatgatctgtctgatctaagcaacatactgacggagctgaaagggatggccgttgacatgggctctgagatcgagaggcaaacaaaagcaatgggggatgcagagaaggattatgacgagctgaacttcagggtcaagggagcaaacactcgagctcgccgtctcctcgggagataaaaaaatgcatatattcttgtctcttggatggtccataacacattaactatatgggggcatcaaattctgatgattttgtgcatcagattttgattagcattgttaccgtggacatgtcggcgtgtatggtagttgagacatattttatatgtttgcttcttttttctatttttttagcattgcacgagcttaggatttcagtggattttacatggaaaaccttgtctgattagaaacttcttttcgggtaaataatgctgatacatagtgatttgtcgc

SEQ ID NO: 15779 - protein, 217 aa, Zea mays subsp. mays
  peptide (1)..(217): Ceres Seq. ID no. 12364088
  misc_feature (83)..(159): Homolog of NCBI NO: 21553460 NR Description: snap25a [Arabidopsis thaliana]
  misc_feature (83)..(159): Homolog of NCBI NO: 15240163 NR Description: syntaxin SNAP33
QLLYSHRRRRLFVVLLRVCPSSLPVPQPPIPRSPLASFLRTGTVEQKLAATPESRLPIAITCRGTSTPAATMSSGKRSFFAPKKKATNPFDSDSDDDKPQQRPARASSVPPPDEQRGSSSLFGAGDRGGLFSSAANHHYRNDFRDAGGLEGQSVQELEGLRGVQGRGDHAPDAGVRQDRRGDEGHRIQDARHRPPAGAADPPHAHDGRRHRPGSLQE

SEQ ID NO: 15780 - protein, 174 aa, Zea mays subsp. mays
  peptide (1)..(174): Ceres Seq. ID no. 12364089
  misc_feature (114)..(174): Pfam Name: SNARE domain Pfam Description: SNARE domain
  misc_feature (1)..(173): Homolog of NCBI NO: 548943 NR Description: Synaptosomal-associated protein 25A (SNAP-25A)
  misc_feature (1)..(172): Homolog of NCBI NO: 28279149 NR Description: Similar to synaptosomal-associated protein, 23kD
  misc_feature (1)..(173): Homolog of NCBI NO: 37589647 NR Description: Unknown (protein for MGC:73063) [Danio rerio]
  misc_feature (1)..(173): Homolog of NCBI NO: 40555928 NR Description: synaptosomal-associated protein 25 [Lateolabrax
  misc_feature (1)..(173): Homolog of NCBI NO: 18765733 NR Description: synaptosomal-associated protein 25 isoform SNAP25A
  misc_feature (1)..(172): Homolog of NCBI NO: 15241436 NR Description: SNAP25 - like protein; protein id: At5g07880.1
  misc_feature (1)..(174): Homolog of NCBI NO: 15222976 NR Description: synaptosomal associated protein (SNAP25A),
  misc_feature (1)..(174): Homolog of NCBI NO: 21553460 NR Description: snap25a [Arabidopsis thaliana]
  misc_feature (1)..(174): Homolog of NCBI NO: 15240163 NR Description: syntaxin SNAP33
  misc_feature (1)..(174): Homolog of NCBI NO: 32308074 NR Description: SNAP-34 [Hordeum vulgare subsp. vulgare]
MRDTASKTLVTVHQQGQQIHRTHMMAVDIDQDLFRSEKLLGDLGGLFSKKWKPKKNGAIRGPMLTRDDSFIRKGSHLEQRQKLGLADHPPPSNARQFRSEPSSALEKVEIEKAKQDDDLSDLSNILTELKGMAVDMGSEIERQTKAMGDAEKDYDELNFRVKGANTRARRLLGR

SEQ ID NO: 15781 - protein, 151 aa, Zea mays subsp. mays
  peptide (1)..(151): Ceres Seq. ID no. 12364090
  misc_feature (91)..(151): Pfam Name: SNARE domain Pfam Description: SNARE domain
  misc_feature (1)..(150): Homolog of NCBI NO: 548943 NR Description: Synaptosomal-associated protein 25A (SNAP-25A)
  misc_feature (1)..(149): Homolog of NCBI NO: 28279149 NR Description: Similar to synaptosomal-associated protein, 23kD
  misc_feature (1)..(150): Homolog of NCBI NO: 37589647 NR Description: Unknown (protein for MGC:73063) [Danio rerio]
  misc_feature (1)..(150): Homolog of NCBI NO: 40555928 NR Description: synaptosomal-associated protein 25 [Lateolabrax
  misc_feature (1)..(150): Homolog of NCBI NO: 18765733 NR Description: synaptosomal-associated protein 25 isoform SNAP25A
  misc_feature (1)..(149): Homolog of NCBI NO: 15241436 NR Description: SNAP25 - like protein; protein id: At5g07880.1
  misc_feature (1)..(151): Homolog of NCBI NO: 15222976 NR Description: synaptosomal associated protein (SNAP25A),
  misc_feature (1)..(151): Homolog of NCBI NO: 21553460 NR Description: snap25a [Arabidopsis thaliana]
  misc_feature (1)..(151): Homolog of NCBI NO: 15240163 NR Description: syntaxin SNAP33
  misc_feature (1)..(151): Homolog of NCBI NO: 32308074 NR Description: SNAP-34 [Hordeum vulgare subsp. vulgare]
MMAVDIDQDLFRSEKLLGDLGGLFSKKWKPKKNGAIRGPMLTRDDSFIRKGSHLEQRQKLGLADHPPPSNARQFRSEPSSALEKVEIEKAKQDDDLSDLSNILTELKGMAVDMGSEIERQTKAMGDAEKDYDELNFRVKGANTRARRLLGR

SEQ ID NO: 15782 - protein, 146 aa, Zea mays subsp. mays
  peptide (1)..(146): Ceres Seq. ID no. 12364091
  misc_feature (12)..(88): Homolog of NCBI NO: 21553460 NR Description: snap25a [Arabidopsis thaliana]
  misc_feature (12)..(88): Homolog of NCBI NO: 15240163 NR Description: syntaxin SNAP33
MSSGKRSFFAPKKKATNPFDSDSDDDKPQQRPARASSVPPPDEQRGSSSLFGAGDRGGLFSSAANHHYRNDFRDAGGLEGQSVQELEGLRGVQGRGDHAPDAGVRQDRRGDEGHRIQDARHRPPAGAADPPHAHDGRRHRPGSLQE

SEQ ID NO: 15783 - DNA, 1576 bp, Zea mays subsp. mays
  misc_feature (1)..(1576): Ceres Seq. ID no. 12350195
  misc_feature: MA Experiment ID: 108556 Result: Down-regulated in Transcription
  misc_feature: MA Experiment 108556 PARAMETER Experiment Name: Zm_Drought_P Parameter: Age (day) Value: 9
  misc_feature: MA Experiment 108556 PARAMETER Experiment Name: Zm_Drought_P Parameter: Organism Value: Zea mays
  misc_feature: MA Experiment 108556 PARAMETER Experiment Name: Zm_Drought_P Parameter: Plant Line Value: 35A19
  misc_feature: MA Experiment 108556 PARAMETER Experiment Name: Zm_Drought_P Parameter: Timepoint (hr) Value: 24
  misc_feature: MA Experiment 108556 PARAMETER Experiment Name: Zm_Drought_P Parameter: Tissue Value: Aerial
  misc_feature: MA Experiment 108556 PARAMETER Experiment Name: Zm_Drought_P Parameter: Treatment Value: Drought vs. No Drought
  misc_feature: MA Experiment ID: 20000492 Result: Down-regulated in Transcription
  misc_feature: MA Experiment 20000492 PARAMETER Experiment Name: Zm_Hybrid_Seed_Dev_P Parameter: DAP Value: 12
  misc_feature: MA Experiment 20000492 PARAMETER Experiment Name: Zm_Hybrid_Seed_Dev_P Parameter: Organism Value: Zea mays
  misc_feature: MA Experiment 20000492 PARAMETER Experiment Name: Zm_Hybrid_Seed_Dev_P Parameter: Plant Line Value: 35A19
  misc_feature: MA Experiment 20000492 PARAMETER Experiment Name: Zm_Hybrid_Seed_Dev_P Parameter: Tissue Value: Fert Kernel vs. Unfert Floret
aaaactcccccaactgacggccacctcgaacggaaggggatcccccttaattatgagacaattattgctgaaattatttttttcggaatccaatcaggtagtagtatttgtgtgattgtgtccaggccctatacataagccgccatttgcagtccggacgcagccccgttcagtcgcagcccaggccgacgacggcagagagcgagccgacgccgccgcaccctcgtgccaggttacacggtgtgaaaatgtcaggaagggctttgaaagatctcaatgtttctcagtcagcagacctggagaacggaaaagacaattctgtgaaatcctgcatcaccaagcctgtgttgaatggcaacaaatgtgccaacaaggaagaaaaggctccgtctgcttgccacgacgctgtgactaatggaaatgcggctgccattgcagatgtggagtacattgattctgaaaatctagtagatctcccagatgtcgatgcagctctaagtaccttagctaaaagattggattcaaaggactgggttatgacatgtgaagctctcaacaatgttcgtcagttggcaatgtatcacaaggaacgattgcaggagcttctggagcctgtagttcctcttatcgtgaaatctgtgaagaacccaagaagtgctgtatgcaaaactgcactaatgacttgtgctgacatctttaaggcctatggtgacttaatggttcactcaatcgatccactgctagtacaactgtttctgaaggcttcacaagataagcgttttgtctgtgaagctgcagaggcagctcttatatcgatgacaagttggatctcccctttactactcttgccaagaatgctgccttacctcaagaacaagaatccacggatccgagcaaaagcatcagtgtgtttcagcaagagtgtaccacgccttgatgtggtgggaatcaaagaatatggtatggataagctcatccagattgcggcaacccaacttagcgaccagcttcctgaatcaagggaggctgctcgcaacctggcactggaactgcaagcattctatgagaagtctcaggcctcaacttctgacgaacacgaggtcgaggcctctgcctcgccagatgctgaatcatgggaggctttctgccagtccaagctctccgcattaagtgcccaagccattcttcgtgtgacctctactactacaaaagagtgcgtcacctctgccccaaaagaagggttggctgtgggttgctagcacaagccacaggggagatattgcgatttttcaccctgttcgctgttttgctgtacatgcttttggtttgtcctgcggtgcacccagtcgtgaaaaggttaatcattggttcaggagttcaggtgtgaccacggtgttaatattggtgtgggatatatatccattatagttggttgtacaatcatttggttccactacttggtattggagtgtagatttttttccccatggttcagcgttatacacaacagtccttattttttgtttttgatgctggttctgttattttgaaggaaatgacatattttgtgtttcgg

SEQ ID NO: 15784 - protein, 336 aa, Zea mays subsp. mays
  peptide (1)..(336): Ceres Seq. ID no. 12350196
  misc_feature (1)..(196): Homolog of NCBI NO: 34865276 NR Description: similar to KIAA0423 [Rattus norvegicus]
  misc_feature (123)..(318): Homolog of NCBI NO: 7485173 NR Description: hypothetical protein - Arabidopsis thaliana
  misc_feature (1)..(240): Homolog of NCBI NO: 9294314 NR Description: gb|AAF24615.1~gene_id:K24M9.2~similar to unknown
  misc_feature (259)..(335): Homolog of NCBI NO: 15229670 NR Description: unknown protein; protein id: At3g18530.1
  misc_feature (1)..(230): Homolog of NCBI NO: 15229670 NR Description: unknown protein; protein id: At3g18530.1
  misc_feature (42)..(318): Homolog of NCBI NO: 18414533 NR Description: expressed protein
  misc_feature (42)..(318): Homolog of NCBI NO: 21593517 NR Description: unknown [Arabidopsis thaliana]
  misc_feature (1)..(335): Homolog of NCBI NO: 21537265 NR Description: unknown [Arabidopsis thaliana]
  misc_feature (1)..(335): Homolog of NCBI NO: 18395821 NR Description: expressed protein
  misc_feature (1)..(332): Homolog of NCBI NO: 15241493 NR Description: putative protein
MSGRALKDLNVSQSADLENGKDNSVKSCITKPVLNGNKCANKEEKAPSACHDAVTNGNAAAIADVEYIDSENLVDLPDVDAALSTLAKRLDSKDWVMTCEALNNVRQLAMYHKERLQELLEPVVPLIVKSVKNPRSAVCKTALMTCADIFKAYGDLMVHSIDPLLVQLFLKASQDKRFVCEAAEAALISMTSWISPLLLLPRMLPYLKNKNPRIRAKASVCFSKSVPRLDVVGIKEYGMDKLIQIAATQLSDQLPESREAARNLALELQAFYEKSQASTSDEHEVEASASPDAESWEAFCQSKLSALSAQAILRVTSTTTKECVTSAPKEGLAVGC

SEQ ID NO: 15785 - protein, 240 aa, Zea mays subsp. mays
  peptide (1)..(240): Ceres Seq. ID no. 12350197
  misc_feature (1)..(100): Homolog of NCBI NO: 34865276 NR Description: similar to KIAA0423 [Rattus norvegicus]
  misc_feature (27)..(222): Homolog of NCBI NO: 7485173 NR Description: hypothetical protein - Arabidopsis thaliana
  misc_feature (1)..(144): Homolog of NCBI NO: 9294314 NR Description: gb|AAF24615.1~gene_id:K24M9.2~similar to unknown
  misc_feature (163)..(239): Homolog of NCBI NO: 15229670 NR Description: unknown protein; protein id: At3g18530.1
  misc_feature (1)..(134): Homolog of NCBI NO: 15229670 NR Description: unknown protein; protein id: At3g18530.1
  misc_feature (1)..(222): Homolog of NCBI NO: 18414533 NR Description: expressed protein
  misc_feature (1)..(222): Homolog of NCBI NO: 21593517 NR Description: unknown [Arabidopsis thaliana]
  misc_feature (1)..(239): Homolog of NCBI NO: 21537265 NR Description: unknown [Arabidopsis thaliana]
  misc_feature (1)..(239): Homolog of NCBI NO: 18395821 NR Description: expressed protein
  misc_feature (1)..(236): Homolog of NCBI NO: 15241493 NR Description: putative protein
MTCEALNNVRQLAMYHKERLQELLEPVVPLIVKSVKNPRSAVCKTALMTCADIFKAYGDLMVHSIDPLLVQLFLKASQDKRFVCEAAEAALISMTSWISPLLLLPRMLPYLKNKNPRIRAKASVCFSKSVPRLDVVGIKEYGMDKLIQIAATQLSDQLPESREAARNLALELQAFYEKSQASTSDEHEVEASASPDAESWEAFCQSKLSALSAQAILRVTSTTTKECVTSAPKEGLAVGC

SEQ ID NO: 15786 - protein, 227 aa, Zea mays subsp. mays
  peptide (1)..(227): Ceres Seq. ID no. 12350198
  misc_feature (1)..(87): Homolog of NCBI NO: 34865276 NR Description: similar to KIAA0423 [Rattus norvegicus]
  misc_feature (14)..(209): Homolog of NCBI NO: 7485173 NR Description: hypothetical protein - Arabidopsis thaliana
  misc_feature (1)..(131): Homolog of NCBI NO: 9294314 NR Description: gb|AAF24615.1~gene_id:K24M9.2~similar to unknown
  misc_feature (150)..(226): Homolog of NCBI NO: 15229670 NR Description: unknown protein; protein id: At3g18530.1
  misc_feature (1)..(121): Homolog of NCBI NO: 15229670 NR Description: unknown protein; protein id: At3g18530.1
  misc_feature (1)..(209): Homolog of NCBI NO: 18414533 NR Description: expressed protein
  misc_feature (1)..(209): Homolog of NCBI NO: 21593517 NR Description: unknown [Arabidopsis thaliana]
  misc_feature (1)..(226): Homolog of NCBI NO: 21537265 NR Description: unknown [Arabidopsis thaliana]
  misc_feature (1)..(226): Homolog of NCBI NO: 18395821 NR Description: expressed protein
  misc_feature (1)..(223): Homolog of NCBI NO: 15241493 NR Description: putative protein
MYHKERLQELLEPVVPLIVKSVKNPRSAVCKTALMTCADIFKAYGDLMVHSIDPLLVQLFLKASQDKRFVCEAAEAALISMTSWISPLLLLPRMLPYLKNKNPRIRAKASVCFSKSVPRLDVVGIKEYGMDKLIQIAATQLSDQLPESREAARNLALELQAFYEKSQASTSDEHEVEASASPDAESWEAFCQSKLSALSAQAILRVTSTTTKECVTSAPKEGLAVGC

SEQ ID NO: 15787 - DNA, 1639 bp, Zea mays subsp. mays
  misc_feature (1)..(1639): Ceres Seq. ID no. 12406238
  misc_feature: MA Experiment ID: 108522 Result: Down-regulated in Transcription
  misc_feature: MA Experiment 108522 PARAMETER Experiment Name: Zm_42deg_Heat_P Parameter: Age (day) Value: 8
  misc_feature: MA Experiment 108522 PARAMETER Experiment Name: Zm_42deg_Heat_P Parameter: Organism Value: Zea mays
  misc_feature: MA Experiment 108522 PARAMETER Experiment Name: Zm_42deg_Heat_P Parameter: Plant Line Value: 35A19
  misc_feature: MA Experiment 108522 PARAMETER Experiment Name: Zm_42deg_Heat_P Parameter: Temperature (deg C) Value: 42 vs. 22
  misc_feature: MA Experiment 108522 PARAMETER Experiment Name: Zm_42deg_Heat_P Parameter: Timepoint (hr) Value: 1
  misc_feature: MA Experiment 108522 PARAMETER Experiment Name: Zm_42deg_Heat_P Parameter: Tissue Value: Aerial
  misc_feature: MA Experiment ID: 108529 Result: Down-regulated in Transcription
  misc_feature: MA Experiment 108529 PARAMETER Experiment Name: Zm_Imbibed_Seeds_P Parameter: Age (day) Value: 5 vs. 2
  misc_feature: MA Experiment 108529 PARAMETER Experiment Name: Zm_Imbibed_Seeds_P Parameter: Organism Value: Zea mays
  misc_feature: MA Experiment 108529 PARAMETER Experiment Name: Zm_Imbibed_Seeds_P Parameter: Plant Line Value: 35A19
  misc_feature: MA Experiment 108529 PARAMETER Experiment Name: Zm_Imbibed_Seeds_P Parameter: Tissue Value: Roots vs. Embryo
  misc_feature: MA Experiment ID: 108532 Result: Up-regulated in Transcription
  misc_feature: MA Experiment 108532 PARAMETER Experiment Name: Zm_20uM_KNO3_H-to-L_P Parameter: Age (day) Value: 11
  misc_feature: MA Experiment 108532 PARAMETER Experiment Name: Zm_20uM_KNO3_H-to-L_P Parameter: Organism Value: Zea mays
  misc_feature: MA Experiment 108532 PARAMETER Experiment Name: Zm_20uM_KNO3_H-to-L_P Parameter: Plant Line Value: 35A19
  misc_feature: MA Experiment 108532 PARAMETER Experiment Name: Zm_20uM_KNO3_H-to-L_P Parameter: Timepoint (hr) Value: 16
  misc_feature: MA Experiment 108532 PARAMETER Experiment Name: Zm_20uM_KNO3_H-to-L_P Parameter: Tissue Value: Roots
  misc_feature: MA Experiment 108532 PARAMETER Experiment Name: Zm_20uM_KNO3_H-to-L_P Parameter: Treatment Value: 20uM KNO3 vs. 60mM KNO3
  misc_feature: MA Experiment ID: 108544 Result: Down-regulated in Transcription
  misc_feature: MA Experiment ID: 108689 Result: Down-regulated in Transcription
  misc_feature: MA Experiment 108689 PARAMETER Experiment Name: Zm_Drought_Roots_P Parameter: Age (day) Value: 9
  misc_feature: MA Experiment 108689 PARAMETER Experiment Name: Zm_Drought_Roots_P Parameter: Organism Value: Zea mays
  misc_feature: MA Experiment 108689 PARAMETER Experiment Name: Zm_Drought_Roots_P Parameter: Plant Line Value: 35A19
  misc_feature: MA Experiment 108689 PARAMETER Experiment Name: Zm_Drought_Roots_P Parameter: Timepoint (hr) Value: 24
  misc_feature: MA Experiment 108689 PARAMETER Experiment Name: Zm_Drought_Roots_P Parameter: Tissue Value: Roots
  misc_feature: MA Experiment 108689 PARAMETER Experiment Name: Zm_Drought_Roots_P Parameter: Treatment Value: Drought vs. No Drought
  misc_feature: MA Experiment ID: 20000477 Result: Down-regulated in Transcription
  misc_feature: MA Experiment 20000477 PARAMETER Experiment Name: Zm_5mM_SA_P Parameter: Age (day) Value: 10
  misc_feature: MA Experiment 20000477 PARAMETER Experiment Name: Zm_5mM_SA_P Parameter: Organism Value: Zea mays
  misc_feature: MA Experiment 20000477 PARAMETER Experiment Name: Zm_5mM_SA_P Parameter: Plant Line Value: 35A19
  misc_feature: MA Experiment 20000477 PARAMETER Experiment Name: Zm_5mM_SA_P Parameter: Timepoint (hr) Value: 48
  misc_feature: MA Experiment 20000477 PARAMETER Experiment Name: Zm_5mM_SA_P Parameter: Tissue Value: Aerial
  misc_feature: MA Experiment 20000477 PARAMETER Experiment Name: Zm_5mM_SA_P Parameter: Treatment Value: 5mM SA vs. No Treatment
  misc_feature: MA Experiment ID: 20000478 Result: Down-regulated in Transcription
  misc_feature: MA Experiment 20000478 PARAMETER Experiment Name: Zm_5mM_SA_P Parameter: Age (day) Value: 11
  misc_feature: MA Experiment 20000478 PARAMETER Experiment Name: Zm_5mM_SA_P Parameter: Organism Value: Zea mays
  misc_feature: MA Experiment 20000478 PARAMETER Experiment Name: Zm_5mM_SA_P Parameter: Plant Line Value: 35A19
  misc_feature: MA Experiment 20000478 PARAMETER Experiment Name: Zm_5mM_SA_P Parameter: Timepoint (hr) Value: 72
  misc_feature: MA Experiment 20000478 PARAMETER Experiment Name: Zm_5mM_SA_P Parameter: Tissue Value: Aerial
  misc_feature: MA Experiment 20000478 PARAMETER Experiment Name: Zm_5mM_SA_P Parameter: Treatment Value: 5mM SA vs. No Treatment
  misc_feature: MA Experiment ID: 20000488 Result: Down-regulated in Transcription
  misc_feature: MA Experiment 20000488 PARAMETER Experiment Name: Zm_50mM_NH4NO3_L_to_H_P Parameter: Organism Value: Zea mays
  misc_feature: MA Experiment 20000488 PARAMETER Experiment Name: Zm_50mM_NH4NO3_L_to_H_P Parameter: Timepoint (hr) Value: 8
  misc_feature: MA Experiment 20000488 PARAMETER Experiment Name: Zm_50mM_NH4NO3_L_to_H_P Parameter: Tissue Value: Leaves
  misc_feature: MA Experiment 20000488 PARAMETER Experiment Name: Zm_50mM_NH4NO3_L_to_H_P Parameter: Treatment Value: 50mM NH4NO3 vs. 100mM Mannitol
  misc_feature: MA Experiment ID: 20000492 Result: Up-regulated in Transcription
  misc_feature: MA Experiment 20000492 PARAMETER Experiment Name: Zm_Hybrid_Seed_Dev_P Parameter: DAP Value: 12
  misc_feature: MA Experiment 20000492 PARAMETER Experiment Name: Zm_Hybrid_Seed_Dev_P Parameter: Organism Value: Zea mays
  misc_feature: MA Experiment 20000492 PARAMETER Experiment Name: Zm_Hybrid_Seed_Dev_P Parameter: Plant Line Value: 35A19
  misc_feature: MA Experiment 20000492 PARAMETER Experiment Name: Zm_Hybrid_Seed_Dev_P Parameter: Tissue Value: Fert Kernel vs. Unfert Floret
  misc_feature: MA Experiment ID: 20000535 Result: Up-regulated in Transcription
  misc_feature: MA Experiment 20000535 PARAMETER Experiment Name: Zm_Hybrid_Seed_Dev_P Parameter: DAP Value: 30 vs. 12
  misc_feature: MA Experiment 20000535 PARAMETER Experiment Name: Zm_Hybrid_Seed_Dev_P Parameter: Organism Value: Zea mays
  misc_feature: MA Experiment 20000535 PARAMETER Experiment Name: Zm_Hybrid_Seed_Dev_P Parameter: Plant Line Value: 35A19
  misc_feature: MA Experiment 20000535 PARAMETER Experiment Name: Zm_Hybrid_Seed_Dev_P Parameter: Tissue Value: Embryo vs. Unfert Floret
  misc_feature: MA Experiment ID: 20000626 Result: Down-regulated in Transcription
  misc_feature: MA Experiment 20000626 PARAMETER Experiment Name: Zm_Herbicide-Treatments_P Parameter: Timepoint (hr) Value: 12
  misc_feature: MA Experiment 20000626 PARAMETER Experiment Name: Zm_Herbicide-Treatments_P Parameter: Tissue Value: Aerial
  misc_feature: MA Experiment 20000626 PARAMETER Experiment Name: Zm_Herbicide-Treatments_P Parameter: Treatment Value: Roundup vs. No Treatment
gcacgagaccattacctagaacatcctaatcgaaaaactctctcccgcgggtctcggcctcctctcctcggctcgctataagcaggctccaccgcttccgcaatggccacctaattcgctcggcgtcgggggagaagagaagcgcgcgcgatggcaccgggaagatctcttcgccctgcggggacggcggcggttctgtgggcggcgtcgctgctgctgctggcgacgtcgtgcgcgcgcgcaggtggcgcgtacgcggggccggggtgccggaagcacgtggcgagggtcacggagtacggcgcggtcggggacgggaggacgctcaacacggcggcgttcgccagggctgtggcggacctggcgcggcgcgcgcccgacggcggcgctgcgctggtggtgccgccggggaagtggctcacggggcccttcaacctcaccagctgcttcacgctctacctcgacgagggcgcccgagatcctcgcgtcccaggacatgaagcattggcccctcatagctcccctgccgtcctacgggagaggaagggacgagcctggcccaaggtacagcaatttcatcggaggatccaatctcactgacgtcatcatcacgggcaaaaatggaacgatcaacgggcaggggcaggtctggtgggacaagttccacgccaaggagctcaagttcacccgcggccacctcctcgagctcctctactctgacaacatcatcatctccaatgtcaccttcgtcgacgcgccgtactggaacctccaccctacctattgcaccaatgtgaccatcagtggcgtcaccattctcgcgccggtgaattcgcctaataccgatggaattgacccggattcttcctcgcgtgtcaagatcgaggactgctacatcgtctccggcgacgactgcgtggccgtgaagagcgggtgggacgagtacggcatcaggttcaacatgccgagccagcacatcgtcatccggaggctgacctgcgtctcccccacgagcgccatgatcgcgctgggcagcgagatgtccggcggcatccgcgacgtgcgcgccgaggacagcgtggccatcaacacggagtcggccgtcagggtcaagtccggcgccgggaggggcggcttcgtcagggacatcttcgtgcgcggcctcagcctccacaccatgaagtgggtgttctggatgaccggcaactacgggcagcaccccgacaacacgtccgaccccaacgccatgcccgaggtcaccggcatcaactacagcgacgtgttcgccgagaacgtgaccatggccggcaggatggagggcatccctaaggacccctacaccgggatctgcatatccaacgtgaccgcccgcctcgcgccggacgccaaggagctgcagtggaactgcaccaacgtcaagggggtcacctcccacgtctcgcccaagccgtgcccggagctcgccgcggagggcaagccgtgcgccttcccggaggaagagctcgtcatcggcccacccgagctgccgaagtgtagctattgaggccgattgccaaaagagatcattgatcatataggctcttcggtgatagtctagacaagcagtatgagaaatgcagctgaaatacgtttgcattgc

SEQ ID NO: 15788 - protein, 348 aa, Zea mays subsp. mays
  peptide (1)..(348): Ceres Seq. ID no. 12406239
  misc_feature (1)..(319): Pfam Name: Glycosyl hydrolases family 28 Pfam Description: Glycosyl hydrolases family 28
  misc_feature (1)..(326): Homolog of NCBI NO: 15236625 NR Description: polygalacturonase, putative
  misc_feature (1)..(325): Homolog of NCBI NO: 40714685 NR Description: putative polygalacturonase
  misc_feature (1)..(333): Homolog of NCBI NO: 11263971 NR Description: hypothetical protein T17J13.70 - Arabidopsis
  misc_feature (1)..(333): Homolog of NCBI NO: 18412253 NR Description: polygalacturonase, putative
  misc_feature (1)..(346): Homolog of NCBI NO: 15236514 NR Description: polygalacturonase, putative; protein id:
  misc_feature (1)..(347): Homolog of NCBI NO: 15224072 NR Description: polygalacturonase, putative; protein id:
  misc_feature (1)..(348): Homolog of NCBI NO: 15233124 NR Description: polygalacturonase, putative; protein id:
  misc_feature (1)..(348): Homolog of NCBI NO: 34897760 NR Description: ESTs AU029388(E30287),D49277(S16474) correspond a region of the predicted gene.~Similar to Arabidopsis thaliana
  misc_feature (1)..(348): Homolog of NCBI NO: 30692538 NR Description: polygalacturonase-like protein [Fragaria x
  misc_feature (1)..(346): Homolog of NCBI NO: 15229058 NR Description: polygalacturonase, putative; protein id:
MKHWPLIAPLPSYGRGRDEPGPRYSNFIGGSNLTDVIITGKNGTINGQGQVWWDKFHAKELKFTRGHLLELLYSDNIIISNVTFVDAPYWNLHPTYCTNVTISGVTILAPVNSPNTDGIDPDSSSRVKIEDCYIVSGDDCVAVKSGWDEYGIRFNMPSQHIVIRRLTCVSPTSAMIALGSEMSGGIRDVRAEDSVAINTESAVRVKSGAGRGGFVRDIFVRGLSLHTMKWVFWMTGNYGQHPDNTSDPNAMPEVTGINYSDVFAENVTMAGRMEGIPKDPYTGICISNVTARLAPDAKELQWNCTNVKGVTSHVSPKPCPELAAEGKPCAFPEEELVIGPPELPKCSY

SEQ ID NO: 15789 - protein, 193 aa, Zea mays subsp. mays
  peptide (1)..(193): Ceres Seq. ID no. 12406240
  misc_feature (1)..(164): Pfam Name: Glycosyl hydrolases family 28 Pfam Description: Glycosyl hydrolases family 28
  misc_feature (1)..(191): Homolog of NCBI NO: 15236514 NR Description: polygalacturonase, putative; protein id:
  misc_feature (1)..(192): Homolog of NCBI NO: 15224072 NR Description: polygalacturonase, putative; protein id:
  misc_feature (1)..(193): Homolog of NCBI NO: 15233124 NR Description: polygalacturonase, putative; protein id:
  misc_feature (1)..(171): Homolog of NCBI NO: 15236625 NR Description: polygalacturonase, putative
  misc_feature (1)..(178): Homolog of NCBI NO: 11263971 NR Description: hypothetical protein T17J13.70 - Arabidopsis
  misc_feature (1)..(178): Homolog of NCBI NO: 18412253 NR Description: polygalacturonase, putative
  misc_feature (1)..(170): Homolog of NCBI NO: 40714685 NR Description: putative polygalacturonase
  misc_feature (1)..(193): Homolog of NCBI NO: 34897760 NR Description: ESTs AU029388(E30287),D49277(S16474) correspond a region of the predicted gene.~Similar to Arabidopsis thaliana
  misc_feature (1)..(193): Homolog of NCBI NO: 30692538 NR Description: polygalacturonase-like protein [Fragaria x
  misc_feature (1)..(191): Homolog of NCBI NO: 15229058 NR Description: polygalacturonase, putative; protein id:
MPSQHIVIRRLTCVSPTSAMIALGSEMSGGIRDVRAEDSVAINTESAVRVKSGAGRGGFVRDIFVRGLSLHTMKWVFWMTGNYGQHPDNTSDPNAMPEVTGINYSDVFAENVTMAGRMEGIPKDPYTGICISNVTARLAPDAKELQWNCTNVKGVTSHVSPKPCPELAAEGKPCAFPEEELVIGPPELPKCSY

SEQ ID NO: 15790 - protein, 174 aa, Zea mays subsp. mays
  peptide (1)..(174): Ceres Seq. ID no. 12406241
  misc_feature (1)..(145): Pfam Name: Glycosyl hydrolases family 28 Pfam Description: Glycosyl hydrolases family 28
  misc_feature (1)..(152): Homolog of NCBI NO: 15236625 NR Description: polygalacturonase, putative
  misc_feature (1)..(151): Homolog of NCBI NO: 40714685 NR Description: putative polygalacturonase
  misc_feature (1)..(159): Homolog of NCBI NO: 11263971 NR Description: hypothetical protein T17J13.70 - Arabidopsis
  misc_feature (1)..(159): Homolog of NCBI NO: 18412253 NR Description: polygalacturonase, putative
  misc_feature (1)..(172): Homolog of NCBI NO: 15236514 NR Description: polygalacturonase, putative; protein id:
  misc_feature (1)..(173): Homolog of NCBI NO: 15224072 NR Description: polygalacturonase, putative; protein id:
  misc_feature (1)..(174): Homolog of NCBI NO: 15233124 NR Description: polygalacturonase, putative; protein id:
  misc_feature (1)..(174): Homolog of NCBI NO: 34897760 NR Description: ESTs AU029388(E30287),D49277(S16474) correspond a region of the predicted gene.~Similar to Arabidopsis thaliana
  misc_feature (1)..(174): Homolog of NCBI NO: 30692538 NR Description: polygalacturonase-like protein [Fragaria x
  misc_feature (1)..(172): Homolog of NCBI NO: 15229058 NR Description: polygalacturonase, putative; protein id:
MIALGSEMSGGIRDVRAEDSVAINTESAVRVKSGAGRGGFVRDIFVRGLSLHTMKWVFWMTGNYGQHPDNTSDPNAMPEVTGINYSDVFAENVTMAGRMEGIPKDPYTGICISNVTARLAPDAKELQWNCTNVKGVTSHVSPKPCPELAAEGKPCAFPEEELVIGPPELPKCSY

SEQ ID NO: 15791 - DNA, 1396 bp, Zea mays subsp. mays; identical to SEQ ID NO: 14449
  misc_feature (1)..(1396): Ceres Seq. ID no. 13636262
  misc_feature: MA Experiment ID: 108504 Result: Down-regulated in Transcription
  misc_feature: MA Experiment 108504 PARAMETER Experiment Name: Zm_Drought_P Parameter: Age (day) Value: 8
  misc_feature: MA Experiment 108504 PARAMETER Experiment Name: Zm_Drought_P Parameter: Organism Value: Zea mays
  misc_feature: MA Experiment 108504 PARAMETER Experiment Name: Zm_Drought_P Parameter: Plant Line Value: 35A19
  misc_feature: MA Experiment 108504 PARAMETER Experiment Name: Zm_Drought_P Parameter: Timepoint (hr) Value: 12
  misc_feature: MA Experiment 108504 PARAMETER Experiment Name: Zm_Drought_P Parameter: Tissue Value: Aerial
  misc_feature: MA Experiment 108504 PARAMETER Experiment Name: Zm_Drought_P Parameter: Treatment Value: Drought vs. No Drought
  misc_feature: MA Experiment ID: 108522 Result: Up-regulated in Transcription
  misc_feature: MA Experiment 108522 PARAMETER Experiment Name: Zm_42deg_Heat_P Parameter: Age (day) Value: 8
  misc_feature: MA Experiment 108522 PARAMETER Experiment Name: Zm_42deg_Heat_P Parameter: Organism Value: Zea mays
  misc_feature: MA Experiment 108522 PARAMETER Experiment Name: Zm_42deg_Heat_P Parameter: Plant Line Value: 35A19
  misc_feature: MA Experiment 108522 PARAMETER Experiment Name: Zm_42deg_Heat_P Parameter: Temperature (deg C) Value: 42 vs. 22
  misc_feature: MA Experiment 108522 PARAMETER Experiment Name: Zm_42deg_Heat_P Parameter: Timepoint (hr) Value: 1
  misc_feature: MA Experiment 108522 PARAMETER Experiment Name: Zm_42deg_Heat_P Parameter: Tissue Value: Aerial
  misc_feature: MA Experiment ID: 108523 Result: Up-regulated in Transcription
  misc_feature: MA Experiment 108523 PARAMETER Experiment Name: Zm_42deg_Heat_P Parameter: Age (day) Value: 8
  misc_feature: MA Experiment 108523 PARAMETER Experiment Name: Zm_42deg_Heat_P Parameter: Organism Value: Zea mays
  misc_feature: MA Experiment 108523 PARAMETER Experiment Name: Zm_42deg_Heat_P Parameter: Plant Line Value: 35A19
  misc_feature: MA Experiment 108523 PARAMETER Experiment Name: Zm_42deg_Heat_P Parameter: Temperature (deg C) Value: 42 vs. 22
  misc_feature: MA Experiment 108523 PARAMETER Experiment Name: Zm_42deg_Heat_P Parameter: Timepoint (hr) Value: 6
  misc_feature: MA Experiment 108523 PARAMETER Experiment Name: Zm_42deg_Heat_P Parameter: Tissue Value: Aerial
  misc_feature: MA Experiment ID: 108529 Result: Down-regulated in Transcription
  misc_feature: MA Experiment 108529 PARAMETER Experiment Name: Zm_Imbibed_Seeds_P Parameter: Age (day) Value: 5 vs. 2
  misc_feature: MA Experiment 108529 PARAMETER Experiment Name: Zm_Imbibed_Seeds_P Parameter: Organism Value: Zea mays
  misc_feature: MA Experiment 108529 PARAMETER Experiment Name: Zm_Imbibed_Seeds_P Parameter: Plant Line Value: 35A19
  misc_feature: MA Experiment 108529 PARAMETER Experiment Name: Zm_Imbibed_Seeds_P Parameter: Tissue Value: Roots vs. Embryo
  misc_feature: MA Experiment ID: 108533 Result: Up-regulated in Transcription
  misc_feature: MA Experiment 108533 PARAMETER Experiment Name: Zm_4deg_Cold_P Parameter: Age (hr) Value: 8
  misc_feature: MA Experiment 108533 PARAMETER Experiment Name: Zm_4deg_Cold_P Parameter: Organism Value: Zea mays
  misc_feature: MA Experiment 108533 PARAMETER Experiment Name: Zm_4deg_Cold_P Parameter: Plant Line Value: 35A19
  misc_feature: MA Experiment 108533 PARAMETER Experiment Name: Zm_4deg_Cold_P Parameter: Temperature (deg C) Value: 4 vs. 22
  misc_feature: MA Experiment 108533 PARAMETER Experiment Name: Zm_4deg_Cold_P Parameter: Timepoint (hr) Value: 1
  misc_feature: MA Experiment 108533 PARAMETER Experiment Name: Zm_4deg_Cold_P Parameter: Tissue Value: Aerial
  misc_feature: MA Experiment ID: 108534 Result: Up-regulated in Transcription
  misc_feature: MA Experiment 108534 PARAMETER Experiment Name: Zm_4deg_Cold_P Parameter: Age (hr) Value: 8
  misc_feature: MA Experiment 108534 PARAMETER Experiment Name: Zm_4deg_Cold_P Parameter: Organism Value: Zea mays
  misc_feature: MA Experiment 108534 PARAMETER Experiment Name: Zm_4deg_Cold_P Parameter: Plant Line Value: 35A19
  misc_feature: MA Experiment 108534 PARAMETER Experiment Name: Zm_4deg_Cold_P Parameter: Temperature (deg C) Value: 4 vs. 22
  misc_feature: MA Experiment 108534 PARAMETER Experiment Name: Zm_4deg_Cold_P Parameter: Timepoint (hr) Value: 6
  misc_feature: MA Experiment 108534 PARAMETER Experiment Name: Zm_4deg_Cold_P Parameter: Tissue Value: Aerial
  misc_feature: MA Experiment ID: 108543 Result: Up-regulated in Transcription
  misc_feature: MA Experiment ID: 108599 Result: Down-regulated in Transcription
  misc_feature: MA Experiment 108599 PARAMETER Experiment Name: Zm_RT1_P Parameter: Age (day) Value: 11
  misc_feature: MA Experiment 108599 PARAMETER Experiment Name: Zm_RT1_P Parameter: Organism Value: Zea mays
  misc_feature: MA Experiment 108599 PARAMETER Experiment Name: Zm_RT1_P Parameter: Plant Line Value: rt1 mut vs. rt1 wt
  misc_feature: MA Experiment 108599 PARAMETER Experiment Name: Zm_RT1_P Parameter: Tissue Value: Roots
  misc_feature: MA Experiment ID: 20000478 Result: Down-regulated in Transcription
  misc_feature: MA Experiment 20000478 PARAMETER Experiment Name: Zm_5mM_SA_P Parameter: Age (day) Value: 11
  misc_feature: MA Experiment 20000478 PARAMETER Experiment Name: Zm_5mM_SA_P Parameter: Organism Value: Zea mays
  misc_feature: MA Experiment 20000478 PARAMETER Experiment Name: Zm_5mM_SA_P Parameter: Plant Line Value: 35A19
  misc_feature: MA Experiment 20000478 PARAMETER Experiment Name: Zm_5mM_SA_P Parameter: Timepoint (hr) Value: 72
  misc_feature: MA Experiment 20000478 PARAMETER Experiment Name: Zm_5mM_SA_P Parameter: Tissue Value: Aerial
  misc_feature: MA Experiment 20000478 PARAMETER Experiment Name: Zm_5mM_SA_P Parameter: Treatment Value: 5mM SA vs. No Treatment
  misc_feature: MA Experiment ID: 20000488 Result: Down-regulated in Transcription
  misc_feature: MA Experiment 20000488 PARAMETER Experiment Name: Zm_50mM_NH4NO3_L_to_H_P Parameter: Organism Value: Zea mays
  misc_feature: MA Experiment 20000488 PARAMETER Experiment Name: Zm_50mM_NH4NO3_L_to_H_P Parameter: Timepoint (hr) Value: 8
  misc_feature: MA Experiment 20000488 PARAMETER Experiment Name: Zm_50mM_NH4NO3_L_to_H_P Parameter: Tissue Value: Leaves
  misc_feature: MA Experiment 20000488 PARAMETER Experiment Name: Zm_50mM_NH4NO3_L_to_H_P Parameter: Treatment Value: 50mM NH4NO3 vs. 100mM Mannitol
  misc_feature: MA Experiment ID: 20000533 Result: Down-regulated in Transcription
  misc_feature: MA Experiment 20000533 PARAMETER Experiment Name: Zm_0.001percent_MeJA_P Parameter: Age (day) Value: 11
  misc_feature: MA Experiment 20000533 PARAMETER Experiment Name: Zm_0.001percent_MeJA_P Parameter: Organism Value: Zea mays
  misc_feature: MA Experiment 20000533 PARAMETER Experiment Name: Zm_0.001percent_MeJA_P Parameter: Plant Line Value: 35A19
  misc_feature: MA Experiment 20000533 PARAMETER Experiment Name: Zm_0.001percent_MeJA_P Parameter: Timepoint (hr) Value: 72
  misc_feature: MA Experiment 20000533 PARAMETER Experiment Name: Zm_0.001percent_MeJA_P Parameter: Tissue Value: Aerial
  misc_feature: MA Experiment 20000533 PARAMETER Experiment Name: Zm_0.001percent_MeJA_P Parameter: Treatment Value: 0.001percent MeJA vs. No Treatment
  misc_feature: MA Experiment ID: 20000535 Result: Up-regulated in Transcription
  misc_feature: MA Experiment 20000535 PARAMETER Experiment Name: Zm_Hybrid_Seed_Dev_P Parameter: DAP Value: 30 vs. 12
  misc_feature: MA Experiment 20000535 PARAMETER Experiment Name: Zm_Hybrid_Seed_Dev_P Parameter: Organism Value: Zea mays
  misc_feature: MA Experiment 20000535 PARAMETER Experiment Name: Zm_Hybrid_Seed_Dev_P Parameter: Plant Line Value: 35A19
  misc_feature: MA Experiment 20000535 PARAMETER Experiment Name: Zm_Hybrid_Seed_Dev_P Parameter: Tissue Value: Embryo vs. Unfert Floret
  misc_feature: MA Experiment ID: 20001605 Result: Up-regulated in Transcription
  misc_feature: MA Experiment 20001605 PARAMETER Experiment Name: Zm_50ppm_KNO3_L-to-H_P Parameter: Age (day) Value: 19
  misc_feature: MA Experiment 20001605 PARAMETER Experiment Name: Zm_50ppm_KNO3_L-to-H_P Parameter: Organism Value: Zea mays
  misc_feature: MA Experiment 20001605 PARAMETER Experiment Name: Zm_50ppm_KNO3_L-to-H_P Parameter: Plant Line Value: 35A19
  misc_feature: MA Experiment 20001605 PARAMETER Experiment Name: Zm_50ppm_KNO3_L-to-H_P Parameter: Timepoint (hr) Value: 4
  misc_feature: MA Experiment 20001605 PARAMETER Experiment Name: Zm_50ppm_KNO3_L-to-H_P Parameter: Tissue Value: Shoots
  misc_feature: MA Experiment 20001605 PARAMETER Experiment Name: Zm_50ppm_KNO3_L-to-H_P Parameter: Treatment Value: 50ppm KNO3 vs. 50ppm KCl

SEQ ID NO: 15792 - protein, 233 aa, Zea mays subsp. mays; identical to SEQ ID NO: 14450
  peptide (1)..(233): Ceres Seq. ID no. 13636263
  misc_feature (27)..(96): Pfam Name: Glycosyl hydrolases family 16 Pfam Description: Glycosyl hydrolases family 16
  misc_feature (27)..(96): Pfam Name: Glycosyl hydrolases family 16 Pfam Description: Glycosyl hydrolases family 16
  misc_feature (27)..(96): Pfam Name: Glycosyl hydrolases family 16 Pfam Description: Glycosyl hydrolases family 16
  misc_feature (26)..(96): Homolog of NCBI NO: 29500891 NR Description: putative xyloglucan endotransglycosylase [Cucumis >gi|29500899|emb|CAD87533.1| putative xyloglucan
  misc_feature (12)..(96): Homolog of NCBI NO: 7447413 NR Description: xyloglucan endo-1,4-beta-D-glucanase (EC 3.2.1.-) barley >gi|1890577|emb|CAA63663.1| xyloglucan
  misc_feature (5)..(81): Homolog of NCBI NO: 14330332 NR Description: Xet1 protein [Festuca pratensis]
  misc_feature (9)..(96): Homolog of NCBI NO: 8886867 NR Description: xyloglucan endotransglycosylase XET2 [Asparagus
  misc_feature (1)..(96): Homolog of NCBI NO: 8886865 NR Description: xyloglucan endotransglycosylase XET1 [Asparagus
  misc_feature (5)..(81): Homolog of NCBI NO: 14330332 NR Description: Xet1 protein [Festuca pratensis]
  misc_feature (1)..(96): Homolog of NCBI NO: 8886865 NR Description: xyloglucan endotransglycosylase XET1 [Asparagus
  misc_feature (9)..(96): Homolog of NCBI NO: 8886867 NR Description: xyloglucan endotransglycosylase XET2 [Asparagus
  misc_feature (5)..(81): Homolog of NCBI NO: 14330332 NR Description: Xet1 protein [Festuca pratensis]
  misc_feature (12)..(96): Homolog of NCBI NO: 7447413 NR Description: xyloglucan endo-1,4-beta-D-glucanase (EC 3.2.1.-) barley >gi|1890577|emb|CAA63663.1| xyloglucan
  misc_feature (26)..(96): Homolog of NCBI NO: 29500891 NR Description: putative xyloglucan endotransglycosylase [Cucumis >gi|29500899|emb|CAD87533.1| putative xyloglucan
  misc_feature (7)..(96): Homolog of NCBI NO: 22947852 NR Description: xyloglucan endotransglycosylase [Malus x
  misc_feature (1)..(96): Homolog of NCBI NO: 17064792 NR Description: xyloglucan endo-1, 4-beta-D-glucanase (XTR-6)
  misc_feature (1)..(96): Homolog of NCBI NO: 15235997 NR Description: xyloglucan endotransglycosylase (XTR-6)
  misc_feature (6)..(96): Homolog of NCBI NO: 15242781 NR Description: xyloglucan endotransglycosylase (TCH4)
  misc_feature (9)..(96): Homolog of NCBI NO: 7447412 NR Description: xyloglucan endo-1,4-beta-D-glucanase (EC 3.2.1.-) barley >gi|1890575|emb|CAA63662.1| xyloglucan
  misc_feature (26)..(96): Homolog of NCBI NO: 29500891 NR Description: putative xyloglucan endotransglycosylase [Cucumis >gi|29500899|emb|CAD87533.1| putative xyloglucan
  misc_feature (7)..(96): Homolog of NCBI NO: 22947852 NR Description: xyloglucan endotransglycosylase [Malus x
  misc_feature (1)..(96): Homolog of NCBI NO: 17064792 NR Description: xyloglucan endo-1, 4-beta-D-glucanase (XTR-6)
  misc_feature (1)..(96): Homolog of NCBI NO: 15235997 NR Description: xyloglucan endotransglycosylase (XTR-6)
  misc_feature (6)..(96): Homolog of NCBI NO: 15242781 NR Description: xyloglucan endotransglycosylase (TCH4)
  misc_feature (9)..(96): Homolog of NCBI NO: 7447412 NR Description: xyloglucan endo-1,4-beta-D-glucanase (EC 3.2.1.-) barley >gi|1890575|emb|CAA63662.1| xyloglucan
  misc_feature (1)..(96): Homolog of NCBI NO: 8886865 NR Description: xyloglucan endotransglycosylase XET1 [Asparagus
  misc_feature (9)..(96): Homolog of NCBI NO: 8886867 NR Description: xyloglucan endotransglycosylase XET2 [Asparagus
  misc_feature (12)..(96): Homolog of NCBI NO: 7447413 NR Description: xyloglucan endo-1,4-beta-D-glucanase (EC 3.2.1.-) barley >gi|1890577|emb|CAA63663.1| xyloglucan
  misc_feature (9)..(96): Homolog of NCBI NO: 7447412 NR Description: xyloglucan endo-1,4-beta-D-glucanase (EC 3.2.1.-) barley >gi|1890575|emb|CAA63662.1| xyloglucan
  misc_feature (6)..(96): Homolog of NCBI NO: 15242781 NR Description: xyloglucan endotransglycosylase (TCH4)
  misc_feature (1)..(96): Homolog of NCBI NO: 15235997 NR Description: xyloglucan endotransglycosylase (XTR-6)
  misc_feature (1)..(96): Homolog of NCBI NO: 17064792 NR Description: xyloglucan endo-1, 4-beta-D-glucanase (XTR-6)
  misc_feature (7)..(96): Homolog of NCBI NO: 22947852 NR Description: xyloglucan endotransglycosylase [Malus x

SEQ ID NO: 15793 - protein, 201 aa, Zea mays subsp. mays; identical to SEQ ID NO: 14451
  peptide (1)..(201): Ceres Seq. ID no. 13636264
  misc_feature (1)..(64): Pfam Name: Glycosyl hydrolases family 16 Pfam Description: Glycosyl hydrolases family 16
  misc_feature (1)..(64): Pfam Name: Glycosyl hydrolases family 16 Pfam Description: Glycosyl hydrolases family 16
  misc_feature (1)..(64): Pfam Name: Glycosyl hydrolases family 16 Pfam Description: Glycosyl hydrolases family 16
  misc_feature (1)..(64): Homolog of NCBI NO: 7447413 NR Description: xyloglucan endo-1,4-beta-D-glucanase (EC 3.2.1.-) barley >gi|1890577|emb|CAA63663.1| xyloglucan
  misc_feature (1)..(49): Homolog of NCBI NO: 14330332 NR Description: Xet1 protein [Festuca pratensis]
  misc_feature (1)..(64): Homolog of NCBI NO: 8886867 NR Description: xyloglucan endotransglycosylase XET2 [Asparagus
  misc_feature (1)..(64): Homolog of NCBI NO: 8886865 NR Description: xyloglucan endotransglycosylase XET1 [Asparagus
  misc_feature (1)..(64): Homolog of NCBI NO: 7447412 NR Description: xyloglucan endo-1,4-beta-D-glucanase (EC 3.2.1.-) barley >gi|1890575|emb|CAA63662.1| xyloglucan
  misc_feature (1)..(49): Homolog of NCBI NO: 14330332 NR Description: Xet1 protein [Festuca pratensis]
  misc_feature (1)..(64): Homolog of NCBI NO: 8886865 NR Description: xyloglucan endotransglycosylase XET1 [Asparagus
  misc_feature (1)..(64): Homolog of NCBI NO: 8886867 NR Description: xyloglucan endotransglycosylase XET2 [Asparagus
  misc_feature (1)..(49): Homolog of NCBI NO: 14330332 NR Description: Xet1 protein [Festuca pratensis]
  misc_feature (1)..(64): Homolog of NCBI NO: 7447413 NR Description: xyloglucan endo-1,4-beta-D-glucanase (EC 3.2.1.-) barley >gi|1890577|emb|CAA63663.1| xyloglucan
  misc_feature (1)..(64): Homolog of NCBI NO: 29500891 NR Description: putative xyloglucan endotransglycosylase [Cucumis >gi|29500899|emb|CAD87533.1| putative xyloglucan
  misc_feature (1)..(64): Homolog of NCBI NO: 22947852 NR Description: xyloglucan endotransglycosylase [Malus x
  misc_feature (1)..(64): Homolog of NCBI NO: 17064792 NR Description: xyloglucan endo-1, 4-beta-D-glucanase (XTR-6)
  misc_feature (1)..(64): Homolog of NCBI NO: 15235997 NR Description: xyloglucan endotransglycosylase (XTR-6)
  misc_feature (1)..(64): Homolog of NCBI NO: 15242781 NR Description: xyloglucan endotransglycosylase (TCH4)
  misc_feature (1)..(64): Homolog of NCBI NO: 7447412 NR Description: xyloglucan endo-1,4-beta-D-glucanase (EC 3.2.1.-) barley >gi|1890575|emb|CAA63662.1| xyloglucan
  misc_feature (1)..(64): Homolog of NCBI NO: 29500891 NR Description: putative xyloglucan endotransglycosylase [Cucumis >gi|29500899|emb|CAD87533.1| putative xyloglucan
  misc_feature (1)..(64): Homolog of NCBI NO: 22947852 NR Description: xyloglucan endotransglycosylase [Malus x
  misc_feature (1)..(64): Homolog of NCBI NO: 17064792 NR Description: xyloglucan endo-1, 4-beta-D-glucanase (XTR-6)
  misc_feature (1)..(64): Homolog of NCBI NO: 15235997 NR Description: xyloglucan endotransglycosylase (XTR-6)
  misc_feature (1)..(64): Homolog of NCBI NO: 15242781 NR Description: xyloglucan endotransglycosylase (TCH4)
  misc_feature (1)..(64): Homolog of NCBI NO: 7447412 NR Description: xyloglucan endo-1,4-beta-D-glucanase (EC 3.2.1.-) barley >gi|1890575|emb|CAA63662.1| xyloglucan
  misc_feature (1)..(64): Homolog of NCBI NO: 8886865 NR Description: xyloglucan endotransglycosylase XET1 [Asparagus
  misc_feature (1)..(64): Homolog of NCBI NO: 8886867 NR Description: xyloglucan endotransglycosylase XET2 [Asparagus
  misc_feature (1)..(64): Homolog of NCBI NO: 7447413 NR Description: xyloglucan endo-1,4-beta-D-glucanase (EC 3.2.1.-) barley >gi|1890577|emb|CAA63663.1| xyloglucan
  misc_feature (1)..(64): Homolog of NCBI NO: 15242781 NR Description: xyloglucan endotransglycosylase (TCH4)
  misc_feature (1)..(64): Homolog of NCBI NO: 15235997 NR Description: xyloglucan endotransglycosylase (XTR-6)
  misc_feature (1)..(64): Homolog of NCBI NO: 17064792 NR Description: xyloglucan endo-1, 4-beta-D-glucanase (XTR-6)
  misc_feature (1)..(64): Homolog of NCBI NO: 22947852 NR Description: xyloglucan endotransglycosylase [Malus x
  misc_feature (1)..(64): Homolog of NCBI NO: 29500891 NR Description: putative xyloglucan endotransglycosylase [Cucumis >gi|29500899|emb|CAD87533.1| putative xyloglucan

SEQ ID NO: 15794 - protein, 160 aa, Zea mays subsp. mays; identical to SEQ ID NO: 14452
  peptide (1)..(160): Ceres Seq. ID no. 13636265
  misc_feature (1)..(23): Homolog of NCBI NO: 7447413 NR Description: xyloglucan endo-1,4-beta-D-glucanase (EC 3.2.1.-) barley >gi|1890577|emb|CAA63663.1| xyloglucan
  misc_feature (1)..(23): Homolog of NCBI NO: 8886867 NR Description: xyloglucan endotransglycosylase XET2 [Asparagus
  misc_feature (1)..(23): Homolog of NCBI NO: 8886865 NR Description: xyloglucan endotransglycosylase XET1 [Asparagus
  misc_feature (1)..(23): Homolog of NCBI NO: 7447412 NR Description: xyloglucan endo-1,4-beta-D-glucanase (EC 3.2.1.-) barley >gi|1890575|emb|CAA63662.1| xyloglucan
  misc_feature (1)..(23): Homolog of NCBI NO: 15242781 NR Description: xyloglucan endotransglycosylase (TCH4)
  misc_feature (1)..(23): Homolog of NCBI NO: 15235997 NR Description: xyloglucan endotransglycosylase (XTR-6)
  misc_feature (1)..(23): Homolog of NCBI NO: 17064792 NR Description: xyloglucan endo-1, 4-beta-D-glucanase (XTR-6)
  misc_feature (1)..(23): Homolog of NCBI NO: 22947852 NR Description: xyloglucan endotransglycosylase [Malus x
  misc_feature (1)..(23): Homolog of NCBI NO: 29500891 NR Description: putative xyloglucan endotransglycosylase [Cucumis >gi|29500899|emb|CAD87533.1| putative xyloglucan
  misc_feature (1)..(21): Homolog of NCBI NO: 28804632 NR Description: xyloglucan endotransglycosylase [Pyrus communis]
  misc_feature (1)..(23): Homolog of NCBI NO: 7447413 NR Description: xyloglucan endo-1,4-beta-D-glucanase (EC 3.2.1.-) barley >gi|1890577|emb|CAA63663.1| xyloglucan
  misc_feature (1)..(23): Homolog of NCBI NO: 8886867 NR Description: xyloglucan endotransglycosylase XET2 [Asparagus
  misc_feature (1)..(23): Homolog of NCBI NO: 8886865 NR Description: xyloglucan endotransglycosylase XET1 [Asparagus
  misc_feature (1)..(23): Homolog of NCBI NO: 7447412 NR Description: xyloglucan endo-1,4-beta-D-glucanase (EC 3.2.1.-) barley >gi|1890575|emb|CAA63662.1| xyloglucan
  misc_feature (1)..(23): Homolog of NCBI NO: 15242781 NR Description: xyloglucan endotransglycosylase (TCH4)
  misc_feature (1)..(23): Homolog of NCBI NO: 15235997 NR Description: xyloglucan endotransglycosylase (XTR-6)
  misc_feature (1)..(23): Homolog of NCBI NO: 17064792 NR Description: xyloglucan endo-1, 4-beta-D-glucanase (XTR-6)
  misc_feature (1)..(23): Homolog of NCBI NO: 22947852 NR Description: xyloglucan endotransglycosylase [Malus x
  misc_feature (1)..(23): Homolog of NCBI NO: 29500891 NR Description: putative xyloglucan endotransglycosylase [Cucumis >gi|29500899|emb|CAD87533.1| putative xyloglucan
  misc_feature (1)..(21): Homolog of NCBI NO: 28804632 NR Description: xyloglucan endotransglycosylase [Pyrus communis]
  misc_feature (1)..(23): Homolog of NCBI NO: 7447413 NR Description: xyloglucan endo-1,4-beta-D-glucanase (EC 3.2.1.-) barley >gi|1890577|emb|CAA63663.1| xyloglucan
  misc_feature (1)..(23): Homolog of NCBI NO: 8886867 NR Description: xyloglucan endotransglycosylase XET2 [Asparagus
  misc_feature (1)..(23): Homolog of NCBI NO: 8886865 NR Description: xyloglucan endotransglycosylase XET1 [Asparagus
  misc_feature (1)..(23): Homolog of NCBI NO: 7447412 NR Description: xyloglucan endo-1,4-beta-D-glucanase (EC 3.2.1.-) barley >gi|1890575|emb|CAA63662.1| xyloglucan
  misc_feature (1)..(23): Homolog of NCBI NO: 15242781 NR Description: xyloglucan endotransglycosylase (TCH4)
  misc_feature (1)..(23): Homolog of NCBI NO: 15235997 NR Description: xyloglucan endotransglycosylase (XTR-6)
  misc_feature (1)..(23): Homolog of NCBI NO: 17064792 NR Description: xyloglucan endo-1, 4-beta-D-glucanase (XTR-6)
  misc_feature (1)..(23): Homolog of NCBI NO: 22947852 NR Description: xyloglucan endotransglycosylase [Malus x
  misc_feature (1)..(23): Homolog of NCBI NO: 29500891 NR Description: putative xyloglucan endotransglycosylase [Cucumis >gi|29500899|emb|CAD87533.1| putative xyloglucan
  misc_feature (1)..(21): Homolog of NCBI NO: 28804632 NR Description: xyloglucan endotransglycosylase [Pyrus communis]

SEQ ID NO: 15795 - DNA, 1414 bp, Zea mays subsp. mays
  misc_feature (1)..(1414): Ceres Seq. ID no. 12350215
  misc_feature: MA Experiment ID: 108528 Result: Up-regulated in Transcription
  misc_feature: MA Experiment 108528 PARAMETER Experiment Name: Zm_Imbibed_Seeds_P Parameter: Age (day) Value: 5 vs. 2
  misc_feature: MA Experiment 108528 PARAMETER Experiment Name: Zm_Imbibed_Seeds_P Parameter: Organism Value: Zea mays
  misc_feature: MA Experiment 108528 PARAMETER Experiment Name: Zm_Imbibed_Seeds_P Parameter: Plant Line Value: 35A19
  misc_feature: MA Experiment 108528 PARAMETER Experiment Name: Zm_Imbibed_Seeds_P Parameter: Tissue Value: Aerial vs. Embryo
  misc_feature: MA Experiment ID: 108530 Result: Up-regulated in Transcription
  misc_feature: MA Experiment 108530 PARAMETER Experiment Name: Zm_Imbibed_Seeds_P Parameter: Age (day) Value: 6 vs. 2
  misc_feature: MA Experiment 108530 PARAMETER Experiment Name: Zm_Imbibed_Seeds_P Parameter: Organism Value: Zea mays
  misc_feature: MA Experiment 108530 PARAMETER Experiment Name: Zm_Imbibed_Seeds_P Parameter: Plant Line Value: 35A19
  misc_feature: MA Experiment 108530 PARAMETER Experiment Name: Zm_Imbibed_Seeds_P Parameter: Tissue Value: Aerial vs. Embryo
  misc_feature: MA Experiment ID: 108536 Result: Down-regulated in Transcription
  misc_feature: MA Experiment 108536 PARAMETER Experiment Name: Zm_Meristem_P Parameter: Age (day) Value: 8
  misc_feature: MA Experiment 108536 PARAMETER Experiment Name: Zm_Meristem_P Parameter: Organism Value: Zea mays
  misc_feature: MA Experiment 108536 PARAMETER Experiment Name: Zm_Meristem_P Parameter: Plant Line Value: 35A19
  misc_feature: MA Experiment 108536 PARAMETER Experiment Name: Zm_Meristem_P Parameter: Tissue Value: Shoot Meristem vs. Above Shoot Meristem
  misc_feature: MA Experiment ID: 108547 Result: Up-regulated in Transcription
  misc_feature: MA Experiment 108547 PARAMETER Experiment Name: Zm_Imbibed_Seeds_P Parameter: Age (day) Value: 4 vs. 2
  misc_feature: MA Experiment 108547 PARAMETER Experiment Name: Zm_Imbibed_Seeds_P Parameter: Organism Value: Zea mays
  misc_feature: MA Experiment 108547 PARAMETER Experiment Name: Zm_Imbibed_Seeds_P Parameter: Plant Line Value: 35A19
  misc_feature: MA Experiment 108547 PARAMETER Experiment Name: Zm_Imbibed_Seeds_P Parameter: Tissue Value: Aerial vs. Embryo
  misc_feature: MA Experiment ID: 108597 Result: Down-regulated in Transcription
  misc_feature: MA Experiment 108597 PARAMETER Experiment Name: Zm_100uM_ABA_P Parameter: Age (day) Value: 9
  misc_feature: MA Experiment 108597 PARAMETER Experiment Name: Zm_100uM_ABA_P Parameter: Organism Value: Zea mays
  misc_feature: MA Experiment 108597 PARAMETER Experiment Name: Zm_100uM_ABA_P Parameter: Plant Line Value: 35A19
  misc_feature: MA Experiment 108597 PARAMETER Experiment Name: Zm_100uM_ABA_P Parameter: Timepoint (hr) Value: 24
  misc_feature: MA Experiment 108597 PARAMETER Experiment Name: Zm_100uM_ABA_P Parameter: Tissue Value: Aerial
  misc_feature: MA Experiment 108597 PARAMETER Experiment Name: Zm_100uM_ABA_P Parameter: Treatment Value: 100uM ABA vs. No Treatment
  misc_feature: MA Experiment ID: 20000477 Result: Down-regulated in Transcription
  misc_feature: MA Experiment 20000477 PARAMETER Experiment Name: Zm_5mM_SA_P Parameter: Age (day) Value: 10
  misc_feature: MA Experiment 20000477 PARAMETER Experiment Name: Zm_5mM_SA_P Parameter: Organism Value: Zea mays
  misc_feature: MA Experiment 20000477 PARAMETER Experiment Name: Zm_5mM_SA_P Parameter: Plant Line Value: 35A19
  misc_feature: MA Experiment 20000477 PARAMETER Experiment Name: Zm_5mM_SA_P Parameter: Timepoint (hr) Value: 48
  misc_feature: MA Experiment 20000477 PARAMETER Experiment Name: Zm_5mM_SA_P Parameter: Tissue Value: Aerial
  misc_feature: MA Experiment 20000477 PARAMETER Experiment Name: Zm_5mM_SA_P Parameter: Treatment Value: 5mM SA vs. No Treatment
  misc_feature: MA Experiment ID: 20000478 Result: Down-regulated in Transcription
  misc_feature: MA Experiment 20000478 PARAMETER Experiment Name: Zm_5mM_SA_P Parameter: Age (day) Value: 11
  misc_feature: MA Experiment 20000478 PARAMETER Experiment Name: Zm_5mM_SA_P Parameter: Organism Value: Zea mays
  misc_feature: MA Experiment 20000478 PARAMETER Experiment Name: Zm_5mM_SA_P Parameter: Plant Line Value: 35A19
  misc_feature: MA Experiment 20000478 PARAMETER Experiment Name: Zm_5mM_SA_P Parameter: Timepoint (hr) Value: 72
  misc_feature: MA Experiment 20000478 PARAMETER Experiment Name: Zm_5mM_SA_P Parameter: Tissue Value: Aerial
  misc_feature: MA Experiment 20000478 PARAMETER Experiment Name: Zm_5mM_SA_P Parameter: Treatment Value: 5mM SA vs. No Treatment
  misc_feature: MA Experiment ID: 20000479 Result: Down-regulated in Transcription
  misc_feature: MA Experiment 20000479 PARAMETER Experiment Name: Zm_Drought_P Parameter: Age (day) Value: 10
  misc_feature: MA Experiment 20000479 PARAMETER Experiment Name: Zm_Drought_P Parameter: Organism Value: Zea mays
  misc_feature: MA Experiment 20000479 PARAMETER Experiment Name: Zm_Drought_P Parameter: Plant Line Value: 35A19
  misc_feature: MA Experiment 20000479 PARAMETER Experiment Name: Zm_Drought_P Parameter: Timepoint (hr) Value: 48
  misc_feature: MA Experiment 20000479 PARAMETER Experiment Name: Zm_Drought_P Parameter: Tissue Value: Aerial
  misc_feature: MA Experiment 20000479 PARAMETER Experiment Name: Zm_Drought_P Parameter: Treatment Value: Drought vs. No Drought
  misc_feature: MA Experiment ID: 20000480 Result: Down-regulated in Transcription
  misc_feature: MA Experiment 20000480 PARAMETER Experiment Name: Zm_Drought_P Parameter: Age (day) Value: 11
  misc_feature: MA Experiment 20000480 PARAMETER Experiment Name: Zm_Drought_P Parameter: Organism Value: Zea mays
  misc_feature: MA Experiment 20000480 PARAMETER Experiment Name: Zm_Drought_P Parameter: Plant Line Value: 35A19
  misc_feature: MA Experiment 20000480 PARAMETER Experiment Name: Zm_Drought_P Parameter: Timepoint (hr) Value: 72
  misc_feature: MA Experiment 20000480 PARAMETER Experiment Name: Zm_Drought_P Parameter: Tissue Value: Aerial
  misc_feature: MA Experiment 20000480 PARAMETER Experiment Name: Zm_Drought_P Parameter: Treatment Value: Drought vs. No Drought
atcgcttccagttcatatctatccgttctctctccataacaaacacccgaaacgccaggttataaggcggggagttaaaaaaccaaagcctattcaaacgaggagcaaaaggctactctcggagccggggttgaaccggagcggcgggcggccggccggcctcgcatcttcgccggaggaaaacaaaattaaagttcctcgcgtaggcacagatggccgacccgtcagcatcatcggtgccgccggttgtcaccatgggatccgtggtcactgtggcctcgccgcccacgggtggtggatcgacggtctctgcaggtatcacaggcggcggcaaagacgggcccgtgcgcagggtgcaaatacctgcggcgcaagtgccagccggactgcatatttgcgccctatttcccgcccgacaacctagacaagttcgcgtacgtgcaccgcgtcttcggcaccagcaacgtgatcaagattctcaacaacctccagccctaccagcgccagtacgccgtcaattcgctcgtttacgaggcggaaatgcgtatccgcgaccccatctacggctgcgtcggcgtcgtctccatgcttcagcaccgcctcatacggctcaagaaggcgctcgagagcgccagcttagagctgtccaactaccaggcggctgaagccgcggcggcctctgtggccgtgggaccccatggtgtggcagcagctgggatggcagacttcgtaggcaacgcagtgcccaattgcacacaaaacattatcaatgccgggtactccacgatggcgtcgatcaccggagctgggccgttcatgcagcaagacaactttgcctccgtgcagatgctggccatgagcttcgagggtgagaatggagctgcggcgagggtgggcatgaacggaggtggaggctatggcttcgcctactcgccggccatgggcgtcgggcacggtgtagtgtctggtcatgtgcagcagcagcagatcaacggtggacagttcttgaaaaacagcacgacgggcggggattaccggcccactatgtgatctttatcagttgcaggcgggatgaccggccgtgtcctttcggccggaggagggatggtggtggaggcgactatatgcacatgaggtgacgcgaagaaacagcagctacactagaggttgaaggctacgatccagctatttcagcagttaaatgcagcaggggcagctctacgcctctaagctagtcaattactcgaggatgtcagaaggtattttgcagagcgagggtgactggacacaaaacaacgataactcccaatgcaagaatgccgtcgtacgtacgtacgtgtagtgtaccagctgacattcaatgctcccgccaaatggagctactactagtctactactctcgctgcattcattc

SEQ ID NO: 15796 - protein, 169 aa, Zea mays subsp. mays
  peptide (1)..(169): Ceres Seq. ID no. 12350216
  misc_feature (1)..(54): Homolog of NCBI NO: 15227870 NR Description: hypothetical protein; protein id: At2g23660.1
  misc_feature (1)..(51): Homolog of NCBI NO: 18405472 NR Description: expressed protein
  misc_feature (1)..(51): Homolog of NCBI NO: 29427827 NR Description: LOB domain protein 25
  misc_feature (1)..(51): Homolog of NCBI NO: 21618134 NR Description: unknown [Arabidopsis thaliana]
  misc_feature (1)..(51): Homolog of NCBI NO: 9294470 NR Description: gb|AAB60912.1~gene_id:MGF10.6~similar to unknown
  misc_feature (1)..(57): Homolog of NCBI NO: 34896184 NR Description: contains ESTs C98868(E3203),C98869(E3203)~similar
  misc_feature (1)..(95): Homolog of NCBI NO: 15242624 NR Description: putative protein
  misc_feature (1)..(169): Homolog of NCBI NO: 15240110 NR Description: putative protein; protein id: At5g66870.1
  misc_feature (1)..(68): Homolog of NCBI NO: 15218746 NR Description: unknown protein
  misc_feature (1)..(166): Homolog of NCBI NO: 34907508 NR Description: B1099D03.24 [Oryza sativa (japonica
MRIRDPIYGCVGVVSMLQHRLIRLKKALESASLELSNYQAAEAAAASVAVGPHGVAAAGMADFVGNAVPNCTQNIINAGYSTMASITGAGPFMQQDNFASVQMLAMSFEGENGAAARVGMNGGGGYGFAYSPAMGVGHGVVSGHVQQQQINGGQFLKNSTTGGDYRPTM

SEQ ID NO: 15797 - protein, 154 aa, Zea mays subsp. mays
  peptide (1)..(154): Ceres Seq. ID no. 12350217
  misc_feature (1)..(39): Homolog of NCBI NO: 15227870 NR Description: hypothetical protein; protein id: At2g23660.1
  misc_feature (1)..(36): Homolog of NCBI NO: 21618134 NR Description: unknown [Arabidopsis thaliana]
  misc_feature (1)..(36): Homolog of NCBI NO: 29427827 NR Description: LOB domain protein 25
  misc_feature (1)..(36): Homolog of NCBI NO: 18405472 NR Description: expressed protein
  misc_feature (1)..(36): Homolog of NCBI NO: 9294470 NR Description: gb|AAB60912.1~gene_id:MGF10.6~similar to unknown
  misc_feature (1)..(42): Homolog of NCBI NO: 34896184 NR Description: contains ESTs C98868(E3203),C98869(E3203)~similar
  misc_feature (1)..(80): Homolog of NCBI NO: 15242624 NR Description: putative protein
  misc_feature (1)..(154): Homolog of NCBI NO: 15240110 NR Description: putative protein; protein id: At5g66870.1
  misc_feature (1)..(53): Homolog of NCBI NO: 15218746 NR Description: unknown protein
  misc_feature (1)..(151): Homolog of NCBI NO: 34907508 NR Description: B1099D03.24 [Oryza sativa (japonica
MLQHRLIRLKKALESASLELSNYQAAEAAAASVAVGPHGVAAAGMADFVGNAVPNCTQNIINAGYSTMASITGAGPFMQQDNFASVQMLAMSFEGENGAAARVGMNGGGGYGFAYSPAMGVGHGVVSGHVQQQQINGGQFLKNSTTGGDYRPTM

SEQ ID NO: 15798 - protein, 150 aa, Zea mays subsp. mays
  peptide (1)..(150): Ceres Seq. ID no. 12350218
MADPSASSVPPVVTMGSVVTVASPPTGGGSTVSAGITGGGKDGPVRRVQIPAAQVPAGLHICALFPARQPRQVRVRAPRLRHQQRDQDSQQPPALPAPVRRQFARLRGGNAYPRPHLRLRRRRLHASAPPHTAQEGARERQLRAVQLPGG

SEQ ID NO: 15799 - DNA, 1417 bp, Zea mays subsp. mays
  misc_feature (1)..(1417): Ceres Seq. ID no. 12407425
  misc_feature: MA Experiment ID: 108504 Result: Up-regulated in Transcription
  misc_feature: MA Experiment 108504 PARAMETER Experiment Name: Zm_Drought_P Parameter: Age (day) Value: 8
  misc_feature: MA Experiment 108504 PARAMETER Experiment Name: Zm_Drought_P Parameter: Organism Value: Zea mays
  misc_feature: MA Experiment 108504 PARAMETER Experiment Name: Zm_Drought_P Parameter: Plant Line Value: 35A19
  misc_feature: MA Experiment 108504 PARAMETER Experiment Name: Zm_Drought_P Parameter: Timepoint (hr) Value: 12
  misc_feature: MA Experiment 108504 PARAMETER Experiment Name: Zm_Drought_P Parameter: Tissue Value: Aerial
  misc_feature: MA Experiment 108504 PARAMETER Experiment Name: Zm_Drought_P Parameter: Treatment Value: Drought vs. No Drought
  misc_feature: MA Experiment ID: 108523 Result: Up-regulated in Transcription
  misc_feature: MA Experiment 108523 PARAMETER Experiment Name: Zm_42deg_Heat_P Parameter: Age (day) Value: 8
  misc_feature: MA Experiment 108523 PARAMETER Experiment Name: Zm_42deg_Heat_P Parameter: Organism Value: Zea mays
  misc_feature: MA Experiment 108523 PARAMETER Experiment Name: Zm_42deg_Heat_P Parameter: Plant Line Value: 35A19
  misc_feature: MA Experiment 108523 PARAMETER Experiment Name: Zm_42deg_Heat_P Parameter: Temperature (deg C) Value: 42 vs. 22
  misc_feature: MA Experiment 108523 PARAMETER Experiment Name: Zm_42deg_Heat_P Parameter: Timepoint (hr) Value: 6
  misc_feature: MA Experiment 108523 PARAMETER Experiment Name: Zm_42deg_Heat_P Parameter: Tissue Value: Aerial
  misc_feature: MA Experiment ID: 108527 Result: Up-regulated in Transcription
  misc_feature: MA Experiment 108527 PARAMETER Experiment Name: Zm_5mM_NO_P Parameter: Age (day) Value: 8
  misc_feature: MA Experiment 108527 PARAMETER Experiment Name: Zm_5mM_NO_P Parameter: Organism Value: Zea mays
  misc_feature: MA Experiment 108527 PARAMETER Experiment Name: Zm_5mM_NO_P Parameter: Plant Line Value: 35A19
  misc_feature: MA Experiment 108527 PARAMETER Experiment Name: Zm_5mM_NO_P Parameter: Timepoint (hr) Value: 6
  misc_feature: MA Experiment 108527 PARAMETER Experiment Name: Zm_5mM_NO_P Parameter: Tissue Value: Aerial
  misc_feature: MA Experiment 108527 PARAMETER Experiment Name: Zm_5mM_NO_P Parameter: Treatment Value: 5mM NO vs. No Treatment
  misc_feature: MA Experiment ID: 108533 Result: Up-regulated in Transcription
  misc_feature: MA Experiment 108533 PARAMETER Experiment Name: Zm_4deg_Cold_P Parameter: Age (hr) Value: 8
  misc_feature: MA Experiment 108533 PARAMETER Experiment Name: Zm_4deg_Cold_P Parameter: Organism Value: Zea mays
  misc_feature: MA Experiment 108533 PARAMETER Experiment Name: Zm_4deg_Cold_P Parameter: Plant Line Value: 35A19
  misc_feature: MA Experiment 108533 PARAMETER Experiment Name: Zm_4deg_Cold_P Parameter: Temperature (deg C) Value: 4 vs. 22
  misc_feature: MA Experiment 108533 PARAMETER Experiment Name: Zm_4deg_Cold_P Parameter: Timepoint (hr) Value: 1
  misc_feature: MA Experiment 108533 PARAMETER Experiment Name: Zm_4deg_Cold_P Parameter: Tissue Value: Aerial
  misc_feature: MA Experiment ID: 108534 Result: Up-regulated in Transcription
  misc_feature: MA Experiment 108534 PARAMETER Experiment Name: Zm_4deg_Cold_P Parameter: Age (hr) Value: 8
  misc_feature: MA Experiment 108534 PARAMETER Experiment Name: Zm_4deg_Cold_P Parameter: Organism Value: Zea mays
  misc_feature: MA Experiment 108534 PARAMETER Experiment Name: Zm_4deg_Cold_P Parameter: Plant Line Value: 35A19
  misc_feature: MA Experiment 108534 PARAMETER Experiment Name: Zm_4deg_Cold_P Parameter: Temperature (deg C) Value: 4 vs. 22
  misc_feature: MA Experiment 108534 PARAMETER Experiment Name: Zm_4deg_Cold_P Parameter: Timepoint (hr) Value: 6
  misc_feature: MA Experiment 108534 PARAMETER Experiment Name: Zm_4deg_Cold_P Parameter: Tissue Value: Aerial
  misc_feature: MA Experiment ID: 108556 Result: Up-regulated in Transcription
  misc_feature: MA Experiment 108556 PARAMETER Experiment Name: Zm_Drought_P Parameter: Age (day) Value: 9
  misc_feature: MA Experiment 108556 PARAMETER Experiment Name: Zm_Drought_P Parameter: Organism Value: Zea mays
  misc_feature: MA Experiment 108556 PARAMETER Experiment Name: Zm_Drought_P Parameter: Plant Line Value: 35A19
  misc_feature: MA Experiment 108556 PARAMETER Experiment Name: Zm_Drought_P Parameter: Timepoint (hr) Value: 24
  misc_feature: MA Experiment 108556 PARAMETER Experiment Name: Zm_Drought_P Parameter: Tissue Value: Aerial
  misc_feature: MA Experiment 108556 PARAMETER Experiment Name: Zm_Drought_P Parameter: Treatment Value: Drought vs. No Drought
  misc_feature: MA Experiment ID: 108559 Result: Up-regulated in Transcription
  misc_feature: MA Experiment 108559 PARAMETER Experiment Name: Zm_5mM_NO_P Parameter: Age (day) Value: 8
  misc_feature: MA Experiment 108559 PARAMETER Experiment Name: Zm_5mM_NO_P Parameter: Organism Value: Zea mays
  misc_feature: MA Experiment 108559 PARAMETER Experiment Name: Zm_5mM_NO_P Parameter: Plant Line Value: 35A19
  misc_feature: MA Experiment 108559 PARAMETER Experiment Name: Zm_5mM_NO_P Parameter: Timepoint (hr) Value: 12
  misc_feature: MA Experiment 108559 PARAMETER Experiment Name: Zm_5mM_NO_P Parameter: Tissue Value: Aerial
  misc_feature: MA Experiment 108559 PARAMETER Experiment Name: Zm_5mM_NO_P Parameter: Treatment Value: 5mM NO vs. No Treatment
  misc_feature: MA Experiment ID: 108688 Result: Down-regulated in Transcription
  misc_feature: MA Experiment 108688 PARAMETER Experiment Name: Zm_Embryos-Flowers__P Parameter: Tissue Value: Immature Flowers vs. Aerial+
acaacacttcccgcaacagaagcatacgccgtgcccatctatctatagctagcactagcagtggtgcacactgaaatggacagcgccagcagcctcgtggacgacaccagcagcggtggcggcggcggcggcggcgcgtccacggacaagctaagggctttggccgtcttcgccgccgcctcggggacgccgctggagcgcatgggcagcggcgccagcgcggtcgtggacgcggccgagccgggcgccgaggcggactccggctccggtgccgccgcggtgagcgttggcgggaagctgccgtcgtccaggtacaagggcgtggtgccgcagcccaacgggcggtggggcgcgcagatctacgagcgccaccagcgcgtgtggctcggcaccttcgcgggcgaggccgacgcggcgcgcgcctacgacgtcgcggcgcagcggttccgcggccgcgacgcggtcaccaacttccgcccgctcgcggacgccgacccggacgcggccgccgagctccggttcctggcgtcccgctccaaggccgaggtcgtcgacatgctccgcaagcacacatacttcgacgagctcgcgcagaacaagcgcgccttcgccgccgcgtccgcggccaccgcctcgtcgctggccaacaacccttcttcctacgcgtcgctctcccccgcgaccgcgacggccgccgccgccgccgcgcgggagcacctcttcgacaagacggtcacccccagcgacgtgggcaagctgaaccggctggtgatcccgaagcagcacgccgagaagcacttcccgctgcagctcccgtccgccggcggcgagagcaagggcgtgctcctcaacctggaggacgccgcgggcaaggtgtggcggttccgctactcgtactggaacagcagccagagctacgtgctcaccaagggctggagccgcttcgtcaaggagaagggcctccaagccggcgacgtcgtcggcttctaccgctccgctgcaggcgccgacaccaagctcttcatcgactgcaagctgcggcccaacagcgtcgtcgccgcctcgacggcaggcccgtcgcctcgggcgccggtggcgaaggccgtgcgtctcttcggcgtcgacctgctgacggcaccggccaccgccgccgcggcgccggcggaggccgtggctgtggccgggtgcaagagagccagggacttgggttcgcccccgcaggcggcgttcaagaagcagctcgtggagctggcactagtgtagattaatgctacggagcgatcgatctttccctagctagctagtcttttttattttttttgctcgatcgctcaactcagatggtagcatcaccgagctgaatttagttccctctcggcatctcacttagttggttcgtttgttaatttccagtttc

SEQ ID NO: 15800 - protein, 395 aa, Zea mays subsp. mays
  peptide (1)..(395): Ceres Seq. ID no. 12407426
  misc_feature (215)..(321): Pfam Name: B3 DNA binding domain Pfam Description: B3 DNA binding domain
  misc_feature (59)..(377): Homolog of NCBI NO: 21593532 NR Description: AP2 domain transcription factor [Arabidopsis
  misc_feature (59)..(377): Homolog of NCBI NO: 15230871 NR Description: AP2 domain transcription factor RAV, putative
  misc_feature (35)..(322): Homolog of NCBI NO: 2281641 NR Description: AP2 domain containing protein RAP2.8 [Arabidopsis
  misc_feature (76)..(202): Homolog of NCBI NO: 34895676 NR Description: putative DNA binding protein RAV2
  misc_feature (211)..(351): Homolog of NCBI NO: 34895676 NR Description: putative DNA binding protein RAV2
  misc_feature (5)..(325): Homolog of NCBI NO: 15222217 NR Description: DNA-binding protein (RAV1)
  misc_feature (5)..(322): Homolog of NCBI NO: 21554039 NR Description: putative RAV2-like DNA-binding protein
  misc_feature (5)..(322): Homolog of NCBI NO: 18409138 NR Description: AP2 domain protein RAP2.8 (RAV2)
  misc_feature (35)..(326): Homolog of NCBI NO: 15222622 NR Description: DNA-binding protein RAV2, putative
  misc_feature (1)..(395): Homolog of NCBI NO: 34911404 NR Description: DNA-binding protein RAV2-like
MDSASSLVDDTSSGGGGGGGASTDKLRALAVFAAASGTPLERMGSGASAVVDAAEPGAEADSGSGAAAVSVGGKLPSSRYKGVVPQPNGRWGAQIYERHQRVWLGTFAGEADAARAYDVAAQRFRGRDAVTNFRPLADADPDAAAELRFLASRSKAEVVDMLRKHTYFDELAQNKRAFAAASAATASSLANNPSSYASLSPATATAAAAAAREHLFDKTVTPSDVGKLNRLVIPKQHAEKHFPLQLPSAGGESKGVLLNLEDAAGKVWRFRYSYWNSSQSYVLTKGWSRFVKEKGLQAGDVVGFYRSAAGADTKLFIDCKLRPNSVVAASTAGPSPRAPVAKAVRLFGVDLLTAPATAAAAPAEAVAVAGCKRARDLGSPPQAAFKKQLVELALV

SEQ ID NO: 15801 - protein, 353 aa, Zea mays subsp. mays
  peptide (1)..(353): Ceres Seq. ID no. 12407427
  misc_feature (173)..(279): Pfam Name: B3 DNA binding domain Pfam Description: B3 DNA binding domain
  misc_feature (17)..(335): Homolog of NCBI NO: 21593532 NR Description: AP2 domain transcription factor [Arabidopsis
  misc_feature (17)..(335): Homolog of NCBI NO: 15230871 NR Description: AP2 domain transcription factor RAV, putative
  misc_feature (1)..(280): Homolog of NCBI NO: 2281641 NR Description: AP2 domain containing protein RAP2.8 [Arabidopsis
  misc_feature (34)..(160): Homolog of NCBI NO: 34895676 NR Description: putative DNA binding protein RAV2
  misc_feature (169)..(309): Homolog of NCBI NO: 34895676 NR Description: putative DNA binding protein RAV2
  misc_feature (1)..(283): Homolog of NCBI NO: 15222217 NR Description: DNA-binding protein (RAV1)
  misc_feature (1)..(280): Homolog of NCBI NO: 21554039 NR Description: putative RAV2-like DNA-binding protein
  misc_feature (1)..(280): Homolog of NCBI NO: 18409138 NR Description: AP2 domain protein RAP2.8 (RAV2)
  misc_feature (1)..(284): Homolog of NCBI NO: 15222622 NR Description: DNA-binding protein RAV2, putative
  misc_feature (1)..(353): Homolog of NCBI NO: 34911404 NR Description: DNA-binding protein RAV2-like
MGSGASAVVDAAEPGAEADSGSGAAAVSVGGKLPSSRYKGVVPQPNGRWGAQIYERHQRVWLGTFAGEADAARAYDVAAQRFRGRDAVTNFRPLADADPDAAAELRFLASRSKAEVVDMLRKHTYFDELAQNKRAFAAASAATASSLANNPSSYASLSPATATAAAAAAREHLFDKTVTPSDVGKLNRLVIPKQHAEKHFPLQLPSAGGESKGVLLNLEDAAGKVWRFRYSYWNSSQSYVLTKGWSRFVKEKGLQAGDVVGFYRSAAGADTKLFIDCKLRPNSVVAASTAGPSPRAPVAKAVRLFGVDLLTAPATAAAAPAEAVAVAGCKRARDLGSPPQAAFKKQLVELALV

SEQ ID NO: 15802 - protein, 235 aa, Zea mays subsp. mays
  peptide (1)..(235): Ceres Seq. ID no. 12407428
  misc_feature (55)..(161): Pfam Name: B3 DNA binding domain Pfam Description: B3 DNA binding domain
  misc_feature (1)..(217): Homolog of NCBI NO: 21593532 NR Description: AP2 domain transcription factor [Arabidopsis
  misc_feature (1)..(217): Homolog of NCBI NO: 15230871 NR Description: AP2 domain transcription factor RAV, putative
  misc_feature (1)..(162): Homolog of NCBI NO: 2281641 NR Description: AP2 domain containing protein RAP2.8 [Arabidopsis
  misc_feature (1)..(42): Homolog of NCBI NO: 34895676 NR Description: putative DNA binding protein RAV2
  misc_feature (51)..(191): Homolog of NCBI NO: 34895676 NR Description: putative DNA binding protein RAV2
  misc_feature (1)..(165): Homolog of NCBI NO: 15222217 NR Description: DNA-binding protein (RAV1)
  misc_feature (1)..(162): Homolog of NCBI NO: 21554039 NR Description: putative RAV2-like DNA-binding protein
  misc_feature (1)..(162): Homolog of NCBI NO: 18409138 NR Description: AP2 domain protein RAP2.8 (RAV2)
  misc_feature (1)..(166): Homolog of NCBI NO: 15222622 NR Description: DNA-binding protein RAV2, putative
  misc_feature (1)..(235): Homolog of NCBI NO: 34911404 NR Description: DNA-binding protein RAV2-like
MLRKHTYFDELAQNKRAFAAASAATASSLANNPSSYASLSPATATAAAAAAREHLFDKTVTPSDVGKLNRLVIPKQHAEKHFPLQLPSAGGESKGVLLNLEDAAGKVWRFRYSYWNSSQSYVLTKGWSRFVKEKGLQAGDVVGFYRSAAGADTKLFIDCKLRPNSVVAASTAGPSPRAPVAKAVRLFGVDLLTAPATAAAAPAEAVAVAGCKRARDLGSPPQAAFKKQLVELALV

SEQ ID NO: 15803 - DNA, 1352 bp, Zea mays subsp. mays
  misc_feature (1)..(1352): Ceres Seq. ID no. 12406751
  misc_feature: MA Experiment ID: 108529 Result: Down-regulated in Transcription
  misc_feature: MA Experiment 108529 PARAMETER Experiment Name: Zm_Imbibed_Seeds_P Parameter: Age (day) Value: 5 vs. 2
  misc_feature: MA Experiment 108529 PARAMETER Experiment Name: Zm_Imbibed_Seeds_P Parameter: Organism Value: Zea mays
  misc_feature: MA Experiment 108529 PARAMETER Experiment Name: Zm_Imbibed_Seeds_P Parameter: Plant Line Value: 35A19
  misc_feature: MA Experiment 108529 PARAMETER Experiment Name: Zm_Imbibed_Seeds_P Parameter: Tissue Value: Roots vs. Embryo
  misc_feature: MA Experiment ID: 108544 Result: Up-regulated in Transcription
  misc_feature: MA Experiment ID: 108556 Result: Up-regulated in Transcription
  misc_feature: MA Experiment 108556 PARAMETER Experiment Name: Zm_Drought_P Parameter: Age (day) Value: 9
  misc_feature: MA Experiment 108556 PARAMETER Experiment Name: Zm_Drought_P Parameter: Organism Value: Zea mays
  misc_feature: MA Experiment 108556 PARAMETER Experiment Name: Zm_Drought_P Parameter: Plant Line Value: 35A19
  misc_feature: MA Experiment 108556 PARAMETER Experiment Name: Zm_Drought_P Parameter: Timepoint (hr) Value: 24
  misc_feature: MA Experiment 108556 PARAMETER Experiment Name: Zm_Drought_P Parameter: Tissue Value: Aerial
  misc_feature: MA Experiment 108556 PARAMETER Experiment Name: Zm_Drought_P Parameter: Treatment Value: Drought vs. No Drought
  misc_feature: MA Experiment ID: 20000108 Result: Down-regulated in Transcription
  misc_feature: MA Experiment 20000108 PARAMETER Experiment Name: Zm_Root-Tips_P Parameter: Age (day) Value: 12
  misc_feature: MA Experiment 20000108 PARAMETER Experiment Name: Zm_Root-Tips_P Parameter: Organism Value: Zea mays
  misc_feature: MA Experiment 20000108 PARAMETER Experiment Name: Zm_Root-Tips_P Parameter: Tissue Value: Root tips vs. Root mid region    35
  misc_feature: MA Experiment 20000108 PARAMETER Experiment Name: Zm_Root-Tips_P Parameter: Tissue Value: Root tips vs. Root mid region   Sequence Listing-Misc Features (4)
  misc_feature: MA Experiment ID: 20000477 Result: Up-regulated in Transcription
  misc_feature: MA Experiment 20000477 PARAMETER Experiment Name: Zm_5mM_SA_P Parameter: Age (day) Value: 10
  misc_feature: MA Experiment 20000477 PARAMETER Experiment Name: Zm_5mM_SA_P Parameter: Organism Value: Zea mays
  misc_feature: MA Experiment 20000477 PARAMETER Experiment Name: Zm_5mM_SA_P Parameter: Plant Line Value: 35A19
  misc_feature: MA Experiment 20000477 PARAMETER Experiment Name: Zm_5mM_SA_P Parameter: Timepoint (hr) Value: 48
  misc_feature: MA Experiment 20000477 PARAMETER Experiment Name: Zm_5mM_SA_P Parameter: Tissue Value: Aerial
  misc_feature: MA Experiment 20000477 PARAMETER Experiment Name: Zm_5mM_SA_P Parameter: Treatment Value: 5mM SA vs. No Treatment
  misc_feature: MA Experiment ID: 20000478 Result: Up-regulated in Transcription
  misc_feature: MA Experiment 20000478 PARAMETER Experiment Name: Zm_5mM_SA_P Parameter: Age (day) Value: 11
  misc_feature: MA Experiment 20000478 PARAMETER Experiment Name: Zm_5mM_SA_P Parameter: Organism Value: Zea mays
  misc_feature: MA Experiment 20000478 PARAMETER Experiment Name: Zm_5mM_SA_P Parameter: Plant Line Value: 35A19
  misc_feature: MA Experiment 20000478 PARAMETER Experiment Name: Zm_5mM_SA_P Parameter: Timepoint (hr) Value: 72
  misc_feature: MA Experiment 20000478 PARAMETER Experiment Name: Zm_5mM_SA_P Parameter: Tissue Value: Aerial
  misc_feature: MA Experiment 20000478 PARAMETER Experiment Name: Zm_5mM_SA_P Parameter: Treatment Value: 5mM SA vs. No Treatment
  misc_feature: MA Experiment ID: 20000480 Result: Up-regulated in Transcription
  misc_feature: MA Experiment 20000480 PARAMETER Experiment Name: Zm_Drought_P Parameter: Age (day) Value: 11
  misc_feature: MA Experiment 20000480 PARAMETER Experiment Name: Zm_Drought_P Parameter: Organism Value: Zea mays
  misc_feature: MA Experiment 20000480 PARAMETER Experiment Name: Zm_Drought_P Parameter: Plant Line Value: 35A19
  misc_feature: MA Experiment 20000480 PARAMETER Experiment Name: Zm_Drought_P Parameter: Timepoint (hr) Value: 72
  misc_feature: MA Experiment 20000480 PARAMETER Experiment Name: Zm_Drought_P Parameter: Tissue Value: Aerial
  misc_feature: MA Experiment 20000480 PARAMETER Experiment Name: Zm_Drought_P Parameter: Treatment Value: Drought vs. No Drought
gagcagagcagcagtgaccagtgagctgcttgtccaagaatcgctcccactcccggctgtcgggagagcgcagcccagctagccgcctccgcttcttggaggtcgatggccgcgaaggggttgagggaggtggggaggaggagggcggcggaggtcgggcggcgctgcttgtctggcgggagcgctgggccgccggcgccggcggcgaagcggaaggagggagggaaggcggtgaacctgttcacggccgtcaaccaggcgctccacatcgccctcgacaccgacccccgcgcctacgtcttcggagaggacgtcgggttcggcggcgtcttccgctgcacgacaggcctcgccgatcggttcggcaagagcagagtgttcaacacgccgctgtgtgagcagggtattgctggatttgccatcggcctagcagcgatgggcaatcgagctatcgcagaaatccagtttgcggactacatctttccagcctttgatcagattgtcaatgaagcagctaagttcagatatcggagtggaaatgaatttaactgtggaggcttaacgattcgaactccctatggtgctgttgggcatggtggtcattaccattcacagtcaccagaggctttcttctgtcacgttcctggactcaaggttgtcataccacggagtccgcgcgaggctaaggggttgctgttggccagcatccgagatccaaacccagttgtattttttgagccaaagtggctgtatcgtttggctgttgaagaagttcctgaggaggattacatgctgccgttatccgaggcagaagtgattagggaaggaagtgatataacgcttgttggatggggagctcagcttgcggtgctgaaagaagcctgtgaagatgctgcaaaggacggggtgtcttgcgagctcattgatctgaaaacactcgtaccatgggacaaggaaacggtagaggcctcggtgaagaagaccgggaagctcctcgttagccacgaggctccagtcaccgggggcttcggcgcggagatcgccgcgtccattgccgagcgctgcttccagaggttagaagcacccgtggcgagagtctgcggtctcgacacccctttccctctcgtgtacgagccattttacatgcccaccaagaacaaggtcctggatgcgataaaagccaccatagatttctgaaacatgttgcttgatcgatacagagtactctagttacatgtgcacggtttgtgctggtctgggtctgtagcctgcctgaggatgagcgatccacaaaccggcttatttgtattcaacaatacagcgataaataaagccgcaaggtgcaaaattgt

SEQ ID NO: 15804 - protein, 363 aa, Zea mays subsp. mays
  peptide (1)..(363): Ceres Seq. ID no. 12406752
  misc_feature (233)..(353): Pfam Name: Transketolase, C-terminal domain Pfam Description: Transketolase, C-terminal domain
  misc_feature (30)..(363): Homolog of NCBI NO: 346979 NR Description: 3-methyl-2-oxobutanoate dehydrogenase (lipoamide)
  misc_feature (30)..(363): Homolog of NCBI NO: 7546385 NR Description: Chain B, Human Branched-Chain Alpha-Keto Acid
  misc_feature (30)..(363): Homolog of NCBI NO: 481864 NR Description: 3-methyl-2-oxobutanoate dehydrogenase (lipoamide)
  misc_feature (1)..(363): Homolog of NCBI NO: 4557353 NR Description: branched chain keto acid dehydrogenase E1, beta
  misc_feature (1)..(363): Homolog of NCBI NO: 27806223 NR Description: branched chain keto acid dehydrogenase E1, beta
  misc_feature (30)..(363): Homolog of NCBI NO: 12964600 NR Description: branched-chain alpha-keto acid dehydrogenase
  misc_feature (38)..(363): Homolog of NCBI NO: 15231242 NR Description: branched chain alpha-keto acid dehydrogenase E1
  misc_feature (14)..(363): Homolog of NCBI NO: 11252215 NR Description: 3-methyl-2-oxobutanoate dehydrogenase (lipoamide)
  misc_feature (14)..(363): Homolog of NCBI NO: 15222731 NR Description: branched-chain alpha-keto acid decarboxylase E1
  misc_feature (1)..(363): Homolog of NCBI NO: 34395021 NR Description: putative branched-chain alpha-keto acid
MAAKGLREVGRRRAAEVGRRCLSGGSAGPPAPAAKRKEGGKAVNLFTAVNQALHIALDTDPRAYVFGEDVGFGGVFRCTTGLADRFGKSRVFNTPLCEQGIAGFAIGLAAMGNRAIAEIQFADYIFPAFDQIVNEAAKFRYRSGNEFNCGGLTIRTPYGAVGHGGHYHSQSPEAFFCHVPGLKVVIPRSPREAKGLLLASIRDPNPVVFFEPKWLYRLAVEEVPEEDYMLPLSEAEVIREGSDITLVGWGAQLAVLKEACEDAAKDGVSCELIDLKTLVPWDKETVEASVKKTGKLLVSHEAPVTGGFGAEIAASIAERCFQRLEAPVARVCGLDTPFPLVYEPFYMPTKNKVLDAIKATIDF

SEQ ID NO: 15805 - protein, 253 aa, Zea mays subsp. mays
  peptide (1)..(253): Ceres Seq. ID no. 12406753
  misc_feature (123)..(243): Pfam Name: Transketolase, C-terminal domain Pfam Description: Transketolase, C-terminal domain
  misc_feature (1)..(253): Homolog of NCBI NO: 346979 NR Description: 3-methyl-2-oxobutanoate dehydrogenase (lipoamide)
  misc_feature (1)..(253): Homolog of NCBI NO: 7546385 NR Description: Chain B, Human Branched-Chain Alpha-Keto Acid
  misc_feature (1)..(253): Homolog of NCBI NO: 481864 NR Description: 3-methyl-2-oxobutanoate dehydrogenase (lipoamide)
  misc_feature (1)..(253): Homolog of NCBI NO: 4557353 NR Description: branched chain keto acid dehydrogenase E1, beta
  misc_feature (1)..(253): Homolog of NCBI NO: 27806223 NR Description: branched chain keto acid dehydrogenase E1, beta
  misc_feature (1)..(253): Homolog of NCBI NO: 12964600 NR Description: branched-chain alpha-keto acid dehydrogenase
  misc_feature (1)..(253): Homolog of NCBI NO: 15231242 NR Description: branched chain alpha-keto acid dehydrogenase E1
  misc_feature (1)..(253): Homolog of NCBI NO: 11252215 NR Description: 3-methyl-2-oxobutanoate dehydrogenase (lipoamide)
  misc_feature (1)..(253): Homolog of NCBI NO: 15222731 NR Description: branched-chain alpha-keto acid decarboxylase E1
  misc_feature (1)..(253): Homolog of NCBI NO: 34395021 NR Description: putative branched-chain alpha-keto acid
MGNRAIAEIQFADYIFPAFDQIVNEAAKFRYRSGNEFNCGGLTIRTPYGAVGHGGHYHSQSPEAFFCHVPGLKVVIPRSPREAKGLLLASIRDPNPVVFFEPKWLYRLAVEEVPEEDYMLPLSEAEVIREGSDITLVGWGAQLAVLKEACEDAAKDGVSCELIDLKTLVPWDKETVEASVKKTGKLLVSHEAPVTGGFGAEIAASIAERCFQRLEAPVARVCGLDTPFPLVYEPFYMPTKNKVLDAIKATIDF

SEQ ID NO: 15806 - DNA, 1501 bp, Zea mays subsp. mays
  misc_feature (1)..(1501): Ceres Seq. ID no. 12381108
  misc_feature: MA Experiment ID: 108529 Result: Up-regulated in Transcription
  misc_feature: MA Experiment 108529 PARAMETER Experiment Name: Zm_Imbibed_Seeds_P Parameter: Age (day) Value: 5 vs. 2
  misc_feature: MA Experiment 108529 PARAMETER Experiment Name: Zm_Imbibed_Seeds_P Parameter: Organism Value: Zea mays
  misc_feature: MA Experiment 108529 PARAMETER Experiment Name: Zm_Imbibed_Seeds_P Parameter: Plant Line Value: 35A19
  misc_feature: MA Experiment 108529 PARAMETER Experiment Name: Zm_Imbibed_Seeds_P Parameter: Tissue Value: Roots vs. Embryo
  misc_feature: MA Experiment ID: 108535 Result: Down-regulated in Transcription
  misc_feature: MA Experiment 108535 PARAMETER Experiment Name: Zm_Meristem_P Parameter: Age (day) Value: 8
  misc_feature: MA Experiment 108535 PARAMETER Experiment Name: Zm_Meristem_P Parameter: Organism Value: Zea mays
  misc_feature: MA Experiment 108535 PARAMETER Experiment Name: Zm_Meristem_P Parameter: Plant Line Value: 35A19
  misc_feature: MA Experiment 108535 PARAMETER Experiment Name: Zm_Meristem_P Parameter: Tissue Value: Root Meristem vs. Above Root Meristem
  misc_feature: MA Experiment ID: 108543 Result: Up-regulated in Transcription
  misc_feature: MA Experiment ID: 108556 Result: Down-regulated in Transcription
  misc_feature: MA Experiment 108556 PARAMETER Experiment Name: Zm_Drought_P Parameter: Age (day) Value: 9
  misc_feature: MA Experiment 108556 PARAMETER Experiment Name: Zm_Drought_P Parameter: Organism Value: Zea mays
  misc_feature: MA Experiment 108556 PARAMETER Experiment Name: Zm_Drought_P Parameter: Plant Line Value: 35A19
  misc_feature: MA Experiment 108556 PARAMETER Experiment Name: Zm_Drought_P Parameter: Timepoint (hr) Value: 24
  misc_feature: MA Experiment 108556 PARAMETER Experiment Name: Zm_Drought_P Parameter: Tissue Value: Aerial
  misc_feature: MA Experiment 108556 PARAMETER Experiment Name: Zm_Drought_P Parameter: Treatment Value: Drought vs. No Drought
  misc_feature: MA Experiment ID: 108597 Result: Down-regulated in Transcription
  misc_feature: MA Experiment 108597 PARAMETER Experiment Name: Zm_100uM_ABA_P Parameter: Age (day) Value: 9
  misc_feature: MA Experiment 108597 PARAMETER Experiment Name: Zm_100uM_ABA_P Parameter: Organism Value: Zea mays
  misc_feature: MA Experiment 108597 PARAMETER Experiment Name: Zm_100uM_ABA_P Parameter: Plant Line Value: 35A19
  misc_feature: MA Experiment 108597 PARAMETER Experiment Name: Zm_100uM_ABA_P Parameter: Timepoint (hr) Value: 24
  misc_feature: MA Experiment 108597 PARAMETER Experiment Name: Zm_100uM_ABA_P Parameter: Tissue Value: Aerial
  misc_feature: MA Experiment 108597 PARAMETER Experiment Name: Zm_100uM_ABA_P Parameter: Treatment Value: 100uM ABA vs. No Treatment
  misc_feature: MA Experiment ID: 20000477 Result: Down-regulated in Transcription
  misc_feature: MA Experiment 20000477 PARAMETER Experiment Name: Zm_5mM_SA_P Parameter: Age (day) Value: 10
  misc_feature: MA Experiment 20000477 PARAMETER Experiment Name: Zm_5mM_SA_P Parameter: Organism Value: Zea mays
  misc_feature: MA Experiment 20000477 PARAMETER Experiment Name: Zm_5mM_SA_P Parameter: Plant Line Value: 35A19
  misc_feature: MA Experiment 20000477 PARAMETER Experiment Name: Zm_5mM_SA_P Parameter: Timepoint (hr) Value: 48
  misc_feature: MA Experiment 20000477 PARAMETER Experiment Name: Zm_5mM_SA_P Parameter: Tissue Value: Aerial
  misc_feature: MA Experiment 20000477 PARAMETER Experiment Name: Zm_5mM_SA_P Parameter: Treatment Value: 5mM SA vs. No Treatment
  misc_feature: MA Experiment ID: 20000479 Result: Down-regulated in Transcription
  misc_feature: MA Experiment 20000479 PARAMETER Experiment Name: Zm_Drought_P Parameter: Age (day) Value: 10
  misc_feature: MA Experiment 20000479 PARAMETER Experiment Name: Zm_Drought_P Parameter: Organism Value: Zea mays
  misc_feature: MA Experiment 20000479 PARAMETER Experiment Name: Zm_Drought_P Parameter: Plant Line Value: 35A19
  misc_feature: MA Experiment 20000479 PARAMETER Experiment Name: Zm_Drought_P Parameter: Timepoint (hr) Value: 48
  misc_feature: MA Experiment 20000479 PARAMETER Experiment Name: Zm_Drought_P Parameter: Tissue Value: Aerial
  misc_feature: MA Experiment 20000479 PARAMETER Experiment Name: Zm_Drought_P Parameter: Treatment Value: Drought vs. No Drought
  misc_feature: MA Experiment ID: 20000480 Result: Down-regulated in Transcription
  misc_feature: MA Experiment 20000480 PARAMETER Experiment Name: Zm_Drought_P Parameter: Age (day) Value: 11
  misc_feature: MA Experiment 20000480 PARAMETER Experiment Name: Zm_Drought_P Parameter: Organism Value: Zea mays
  misc_feature: MA Experiment 20000480 PARAMETER Experiment Name: Zm_Drought_P Parameter: Plant Line Value: 35A19
  misc_feature: MA Experiment 20000480 PARAMETER Experiment Name: Zm_Drought_P Parameter: Timepoint (hr) Value: 72
  misc_feature: MA Experiment 20000480 PARAMETER Experiment Name: Zm_Drought_P Parameter: Tissue Value: Aerial
  misc_feature: MA Experiment 20000480 PARAMETER Experiment Name: Zm_Drought_P Parameter: Treatment Value: Drought vs. No Drought
  misc_feature: MA Experiment ID: 20000492 Result: Up-regulated in Transcription
  misc_feature: MA Experiment 20000492 PARAMETER Experiment Name: Zm_Hybrid_Seed_Dev_P Parameter: DAP Value: 12
  misc_feature: MA Experiment 20000492 PARAMETER Experiment Name: Zm_Hybrid_Seed_Dev_P Parameter: Organism Value: Zea mays
  misc_feature: MA Experiment 20000492 PARAMETER Experiment Name: Zm_Hybrid_Seed_Dev_P Parameter: Plant Line Value: 35A19
  misc_feature: MA Experiment 20000492 PARAMETER Experiment Name: Zm_Hybrid_Seed_Dev_P Parameter: Tissue Value: Fert Kernel vs. Unfert Floret
  misc_feature: MA Experiment ID: 20000532 Result: Down-regulated in Transcription
  misc_feature: MA Experiment 20000532 PARAMETER Experiment Name: Zm_0.001percent_MeJA_P Parameter: Age (day) Value: 10
  misc_feature: MA Experiment 20000532 PARAMETER Experiment Name: Zm_0.001percent_MeJA_P Parameter: Organism Value: Zea mays
  misc_feature: MA Experiment 20000532 PARAMETER Experiment Name: Zm_0.001percent_MeJA_P Parameter: Plant Line Value: 35A19
  misc_feature: MA Experiment 20000532 PARAMETER Experiment Name: Zm_0.001percent_MeJA_P Parameter: Timepoint (hr) Value: 48
  misc_feature: MA Experiment 20000532 PARAMETER Experiment Name: Zm_0.001percent_MeJA_P Parameter: Tissue Value: Aerial
  misc_feature: MA Experiment 20000532 PARAMETER Experiment Name: Zm_0.001percent_MeJA_P Parameter: Treatment Value: 0.001percent MeJA vs. No Treatment
  misc_feature: MA Experiment ID: 20000626 Result: Down-regulated in Transcription
  misc_feature: MA Experiment 20000626 PARAMETER Experiment Name: Zm_Herbicide-Treatments_P Parameter: Timepoint (hr) Value: 12
  misc_feature: MA Experiment 20000626 PARAMETER Experiment Name: Zm_Herbicide-Treatments_P Parameter: Tissue Value: Aerial
  misc_feature: MA Experiment 20000626 PARAMETER Experiment Name: Zm_Herbicide-Treatments_P Parameter: Treatment Value: Roundup vs. No Treatment
  misc_feature: MA Experiment ID: 20000630 Result: Down-regulated in Transcription
  misc_feature: MA Experiment 20000630 PARAMETER Experiment Name: Zm_Herbicide-Treatments_P Parameter: Timepoint (hr) Value: 4
  misc_feature: MA Experiment 20000630 PARAMETER Experiment Name: Zm_Herbicide-Treatments_P Parameter: Tissue Value: Aerial
  misc_feature: MA Experiment 20000630 PARAMETER Experiment Name: Zm_Herbicide-Treatments_P Parameter: Treatment Value: Roundup vs. No Treatment
  misc_feature: MA Experiment ID: 20001613 Result: Down-regulated in Transcription
  misc_feature: MA Experiment 20001613 PARAMETER Experiment Name: Zm_50ppm_KNO3_L-to-H_P Parameter: Age (day) Value: 20
  misc_feature: MA Experiment 20001613 PARAMETER Experiment Name: Zm_50ppm_KNO3_L-to-H_P Parameter: Organism Value: Zea mays
  misc_feature: MA Experiment 20001613 PARAMETER Experiment Name: Zm_50ppm_KNO3_L-to-H_P Parameter: Plant Line Value: 35A19
  misc_feature: MA Experiment 20001613 PARAMETER Experiment Name: Zm_50ppm_KNO3_L-to-H_P Parameter: Timepoint (hr) Value: 24
  misc_feature: MA Experiment 20001613 PARAMETER Experiment Name: Zm_50ppm_KNO3_L-to-H_P Parameter: Tissue Value: Roots
  misc_feature: MA Experiment 20001613 PARAMETER Experiment Name: Zm_50ppm_KNO3_L-to-H_P Parameter: Treatment Value: 50ppm KNO3 vs. 50ppm KCl
  misc_feature: MA Experiment ID: 20001614 Result: Down-regulated in Transcription
  misc_feature: MA Experiment 20001614 PARAMETER Experiment Name: Zm_50ppm_KNO3_L-to-H_P Parameter: Age (day) Value: 21
  misc_feature: MA Experiment 20001614 PARAMETER Experiment Name: Zm_50ppm_KNO3_L-to-H_P Parameter: Organism Value: Zea mays
  misc_feature: MA Experiment 20001614 PARAMETER Experiment Name: Zm_50ppm_KNO3_L-to-H_P Parameter: Plant Line Value: 35A19
  misc_feature: MA Experiment 20001614 PARAMETER Experiment Name: Zm_50ppm_KNO3_L-to-H_P Parameter: Timepoint (hr) Value: 48
  misc_feature: MA Experiment 20001614 PARAMETER Experiment Name: Zm_50ppm_KNO3_L-to-H_P Parameter: Tissue Value: Roots
  misc_feature: MA Experiment 20001614 PARAMETER Experiment Name: Zm_50ppm_KNO3_L-to-H_P Parameter: Treatment Value: 50ppm KNO3 vs. 50ppm KCl
cgtttgtctcttccccagtcgcgcaccgcgggccgcggttcgcctggcggctggcgtaaggtagcggctgcgacgtgagtgggcctatatcagcgcggcactcacggggaggcggtgccaacccatatccatcacggcgaagagacctcgggagtgagtgggccgctgggagagcagacaacactgcaacggggtgcgcgcccgcccgtgccgttctccgtcgtcaccgttcgcccgccgccgatccatggggtgggcgctggctctgcacggcggcgccggggacgtgccgcgcacgctgccgcccgagagcagggagccgcgcctcgccacactccgccgctgcctcgacatcggcaccgccgcgctccgggagggccgcaccgcgctcgacgttgtcgagctcgtcgtgagggagctggaggactgcccgcacttcaacgccggccggggctccgtgctcacctccgccggcaccgtcgagatggaggcctgcgtcatggagggcgccaccctgcactgcggcgcggtctccgggctctccaccgttgccaacgccgtctccctcgccagactcgtcatggagaagacgccgcacatctacctcgccttcgacggcgccgaggccttcgccagggaacagggggtggagactaaggatccaagccactttatcacggacaacaatatcgagcgtgaggcaggccaaagaggccaacagggtgcagatcgactacacccagccagcagcaggccaaagccaaaaggcccaggccgtggtggacgacaactgccagacgggcacggtagggtgcgtggccgtggacgcggcgggcaacctcgctacggcgacgtccacgggccgggctggtgaacaagatgcccggcaggatcggcgacacgcctctggtgggcgccggcacgtacgccaacgcgctgtgcgcggtgtccgccacgggcaagggcgaggagatcatccgccgcacggtggcgcgcgacgtcgcggcgctgatggagcgcggggacgcgctcccggctgcggcgacgccgcggcgcgcgtcgtggcgggggcggcccgcggccccgtggggctggtggccgtgtcgcgccagggggaggtttgtatggcgcacaacaccaccgccatgttcagggcgtgcgccaccgaggccggccacaccgaagtcggcatctggacggacgccgccgacgcaggcacgggcgcggacggagagactgtcagcgtcgcgctctagctctaggcatttcatccccgtgtggcgtattttatcgttcgcgtcccattattgccccctgtccgatagacaacttgttctcgattcggtaatttcaccgtgcttcagctgcgtgtgtttggaaaaattgattcggtttcgggtattgttaagagatcgatgggagaagtgaaacattgttgggcgttcagtatgcttttgtaataccttttgttttcttaaataaagtcctaaggagtgttggg

SEQ ID NO: 15807 - protein, 208 aa, Zea mays subsp. mays
  peptide (1)..(208): Ceres Seq. ID no. 12381109
  misc_feature (3)..(148): Pfam Name: Asparaginase Pfam Description: Asparaginase
  misc_feature (2)..(148): Homolog of NCBI NO: 18401029 NR Description: putative L-asparaginase
  misc_feature (3)..(148): Homolog of NCBI NO: 11066973 NR Description: asparaginase [Hordeum vulgare]
  misc_feature (2)..(150): Homolog of NCBI NO: 1703447 NR Description: L-ASPARAGINASE (L-ASPARAGINE AMIDOHYDROLASE)
  misc_feature (2)..(150): Homolog of NCBI NO: 6685231 NR Description: L-asparaginase (L-asparagine amidohydrolase)
  misc_feature (2)..(150): Homolog of NCBI NO: 231573 NR Description: L-ASPARAGINASE (L-ASPARAGINE AMIDOHYDROLASE)
  misc_feature (1)..(179): Homolog of NCBI NO: 1076292 NR Description: asparaginase (EC 3.5.1.1) - Arabidopsis thaliana
  misc_feature (1)..(179): Homolog of NCBI NO: 15241528 NR Description: asparaginase
  misc_feature (1)..(169): Homolog of NCBI NO: 34896688 NR Description: putative L-asparaginase [Oryza sativa (japonica
MGWALALHGGAGDVPRTLPPESREPRLATLRRCLDIGTAALREGRTALDVVELVVRELEDCPHFNAGRGSVLTSAGTVEMEACVMEGATLHCGAVSGLSTVANAVSLARLVMEKTPHIYLAFDGAEAFAREQGVETKDPSHFITDNNIEREAGQRGQQGADRLHPASSRPKPKGPGRGGRQLPDGHGRVRGRGRGGQPRYGDVHGPGW

SEQ ID NO: 15808 - protein, 182 aa, Zea mays subsp. mays
  peptide (1)..(182): Ceres Seq. ID no. 12381110
  misc_feature (1)..(54): Pfam Name: Asparaginase Pfam Description: Asparaginase
  misc_feature (1)..(46): Homolog of NCBI NO: 18401029 NR Description: putative L-asparaginase
  misc_feature (1)..(54): Homolog of NCBI NO: 11066973 NR Description: asparaginase [Hordeum vulgare]
MPGRIGDTPLVGAGTYANALCAVSATGKGEEIIRRTVARDVAALMERGDALPAAATPRRASWRGRPAAPWGWWPCRARGRFVWRTTPPPCSGRAPPRPATPKSASGRTPPTQARARTERLSASRSSSRHFIPVWRILSFASHYCPLSDRQLVLDSVISPCFSCVCLEKLIRFRVLLRDRWEK

SEQ ID NO: 15809 - protein, 138 aa, Zea mays subsp. mays
  peptide (1)..(138): Ceres Seq. ID no. 12381111
  misc_feature (1)..(11): Homolog of NCBI NO: 21243819 NR Description: asparaginase [Xanthomonas axonopodis pv. citri
  misc_feature (1)..(11): Homolog of NCBI NO: 21232345 NR Description: asparaginase
  misc_feature (1)..(11): Homolog of NCBI NO: 18921183 NR Description: CG7860-PA [Drosophila melanogaster]
  misc_feature (1)..(12): Homolog of NCBI NO: 23335749 NR Description: hypothetical protein [Bifidobacterium longum
  misc_feature (1)..(11): Homolog of NCBI NO: 12839092 NR Description: unnamed protein product [Mus musculus]
  misc_feature (1)..(45): Homolog of NCBI NO: 33991572 NR Description: ASRGL1 protein [Homo sapiens]
  misc_feature (1)..(12): Homolog of NCBI NO: 21489983 NR Description: asparaginase-like sperm autoantigen [Rattus
  misc_feature (1)..(14): Homolog of NCBI NO: 33593386 NR Description: putative L-asparaginase [Bordetella pertussis]
  misc_feature (1)..(14): Homolog of NCBI NO: 33597787 NR Description: putative L-asparaginase [Bordetella
  misc_feature (1)..(14): Homolog of NCBI NO: 33602689 NR Description: putative L-asparaginase [Bordetella
MERGDALPAAATPRRASWRGRPAAPWGWWPCRARGRFVWRTTPPPCSGRAPPRPATPKSASGRTPPTQARARTERLSASRSSSRHFIPVWRILSFASHYCPLSDRQLVLDSVISPCFSCVCLEKLIRFRVLLRDRWEK

SEQ ID NO: 15810 - DNA, 1589 bp, Zea mays subsp. mays
  misc_feature (1)..(1589): Ceres Seq. ID no. 12383341
  misc_feature: MA Experiment ID: 108544 Result: Up-regulated in Transcription
  misc_feature: MA Experiment ID: 108559 Result: Down-regulated in Transcription
  misc_feature: MA Experiment 108559 PARAMETER Experiment Name: Zm_5mM_NO_P Parameter: Age (day) Value: 8
  misc_feature: MA Experiment 108559 PARAMETER Experiment Name: Zm_5mM_NO_P Parameter: Organism Value: Zea mays
  misc_feature: MA Experiment 108559 PARAMETER Experiment Name: Zm_5mM_NO_P Parameter: Plant Line Value: 35A19
  misc_feature: MA Experiment 108559 PARAMETER Experiment Name: Zm_5mM_NO_P Parameter: Timepoint (hr) Value: 12
  misc_feature: MA Experiment 108559 PARAMETER Experiment Name: Zm_5mM_NO_P Parameter: Tissue Value: Aerial
  misc_feature: MA Experiment 108559 PARAMETER Experiment Name: Zm_5mM_NO_P Parameter: Treatment Value: 5mM NO vs. No Treatment
  misc_feature: MA Experiment ID: 108687 Result: Up-regulated in Transcription
  misc_feature: MA Experiment 108687 PARAMETER Experiment Name: Zm_Embryos-Flowers__P Parameter: Tissue Value: Embryo vs. Aerial+
  misc_feature: MA Experiment ID: 108688 Result: Down-regulated in Transcription
  misc_feature: MA Experiment 108688 PARAMETER Experiment Name: Zm_Embryos-Flowers__P Parameter: Tissue Value: Immature Flowers vs. Aerial+
  misc_feature: MA Experiment ID: 20000108 Result: Down-regulated in Transcription
  misc_feature: MA Experiment 20000108 PARAMETER Experiment Name: Zm_Root-Tips_P Parameter: Age (day) Value: 12
  misc_feature: MA Experiment 20000108 PARAMETER Experiment Name: Zm_Root-Tips_P Parameter: Organism Value: Zea mays
  misc_feature: MA Experiment 20000108 PARAMETER Experiment Name: Zm_Root-Tips_P Parameter: Tissue Value: Root tips vs. Root mid region    35
  misc_feature: MA Experiment 20000108 PARAMETER Experiment Name: Zm_Root-Tips_P Parameter: Tissue Value: Root tips vs. Root mid region   Sequence Listing-Misc Features (4)
  misc_feature: MA Experiment ID: 20000535 Result: Up-regulated in Transcription
  misc_feature: MA Experiment 20000535 PARAMETER Experiment Name: Zm_Hybrid_Seed_Dev_P Parameter: DAP Value: 30 vs. 12
  misc_feature: MA Experiment 20000535 PARAMETER Experiment Name: Zm_Hybrid_Seed_Dev_P Parameter: Organism Value: Zea mays
  misc_feature: MA Experiment 20000535 PARAMETER Experiment Name: Zm_Hybrid_Seed_Dev_P Parameter: Plant Line Value: 35A19
  misc_feature: MA Experiment 20000535 PARAMETER Experiment Name: Zm_Hybrid_Seed_Dev_P Parameter: Tissue Value: Embryo vs. Unfert Floret
gcacgagaccattacctagaacatcctaatcgaaaaaccaaaccaacgcgcgcctatttcaagccacggaacctcctagcctacgcaggccgcagctcccacgtcccaacaacttgccaattcgcaccgcgggaccggcgccgtcttgttgctccgctccggccgtgacacgagcgcacccgccaccaccgccagcccctcctcccccgtcgactcgagccacaggacaaggcatcccaaccgccgcccatctcctatcgtcatctgccgatccctcctcggttcctcacagtcacagagcctcacgtcacgtgtacctcccccaacgcaacccagcccaacccagcccaaaacctagcgggcgaggggccggggaaccgaccgccggacgcggagatggaccacgcggcggaggcgcagcggacggacctgatgacgatcacgcggcacgtgctcaacgagcagagccgccacccggagtcccgcggcgacttcaccatcctcctctcccacatcgtcctcggctgcaagttcgtcgccgccgcggtcaacaaggccggcctcgccaagctcatcggcctcgccggagagaccaacgtccagggcgaggagcaaaagaagctggatgtcctgtccaacgaggtcttcgtgaaggcgctcgtcagcagcggccgcacctgtgtcctcgtgtctgaagagaacgaggaggccatcttcgtcgacccggccctccgcgggaagtactgcgtctgcttcgacccgctggatggctcctccaacatcgactgtggtgtctcaatcggaacgatctttgggatttacatggtcaaagacaaggacaacgtgaccttggaggatgtgctgcagcctggaacaaacatgcttgctgctggctactgcatgtacgggagttcctgcacgcttgtgctgagcactgggaacggagtcaatggcttcactctcgatccttcccttggagagttcattttgactcatccaaatatcaagataccaaagaaagggaagatctattcagtgaacgaagggaacgcaaaaaactgggatgggcctacagctaaattcgtggagaaatgcaagtatcctgaggatggttcaccgcctagatccttgagatatatcggaagtatggttgctgatgtccatcgcaccttactatacgggggcatatttttgtacccagcagaccagaagagtccaaacgggaaactacgcgttctgtatgaagtcttcccgatgtcattcctgatggaacaagctggaggccaggccttcacaggcaaacaacgggcccttgaacttgctcccgctaaacttcacgacagatccccagtgttcctcgggagctacgatgacgttgaggagatcaaagcactgtacgcttcaatgtcaaacagcggttgacctttctgcctgaggaaacgagcgagatcaaaagcaccgtacgcttcagagtcaactgcttgatctttatagattgtaataaaataataaaagagtttgtaaaaaaaacaacaacactgcttgatctttctgcatgaggataaaaagcgcatagtttccccggttgg

SEQ ID NO: 15811 - protein, 341 aa, Zea mays subsp. mays
  peptide (1)..(341): Ceres Seq. ID no. 12383342
  misc_feature (13)..(335): Pfam Name: Fructose-1-6-bisphosphatase Pfam Description: Fructose-1-6-bisphosphatase
  misc_feature (10)..(341): Homolog of NCBI NO: 6679761 NR Description: fructose bisphosphatase 2; FBPase muscle [Mus
  misc_feature (13)..(336): Homolog of NCBI NO: 5305145 NR Description: fructose-1,6-bisphosphatase [Pisum sativum]
  misc_feature (1)..(336): Homolog of NCBI NO: 1169586 NR Description: FRUCTOSE-1,6-BISPHOSPHATASE, CYTOSOLIC
  misc_feature (1)..(340): Homolog of NCBI NO: 20278691 NR Description: cytoplasmic fructose-1,6-bisphosphatase [Pisum
  misc_feature (1)..(336): Homolog of NCBI NO: 11139718 NR Description: cytosolic fructose-1,6-bisphosphatase [Beta
  misc_feature (1)..(340): Homolog of NCBI NO: 119748 NR Description: FRUCTOSE-1,6-BISPHOSPHATASE, CYTOSOLIC
  misc_feature (13)..(340): Homolog of NCBI NO: 2494417 NR Description: FRUCTOSE-1,6-BISPHOSPHATASE, CYTOSOLIC
  misc_feature (1)..(340): Homolog of NCBI NO: 4741918 NR Description: cytosolic fructose-1,6-bisphosphatase [Musa
  misc_feature (1)..(338): Homolog of NCBI NO: 3913640 NR Description: FRUCTOSE-1,6-BISPHOSPHATASE, CYTOSOLIC
  misc_feature (1)..(338): Homolog of NCBI NO: 6684169 NR Description: fructose-1,6-bisphosphatase [Porteresia coarctata]
MDHAAEAQRTDLMTITRHVLNEQSRHPESRGDFTILLSHIVLGCKFVAAAVNKAGLAKLIGLAGETNVQGEEQKKLDVLSNEVFVKALVSSGRTCVLVSEENEEAIFVDPALRGKYCVCFDPLDGSSNIDCGVSIGTIFGIYMVKDKDNVTLEDVLQPGTNMLAAGYCMYGSSCTLVLSTGNGVNGFTLDPSLGEFILTHPNIKIPKKGKIYSVNEGNAKNWDGPTAKFVEKCKYPEDGSPPRSLRYIGSMVADVHRTLLYGGIFLYPADQKSPNGKLRVLYEVFPMSFLMEQAGGQAFTGKQRALELAPAKLHDRSPVFLGSYDDVEEIKALYASMSNSG

SEQ ID NO: 15812 - protein, 329 aa, Zea mays subsp. mays
  peptide (1)..(329): Ceres Seq. ID no. 12383343
  misc_feature (1)..(323): Pfam Name: Fructose-1-6-bisphosphatase Pfam Description: Fructose-1-6-bisphosphatase
  misc_feature (1)..(328): Homolog of NCBI NO: 20278691 NR Description: cytoplasmic fructose-1,6-bisphosphatase [Pisum
  misc_feature (1)..(324): Homolog of NCBI NO: 11139718 NR Description: cytosolic fructose-1,6-bisphosphatase [Beta
  misc_feature (1)..(328): Homolog of NCBI NO: 119748 NR Description: FRUCTOSE-1,6-BISPHOSPHATASE, CYTOSOLIC
  misc_feature (1)..(328): Homolog of NCBI NO: 2494417 NR Description: FRUCTOSE-1,6-BISPHOSPHATASE, CYTOSOLIC
  misc_feature (1)..(324): Homolog of NCBI NO: 1169586 NR Description: FRUCTOSE-1,6-BISPHOSPHATASE, CYTOSOLIC
  misc_feature (1)..(329): Homolog of NCBI NO: 6679761 NR Description: fructose bisphosphatase 2; FBPase muscle [Mus
  misc_feature (1)..(324): Homolog of NCBI NO: 5305145 NR Description: fructose-1,6-bisphosphatase [Pisum sativum]
  misc_feature (1)..(328): Homolog of NCBI NO: 4741918 NR Description: cytosolic fructose-1,6-bisphosphatase [Musa
  misc_feature (1)..(326): Homolog of NCBI NO: 3913640 NR Description: FRUCTOSE-1,6-BISPHOSPHATASE, CYTOSOLIC
  misc_feature (1)..(326): Homolog of NCBI NO: 6684169 NR Description: fructose-1,6-bisphosphatase [Porteresia coarctata]
MTITRHVLNEQSRHPESRGDFTILLSHIVLGCKFVAAAVNKAGLAKLIGLAGETNVQGEEQKKLDVLSNEVFVKALVSSGRTCVLVSEENEEAIFVDPALRGKYCVCFDPLDGSSNIDCGVSIGTIFGIYMVKDKDNVTLEDVLQPGTNMLAAGYCMYGSSCTLVLSTGNGVNGFTLDPSLGEFILTHPNIKIPKKGKIYSVNEGNAKNWDGPTAKFVEKCKYPEDGSPPRSLRYIGSMVADVHRTLLYGGIFLYPADQKSPNGKLRVLYEVFPMSFLMEQAGGQAFTGKQRALELAPAKLHDRSPVFLGSYDDVEEIKALYASMSNSG

SEQ ID NO: 15813 - protein, 199 aa, Zea mays subsp. mays
  peptide (1)..(199): Ceres Seq. ID no. 12383344
  misc_feature (1)..(193): Pfam Name: Fructose-1-6-bisphosphatase Pfam Description: Fructose-1-6-bisphosphatase
  misc_feature (1)..(199): Homolog of NCBI NO: 6679761 NR Description: fructose bisphosphatase 2; FBPase muscle [Mus
  misc_feature (1)..(194): Homolog of NCBI NO: 5305145 NR Description: fructose-1,6-bisphosphatase [Pisum sativum]
  misc_feature (1)..(194): Homolog of NCBI NO: 1169586 NR Description: FRUCTOSE-1,6-BISPHOSPHATASE, CYTOSOLIC
  misc_feature (1)..(198): Homolog of NCBI NO: 20278691 NR Description: cytoplasmic fructose-1,6-bisphosphatase [Pisum
  misc_feature (1)..(194): Homolog of NCBI NO: 11139718 NR Description: cytosolic fructose-1,6-bisphosphatase [Beta
  misc_feature (1)..(198): Homolog of NCBI NO: 119748 NR Description: FRUCTOSE-1,6-BISPHOSPHATASE, CYTOSOLIC
  misc_feature (1)..(198): Homolog of NCBI NO: 2494417 NR Description: FRUCTOSE-1,6-BISPHOSPHATASE, CYTOSOLIC
  misc_feature (1)..(198): Homolog of NCBI NO: 4741918 NR Description: cytosolic fructose-1,6-bisphosphatase [Musa
  misc_feature (1)..(196): Homolog of NCBI NO: 3913640 NR Description: FRUCTOSE-1,6-BISPHOSPHATASE, CYTOSOLIC
  misc_feature (1)..(196): Homolog of NCBI NO: 6684169 NR Description: fructose-1,6-bisphosphatase [Porteresia coarctata]
MVKDKDNVTLEDVLQPGTNMLAAGYCMYGSSCTLVLSTGNGVNGFTLDPSLGEFILTHPNIKIPKKGKIYSVNEGNAKNWDGPTAKFVEKCKYPEDGSPPRSLRYIGSMVADVHRTLLYGGIFLYPADQKSPNGKLRVLYEVFPMSFLMEQAGGQAFTGKQRALELAPAKLHDRSPVFLGSYDDVEEIKALYASMSNSG

SEQ ID NO: 15814 - DNA, 1998 bp, Zea mays subsp. mays
  misc_feature (1)..(1998): Ceres Seq. ID no. 12406235
  misc_feature: MA Experiment ID: 108528 Result: Up-regulated in Transcription
  misc_feature: MA Experiment 108528 PARAMETER Experiment Name: Zm_Imbibed_Seeds_P Parameter: Age (day) Value: 5 vs. 2
  misc_feature: MA Experiment 108528 PARAMETER Experiment Name: Zm_Imbibed_Seeds_P Parameter: Organism Value: Zea mays
  misc_feature: MA Experiment 108528 PARAMETER Experiment Name: Zm_Imbibed_Seeds_P Parameter: Plant Line Value: 35A19
  misc_feature: MA Experiment 108528 PARAMETER Experiment Name: Zm_Imbibed_Seeds_P Parameter: Tissue Value: Aerial vs. Embryo
  misc_feature: MA Experiment ID: 108530 Result: Up-regulated in Transcription
  misc_feature: MA Experiment 108530 PARAMETER Experiment Name: Zm_Imbibed_Seeds_P Parameter: Age (day) Value: 6 vs. 2
  misc_feature: MA Experiment 108530 PARAMETER Experiment Name: Zm_Imbibed_Seeds_P Parameter: Organism Value: Zea mays
  misc_feature: MA Experiment 108530 PARAMETER Experiment Name: Zm_Imbibed_Seeds_P Parameter: Plant Line Value: 35A19
  misc_feature: MA Experiment 108530 PARAMETER Experiment Name: Zm_Imbibed_Seeds_P Parameter: Tissue Value: Aerial vs. Embryo
  misc_feature: MA Experiment ID: 20000477 Result: Down-regulated in Transcription
  misc_feature: MA Experiment 20000477 PARAMETER Experiment Name: Zm_5mM_SA_P Parameter: Age (day) Value: 10
  misc_feature: MA Experiment 20000477 PARAMETER Experiment Name: Zm_5mM_SA_P Parameter: Organism Value: Zea mays
  misc_feature: MA Experiment 20000477 PARAMETER Experiment Name: Zm_5mM_SA_P Parameter: Plant Line Value: 35A19
  misc_feature: MA Experiment 20000477 PARAMETER Experiment Name: Zm_5mM_SA_P Parameter: Timepoint (hr) Value: 48
  misc_feature: MA Experiment 20000477 PARAMETER Experiment Name: Zm_5mM_SA_P Parameter: Tissue Value: Aerial
  misc_feature: MA Experiment 20000477 PARAMETER Experiment Name: Zm_5mM_SA_P Parameter: Treatment Value: 5mM SA vs. No Treatment
  misc_feature: MA Experiment ID: 20000480 Result: Down-regulated in Transcription
  misc_feature: MA Experiment 20000480 PARAMETER Experiment Name: Zm_Drought_P Parameter: Age (day) Value: 11
  misc_feature: MA Experiment 20000480 PARAMETER Experiment Name: Zm_Drought_P Parameter: Organism Value: Zea mays
  misc_feature: MA Experiment 20000480 PARAMETER Experiment Name: Zm_Drought_P Parameter: Plant Line Value: 35A19
  misc_feature: MA Experiment 20000480 PARAMETER Experiment Name: Zm_Drought_P Parameter: Timepoint (hr) Value: 72
  misc_feature: MA Experiment 20000480 PARAMETER Experiment Name: Zm_Drought_P Parameter: Tissue Value: Aerial
  misc_feature: MA Experiment 20000480 PARAMETER Experiment Name: Zm_Drought_P Parameter: Treatment Value: Drought vs. No Drought
  misc_feature: MA Experiment ID: 20000492 Result: Down-regulated in Transcription
  misc_feature: MA Experiment 20000492 PARAMETER Experiment Name: Zm_Hybrid_Seed_Dev_P Parameter: DAP Value: 12
  misc_feature: MA Experiment 20000492 PARAMETER Experiment Name: Zm_Hybrid_Seed_Dev_P Parameter: Organism Value: Zea mays
  misc_feature: MA Experiment 20000492 PARAMETER Experiment Name: Zm_Hybrid_Seed_Dev_P Parameter: Plant Line Value: 35A19
  misc_feature: MA Experiment 20000492 PARAMETER Experiment Name: Zm_Hybrid_Seed_Dev_P Parameter: Tissue Value: Fert Kernel vs. Unfert Floret
aagatctttcccaaaattccagtggaatccgcacagcggagcgctgcctgagtccgtccccgttgcttgggtgcctgtgccggacgcccgcagtcccaccatcccaactctcaaccccagcgcagcagcctgcaccacaccagaaaccacaccaccacgctcaccgccgtgagcccgtgacccccacgtccccccacaccacggcacgtcggcaccagcttaactcccggtccgcggcgacacctcaccatcgcgcgcgcacacacacgagcgtgcgccgctccctgttcctcgtgacccccctccccgcctcccctctctctctctcacacacacacacaagtcggtgctgcagcagcagcagtcgcagtccagccgtgagctcttgccgtgcgagcgattcaccgcagggcgcacgggaatccaatcaaatcccccaggaaggtagccccgcggccgcccgttcctcgctccgccccgcgccgacgcctctccccgatcccgatctgtgcgcccgcaccctgcgtgggatggaggcggcgccgcggcggcagcagcaggaggaggaggggtgcccgtgcggcgggcccgaggccgcggaccacttcgagcggctccacgacgcggtgctgctcgacgtcctcaaccgcatcggcgacgtcaaggcgctcggccgctgcgccctcgtctcgcgccgcttccacgcgctcgtgccgctcgtcgactccgtcttcgtccgcgtcgactgcgtcatccccgacgacccaccctcttcctcctccgcgggcgccgcaccgggctccccgccgcaccaggcgccggcgccaaccgcgtgcgggcgcggcgcgctcgcgcgcgtcgcgcgcgccctgctcggcggcgtcgctaggcccatccacgcgctcggccagatcctctcctccgccgcggcgaccgtctcccggcgctccgagccactgcccgcttccccgccgcccgcgcccgtcgcggacgtctcccaccactcgccctccgaggtgctccgctccttcagggagctgcggcgccttcacatcgagctgcccacgggcgagctcggcattgacgacggcgtgctccttaagtggaaggccgacttcggctccaccctcggcagctgcgtcatcctcggcgcctcgtcggtctcgtccaagccgccggcagggtccgctcaggcggaaactgctgcggccgacagcacgcccgccgctcccgataccggtagggagactgaagagccgggaagccctgcctgattctctctacacaaatggagggctcaagctccgcgttgtctggaccatcagctccctgattgccgcgtcggcgaggcattacttgctgcacccgattatctgtaatcacggaacgcttgagagcttggacctgacagatgccgacgggcaaggggtgctcaccatggacaagaggcagctgcaggaactgcgggtgcggcccgtctctccatcagggagctcgcaccgcacactcatgccggcactcagtatgcgtctgcactacgcaccactcattgaactgcctgggggaacgctgctgaaaggtgcaacactagtggcgatcagaccaagcgaggatgccttgagggagggccaaggggttgcaggtcctgctggtacatgctggatttcagaggcctttgaggagccatatcggactgcggcaaaggtgctcctcaagagaagggcatattgccttgaaatgaactcgttctgagcaccagggattcacttccacagagttctacccatctgacaggatgggggaagtgagatgcccttcggttaatatatgggaattcatcattcagtgcaaaaattggaccaactctccccatcattaatttatctgatctcggtgaagagatgacttcgtgtacctgtacctttagggttgtaattacagatacgtatttgtgctggactactacacgcggaacggaatgctatttggccgattccg

SEQ ID NO: 15815 - protein, 423 aa, Zea mays subsp. mays
  peptide (1)..(423): Ceres Seq. ID no. 12406236
  misc_feature (202)..(248): Pfam Name: F-box domain Pfam Description: F-box domain
  misc_feature (200)..(251): Homolog of NCBI NO: 18411823 NR Description: expressed protein
  misc_feature (332)..(402): Homolog of NCBI NO: 18411823 NR Description: expressed protein
  misc_feature (200)..(259): Homolog of NCBI NO: 15219845 NR Description: hypothetical protein; protein id: At1g22220.1
  misc_feature (325)..(399): Homolog of NCBI NO: 15219845 NR Description: hypothetical protein; protein id: At1g22220.1
  misc_feature (196)..(268): Homolog of NCBI NO: 34909194 NR Description: P0425G02.20 [Oryza sativa (japonica
  misc_feature (327)..(405): Homolog of NCBI NO: 34909194 NR Description: P0425G02.20 [Oryza sativa (japonica
  misc_feature (194)..(421): Homolog of NCBI NO: 34909910 NR Description: P0665A11.15 [Oryza sativa (japonica
  misc_feature (200)..(387): Homolog of NCBI NO: 18397400 NR Description: expressed protein
  misc_feature (196)..(413): Homolog of NCBI NO: 15236865 NR Description: hypothetical protein; protein id: At4g18380.1
  misc_feature (200)..(421): Homolog of NCBI NO: 15237391 NR Description: putative protein
DLSQNSSGIRTAERCLSPSPLLGCLCRTPAVPPSQLSTPAQQPAPHQKPHHHAHRREPVTPTSPHTTARRHQLNSRSAATPHHRARTHTSVRRSLFLVTPLPASPLSLSHTHTSRCCSSSSRSPAVSSCRASDSPQGARESNQIPQEGSPAAARSSLRPAPTPLPDPDLCARTLRGMEAAPRRQQQEEEGCPCGGPEAADHFERLHDAVLLDVLNRIGDVKALGRCALVSRRFHALVPLVDSVFVRVDCVIPDDPPSSSSAGAAPGSPPHQAPAPTACGRGALARVARALLGGVARPIHALGQILSSAAATVSRRSEPLPASPPPAPVADVSHHSPSEVLRSFRELRRLHIELPTGELGIDDGVLLKWKADFGSTLGSCVILGASSVSSKPPAGSAQAETAAADSTPAAPDTGRETEEPGSPA

SEQ ID NO: 15816 - protein, 247 aa, Zea mays subsp. mays
  peptide (1)..(247): Ceres Seq. ID no. 12406237
  misc_feature (26)..(72): Pfam Name: F-box domain Pfam Description: F-box domain
  misc_feature (24)..(75): Homolog of NCBI NO: 18411823 NR Description: expressed protein
  misc_feature (156)..(226): Homolog of NCBI NO: 18411823 NR Description: expressed protein
  misc_feature (24)..(83): Homolog of NCBI NO: 15219845 NR Description: hypothetical protein; protein id: At1g22220.1
  misc_feature (149)..(223): Homolog of NCBI NO: 15219845 NR Description: hypothetical protein; protein id: At1g22220.1
  misc_feature (20)..(92): Homolog of NCBI NO: 34909194 NR Description: P0425G02.20 [Oryza sativa (japonica
  misc_feature (151)..(229): Homolog of NCBI NO: 34909194 NR Description: P0425G02.20 [Oryza sativa (japonica
  misc_feature (18)..(245): Homolog of NCBI NO: 34909910 NR Description: P0665A11.15 [Oryza sativa (japonica
  misc_feature (24)..(211): Homolog of NCBI NO: 18397400 NR Description: expressed protein
  misc_feature (20)..(237): Homolog of NCBI NO: 15236865 NR Description: hypothetical protein; protein id: At4g18380.1
  misc_feature (24)..(245): Homolog of NCBI NO: 15237391 NR Description: putative protein
MEAAPRRQQQEEEGCPCGGPEAADHFERLHDAVLLDVLNRIGDVKALGRCALVSRRFHALVPLVDSVFVRVDCVIPDDPPSSSSAGAAPGSPPHQAPAPTACGRGALARVARALLGGVARPIHALGQILSSAAATVSRRSEPLPASPPPAPVADVSHHSPSEVLRSFRELRRLHIELPTGELGIDDGVLLKWKADFGSTLGSCVILGASSVSSKPPAGSAQAETAAADSTPAAPDTGRETEEPGSPA

SEQ ID NO: 15817 - DNA, 1742 bp, Zea mays subsp. mays
  misc_feature (1)..(1742): Ceres Seq. ID no. 13498411
  misc_feature: MA Experiment ID: 108689 Result: Up-regulated in Transcription
  misc_feature: MA Experiment 108689 PARAMETER Experiment Name: Zm_Drought_Roots_P Parameter: Age (day) Value: 9
  misc_feature: MA Experiment 108689 PARAMETER Experiment Name: Zm_Drought_Roots_P Parameter: Organism Value: Zea mays
  misc_feature: MA Experiment 108689 PARAMETER Experiment Name: Zm_Drought_Roots_P Parameter: Plant Line Value: 35A19
  misc_feature: MA Experiment 108689 PARAMETER Experiment Name: Zm_Drought_Roots_P Parameter: Timepoint (hr) Value: 24
  misc_feature: MA Experiment 108689 PARAMETER Experiment Name: Zm_Drought_Roots_P Parameter: Tissue Value: Roots
  misc_feature: MA Experiment 108689 PARAMETER Experiment Name: Zm_Drought_Roots_P Parameter: Treatment Value: Drought vs. No Drought
  misc_feature: MA Experiment ID: 20000478 Result: Up-regulated in Transcription
  misc_feature: MA Experiment 20000478 PARAMETER Experiment Name: Zm_5mM_SA_P Parameter: Age (day) Value: 11
  misc_feature: MA Experiment 20000478 PARAMETER Experiment Name: Zm_5mM_SA_P Parameter: Organism Value: Zea mays
  misc_feature: MA Experiment 20000478 PARAMETER Experiment Name: Zm_5mM_SA_P Parameter: Plant Line Value: 35A19
  misc_feature: MA Experiment 20000478 PARAMETER Experiment Name: Zm_5mM_SA_P Parameter: Timepoint (hr) Value: 72
  misc_feature: MA Experiment 20000478 PARAMETER Experiment Name: Zm_5mM_SA_P Parameter: Tissue Value: Aerial
  misc_feature: MA Experiment 20000478 PARAMETER Experiment Name: Zm_5mM_SA_P Parameter: Treatment Value: 5mM SA vs. No Treatment
  misc_feature: MA Experiment ID: 20000480 Result: Up-regulated in Transcription
  misc_feature: MA Experiment 20000480 PARAMETER Experiment Name: Zm_Drought_P Parameter: Age (day) Value: 11
  misc_feature: MA Experiment 20000480 PARAMETER Experiment Name: Zm_Drought_P Parameter: Organism Value: Zea mays
  misc_feature: MA Experiment 20000480 PARAMETER Experiment Name: Zm_Drought_P Parameter: Plant Line Value: 35A19
  misc_feature: MA Experiment 20000480 PARAMETER Experiment Name: Zm_Drought_P Parameter: Timepoint (hr) Value: 72
  misc_feature: MA Experiment 20000480 PARAMETER Experiment Name: Zm_Drought_P Parameter: Tissue Value: Aerial
  misc_feature: MA Experiment 20000480 PARAMETER Experiment Name: Zm_Drought_P Parameter: Treatment Value: Drought vs. No Drought
aaaaaagcgtcgcggagccacgaccgacgacccctattttggcacgcccgtcccccgcttatacgccgcgccggcgaggtcgctgctccgaatcaccttcccttcctattccctctctctctctctctctnnntctctctctctactctntctctctctctcccgcccgctccnnggcctcctcctctacccgccccacaaaccaaggccctccgctgtctgcacggcgacggcggtgcatgggcggcgggcgcgccgggacgacgacgacgacgaccgcgccgccatgaccaccaccaccacggccgcggccgcggtcgcgcagctctgcgccgggccacggcggcgcaagcaggcagcaggggctcggctcgacctgcgctgggcgcgcctgctccgcctcgccgtcgtcaccagggtgctccgcctcgcgcgcgaccagctgctcgcctgctcctcctgcgggggcggcaccgccgcccgccgccggtaccgccgcctcggcccgcccaccagcgccagcgccggtcccgtgctgtcacccgtcgacagggacgacgactgcgccgcggacgccgaggccgcggcccctcgcgacgcggccgacgacgaagacaacgttgtcagcctcaaggtcagcctgctcggcgactgccagattggcaagaccagcttcatggttaagtatgtgggagatgacggggaggagcagaacggcttgcagatgacgggcctgaatctcatggacaagacgatgcccgtcaggggagcaaggattgcctacagcatctgggatgtggcaggagaccaccagtccgtcgaccacgtcccaatcgcgtgcaaggacgccgtggcgatcctgtacatgttcgatctcacgagccgctgcacgcttaataacattgtagattggtacgggagggcgaggaaatggaataagacggctattccaatcctaatcgggacaaagtttgatgactttgctcagcttcctcttgagatgcaatgggccatcgttaaccaggccagagcatacgcaagagcgatgaaggcgaccctcttcttctcgagcgcgacgcacaacatcaacgtgaacaagatcttcaagttcatcacggccaagctcttcaacctcccgtggacggtggagcgcaacctcaccatcggcgagcccatcatagacttctgacgaccccttcctctaactagtaactcggcagcacacgcacgacgacccttggtatatatcatgggttgacagggtcgtgtctttcgatcctcttgccctgtgcgagccgccggagccatgaagtgaccgagcatgcccgtcgtcctcttcctcctggtggccggctgcagcaggcaagatgccctttgtaaatatagccataggtgacggtcccgcgtgcgtgcggccgtgcgggagcgtcgtcaaatgggaagaaaaccgcgaggtgtgactgtgatgtaacaccccgtctgtaacattcgccagagtatataggaaatccatgttaatataccctccattccaactgacaaaggcatgcgctggcgcctgncggcttnctnccggtgcagaacctcttctttctgctcacccnacgnagctgcgtgcttgcatgcgtcttgaggcgtgcaagcagttcaggttcctccgttcctgtagttggttatttgtacatctgtgagttatttgcacgacgagtcaatttatgctaccccgtcacaactcncaagct

SEQ ID NO: 15818 - protein, 395 aa, Zea mays subsp. mays
  peptide (1)..(395): Ceres Seq. ID no. 13498412
  misc_feature (210)..(395): Homolog of NCBI NO: 29250300 NR Description: GLP_111_18072_18662 [Giardia lamblia ATCC 50803]
  misc_feature (210)..(395): Homolog of NCBI NO: 28396142 NR Description: Tem-1-like protein [Giardia intestinalis]
  misc_feature (133)..(341): Homolog of NCBI NO: 30686347 NR Description: SGP1 monomeric G-protein -related [Arabidopsis
  misc_feature (202)..(393): Homolog of NCBI NO: 38105787 NR Description: hypothetical protein MG04862.4 [Magnaporthe
  misc_feature (201)..(395): Homolog of NCBI NO: 19114197 NR Description: sid3 protein; gtpase; inducer of septum formation
  misc_feature (201)..(395): Homolog of NCBI NO: 2408103 NR Description: sid3 [Schizosaccharomyces pombe]
  misc_feature (133)..(395): Homolog of NCBI NO: 18403119 NR Description: SGP1 monomeric G-protein -related [Arabidopsis
  misc_feature (133)..(395): Homolog of NCBI NO: 30686351 NR Description: SGP1 monomeric G-protein -related [Arabidopsis
  misc_feature (127)..(395): Homolog of NCBI NO: 15239761 NR Description: SGP1 monomeric G-protein (emb|CAB54517.1)
  misc_feature (105)..(395): Homolog of NCBI NO: 33146727 NR Description: putative Septum-promoting GTP-binding protein 1
  misc_feature (44)..(44): Xaa is any aa, unknown or other
  misc_feature (50)..(50): Xaa is any aa, unknown or other
  misc_feature (58)..(58): Xaa is any aa, unknown or other
KKRRGATTDDPYFGTPVPRLYAAPARSLLRITFPSYSLSLSLSXSLSLLXLSLSRPLXGLLLYPPHKPRPSAVCTATAVHGRRARRDDDDDDRAAMTTTTTAAAAVAQLCAGPRRRKQAAGARLDLRWARLLRLAVVTRVLRLARDQLLACSSCGGGTAARRRYRRLGPPTSASAGPVLSPVDRDDDCAADAEAAAPRDAADDEDNVVSLKVSLLGDCQIGKTSFMVKYVGDDGEEQNGLQMTGLNLMDKTMPVRGARIAYSIWDVAGDHQSVDHVPIACKDAVAILYMFDLTSRCTLNNIVDWYGRARKWNKTAIPILIGTKFDDFAQLPLEMQWAIVNQARAYARAMKATLFFSSATHNINVNKIFKFITAKLFNLPWTVERNLTIGEPIIDF

SEQ ID NO: 15819 - protein, 300 aa, Zea mays subsp. mays
  peptide (1)..(300): Ceres Seq. ID no. 13498413
  misc_feature (115)..(300): Homolog of NCBI NO: 29250300 NR Description: GLP_111_18072_18662 [Giardia lamblia ATCC 50803]
  misc_feature (115)..(300): Homolog of NCBI NO: 28396142 NR Description: Tem-1-like protein [Giardia intestinalis]
  misc_feature (38)..(246): Homolog of NCBI NO: 30686347 NR Description: SGP1 monomeric G-protein -related [Arabidopsis
  misc_feature (107)..(298): Homolog of NCBI NO: 38105787 NR Description: hypothetical protein MG04862.4 [Magnaporthe
  misc_feature (106)..(300): Homolog of NCBI NO: 19114197 NR Description: sid3 protein; gtpase; inducer of septum formation
  misc_feature (106)..(300): Homolog of NCBI NO: 2408103 NR Description: sid3 [Schizosaccharomyces pombe]
  misc_feature (38)..(300): Homolog of NCBI NO: 18403119 NR Description: SGP1 monomeric G-protein -related [Arabidopsis
  misc_feature (38)..(300): Homolog of NCBI NO: 30686351 NR Description: SGP1 monomeric G-protein -related [Arabidopsis
  misc_feature (32)..(300): Homolog of NCBI NO: 15239761 NR Description: SGP1 monomeric G-protein (emb|CAB54517.1)
  misc_feature (10)..(300): Homolog of NCBI NO: 33146727 NR Description: putative Septum-promoting GTP-binding protein 1
MTTTTTAAAAVAQLCAGPRRRKQAAGARLDLRWARLLRLAVVTRVLRLARDQLLACSSCGGGTAARRRYRRLGPPTSASAGPVLSPVDRDDDCAADAEAAAPRDAADDEDNVVSLKVSLLGDCQIGKTSFMVKYVGDDGEEQNGLQMTGLNLMDKTMPVRGARIAYSIWDVAGDHQSVDHVPIACKDAVAILYMFDLTSRCTLNNIVDWYGRARKWNKTAIPILIGTKFDDFAQLPLEMQWAIVNQARAYARAMKATLFFSSATHNINVNKIFKFITAKLFNLPWTVERNLTIGEPIIDF

SEQ ID NO: 15820 - protein, 227 aa, Zea mays subsp. mays
  peptide (1)..(227): Ceres Seq. ID no. 13498414
  misc_feature (55)..(206): Homolog of NCBI NO: 73648 NR Description: immediate-early protein IE180 - suid herpesvirus
  misc_feature (72)..(227): Homolog of NCBI NO: 22956890 NR Description: hypothetical protein [Rhodobacter sphaeroides]
  misc_feature (86)..(227): Homolog of NCBI NO: 19923466 NR Description: splicing coactivator subunit SRm300
  misc_feature (44)..(44): Xaa is any aa, unknown or other
  misc_feature (45)..(45): Xaa is any aa, unknown or other
  misc_feature (50)..(50): Xaa is any aa, unknown or other
  misc_feature (58)..(58): Xaa is any aa, unknown or other
  misc_feature (59)..(59): Xaa is any aa, unknown or other
KKASRSHDRRPLFWHARPPLIRRAGEVAAPNHLPFLFPLSLSLXXSLSTXSLSLPPAXXPPPLPAPQTKALRCLHGDGGAWAAGAPGRRRRRPRRHDHHHHGRGRGRAALRRATAAQAGSRGSARPALGAPAPPRRRHQGAPPRARPAARLLLLRGRHRRPPPVPPPRPAHQRQRRSRAVTRRQGRRLRRGRRGRGPSRRGRRRRQRCQPQGQPARRLPDWQDQLHG

SEQ ID NO: 15821 - DNA, 1789 bp, Zea mays subsp. mays
  misc_feature (1)..(1789): Ceres Seq. ID no. 12364617
  misc_feature: MA Experiment ID: 20000477 Result: Down-regulated in Transcription
  misc_feature: MA Experiment 20000477 PARAMETER Experiment Name: Zm_5mM_SA_P Parameter: Age (day) Value: 10
  misc_feature: MA Experiment 20000477 PARAMETER Experiment Name: Zm_5mM_SA_P Parameter: Organism Value: Zea mays
  misc_feature: MA Experiment 20000477 PARAMETER Experiment Name: Zm_5mM_SA_P Parameter: Plant Line Value: 35A19
  misc_feature: MA Experiment 20000477 PARAMETER Experiment Name: Zm_5mM_SA_P Parameter: Timepoint (hr) Value: 48
  misc_feature: MA Experiment 20000477 PARAMETER Experiment Name: Zm_5mM_SA_P Parameter: Tissue Value: Aerial
  misc_feature: MA Experiment 20000477 PARAMETER Experiment Name: Zm_5mM_SA_P Parameter: Treatment Value: 5mM SA vs. No Treatment
  misc_feature: MA Experiment ID: 20000478 Result: Down-regulated in Transcription
  misc_feature: MA Experiment 20000478 PARAMETER Experiment Name: Zm_5mM_SA_P Parameter: Age (day) Value: 11
  misc_feature: MA Experiment 20000478 PARAMETER Experiment Name: Zm_5mM_SA_P Parameter: Organism Value: Zea mays
  misc_feature: MA Experiment 20000478 PARAMETER Experiment Name: Zm_5mM_SA_P Parameter: Plant Line Value: 35A19
  misc_feature: MA Experiment 20000478 PARAMETER Experiment Name: Zm_5mM_SA_P Parameter: Timepoint (hr) Value: 72
  misc_feature: MA Experiment 20000478 PARAMETER Experiment Name: Zm_5mM_SA_P Parameter: Tissue Value: Aerial
  misc_feature: MA Experiment 20000478 PARAMETER Experiment Name: Zm_5mM_SA_P Parameter: Treatment Value: 5mM SA vs. No Treatment
gcacgagaccattacctagaacatcctaatcgaaaatcgccacccaaaagccaccgcgatcccgtgcttccttctcgcacctgcggatctactctccgcacctgcggatctaccccccggcgaaacaagcgccccgacgcctcagggaatgcggagcgatgaggcggcgctcaggcactgacgtcgccggtcagcgcgagctgcgcggcgaccgaacctgccatcgcaagcacgtcgaggacgggtagactcgtccatccttccttcctcctgttagtcgtcgtagggtagtttgcactttgcagatagctagctagtagttaggggatcaggcatgggtgagggcgaggcggaggtgaagggcggggtgctgcagggccgctacgagctcggccgcgtgctgggtcacggcaacttcgggcgcgtccacgcggcgcgggacctgcgcaccgggcgggccgtggcggtgaaggtgctcgacaaggacaagatgctgcgcacgggcatgatggagcagatcaagcgcgagatcgccgtcatgaagcgcgtgtcccaccccaacatcgtggagctccacgaggtgatggccacgcgctccaagatctacctcgcgctggagctcgtccgcggaggggagctcttcgcgcggatcgtgcgcgccgggcgcgtcaaggaggacgtggcgcggcgctacttccggcagctcatacacgccgtggacttctgccacgcgcggggcgtgtaccaccgcgacctgaagctcgagaacctcctcctggacgacgcggggaacctcaaggtcgtcgactttggcctcagcgcgctggccgaccacgcgcgcagcgacgggctgctgcacacgctctgcggcacgcccgggtacgtcgcgccggaggtgttccggaacaagggctacgacggcgccaaggctgacatctggtcgtgcggcgtcatcctctacgtcctcctcgcagggtcgctgccgttcccggacgacaacgttgccgccatgttccggaagatgagccgcggcgactaccggtgcccgccgtggctgtccacggaggcgcgcaggctcatccccaagctgctcgaccccgaccccgacacccgcatcaccatcgcccagctcgtcgagacgccgtggttcaacaagccgtccgtctcgaggtccgtcagagccgccgccggcgcaaccgagccgccggccgagcctgcctcctccgcaaaggacggcggcgacaaggacgagccaccggagacgatgaacgcgttccacctgatctccctctccgcggggttcgacctctcaccgctgttcgacgtggaaggcggtccggcgagggggccccgggagggcggcatgcggttcgcgacgcgggagcccgcgagcggcgtcgtctcccgtctcgaggaggtggccgcccgcggcggcgggcggatgcgggtgaccaagagcggcgcccgcggcgttcggctcgagggcgcggagcgcgggggccgcaagggccggctagccgtggcggccgacatcttctgcgtggcgccgtcggtgctcgtcgtcgacgtgaagaaggacggcggcgactccctcgagtaccgctccttctgcagcgaggagctccggccggcgctcaaagacatcgtctgggcggccgacccccagcccgccgtcgtgtgacgcccgtgctgccgcctgcccgctcattgtttctggatcgtagtggtgccatagtttagtcagtgtcagttccatttccaaagtgattgcgtcactgttctcgattcg

SEQ ID NO: 15822 - protein, 448 aa, Zea mays subsp. mays
  peptide (1)..(448): Ceres Seq. ID no. 12364618
  misc_feature (17)..(272): Pfam Name: Protein kinase domain Pfam Description: Protein kinase domain
  misc_feature (11)..(443): Homolog of NCBI NO: 15235768 NR Description: (NM_119244) putative protein kinase
MGEGEAEVKGGVLQGRYELGRVLGHGNFGRVHAARDLRTGRAVAVKVLDKDKMLRTGMMEQIKREIAVMKRVSHPNIVELHEVMATRSKIYLALELVRGGELFARIVRAGRVKEDVARRYFRQLIHAVDFCHARGVYHRDLKLENLLLDDAGNLKVVDFGLSALADHARSDGLLHTLCGTPGYVAPEVFRNKGYDGAKADIWSCGVILYVLLAGSLPFPDDNVAAMFRKMSRGDYRCPPWLSTEARRLIPKLLDPDPDTRITIAQLVETPWFNKPSVSRSVRAAAGATEPPAEPASSAKDGGDKDEPPETMNAFHLISLSAGFDLSPLFDVEGGPARGPREGGMRFATREPASGVVSRLEEVAARGGGRMRVTKSGARGVRLEGAERGGRKGRLAVAADIFCVAPSVLVVDVKKDGGDSLEYRSFCSEELRPALKDIVWAADPQPAVV

SEQ ID NO: 15823 - protein, 396 aa, Zea mays subsp. mays
  peptide (1)..(396): Ceres Seq. ID no. 12364619
  misc_feature (1)..(220): Pfam Name: Protein kinase domain Pfam Description: Protein kinase domain
  misc_feature (1)..(391): Homolog of NCBI NO: 15235768 NR Description: (NM_119244) putative protein kinase
MLRTGMMEQIKREIAVMKRVSHPNIVELHEVMATRSKIYLALELVRGGELFARIVRAGRVKEDVARRYFRQLIHAVDFCHARGVYHRDLKLENLLLDDAGNLKVVDFGLSALADHARSDGLLHTLCGTPGYVAPEVFRNKGYDGAKADIWSCGVILYVLLAGSLPFPDDNVAAMFRKMSRGDYRCPPWLSTEARRLIPKLLDPDPDTRITIAQLVETPWFNKPSVSRSVRAAAGATEPPAEPASSAKDGGDKDEPPETMNAFHLISLSAGFDLSPLFDVEGGPARGPREGGMRFATREPASGVVSRLEEVAARGGGRMRVTKSGARGVRLEGAERGGRKGRLAVAADIFCVAPSVLVVDVKKDGGDSLEYRSFCSEELRPALKDIVWAADPQPAVV

SEQ ID NO: 15824 - protein, 391 aa, Zea mays subsp. mays
  peptide (1)..(391): Ceres Seq. ID no. 12364620
  misc_feature (1)..(215): Pfam Name: Protein kinase domain Pfam Description: Protein kinase domain
  misc_feature (1)..(386): Homolog of NCBI NO: 15235768 NR Description: (NM_119244) putative protein kinase
MMEQIKREIAVMKRVSHPNIVELHEVMATRSKIYLALELVRGGELFARIVRAGRVKEDVARRYFRQLIHAVDFCHARGVYHRDLKLENLLLDDAGNLKVVDFGLSALADHARSDGLLHTLCGTPGYVAPEVFRNKGYDGAKADIWSCGVILYVLLAGSLPFPDDNVAAMFRKMSRGDYRCPPWLSTEARRLIPKLLDPDPDTRITIAQLVETPWFNKPSVSRSVRAAAGATEPPAEPASSAKDGGDKDEPPETMNAFHLISLSAGFDLSPLFDVEGGPARGPREGGMRFATREPASGVVSRLEEVAARGGGRMRVTKSGARGVRLEGAERGGRKGRLAVAADIFCVAPSVLVVDVKKDGGDSLEYRSFCSEELRPALKDIVWAADPQPAVV

SEQ ID NO: 15825 - DNA, 1201 bp, Zea mays subsp. mays
  misc_feature (1)..(1201): Ceres Seq. ID no. 12407124
  misc_feature: MA Experiment ID: 108522 Result: Down-regulated in Transcription
  misc_feature: MA Experiment 108522 PARAMETER Experiment Name: Zm_42deg_Heat_P Parameter: Age (day) Value: 8
  misc_feature: MA Experiment 108522 PARAMETER Experiment Name: Zm_42deg_Heat_P Parameter: Organism Value: Zea mays
  misc_feature: MA Experiment 108522 PARAMETER Experiment Name: Zm_42deg_Heat_P Parameter: Plant Line Value: 35A19
  misc_feature: MA Experiment 108522 PARAMETER Experiment Name: Zm_42deg_Heat_P Parameter: Temperature (deg C) Value: 42 vs. 22
  misc_feature: MA Experiment 108522 PARAMETER Experiment Name: Zm_42deg_Heat_P Parameter: Timepoint (hr) Value: 1
  misc_feature: MA Experiment 108522 PARAMETER Experiment Name: Zm_42deg_Heat_P Parameter: Tissue Value: Aerial
  misc_feature: MA Experiment ID: 108534 Result: Up-regulated in Transcription
  misc_feature: MA Experiment 108534 PARAMETER Experiment Name: Zm_4deg_Cold_P Parameter: Age (hr) Value: 8
  misc_feature: MA Experiment 108534 PARAMETER Experiment Name: Zm_4deg_Cold_P Parameter: Organism Value: Zea mays
  misc_feature: MA Experiment 108534 PARAMETER Experiment Name: Zm_4deg_Cold_P Parameter: Plant Line Value: 35A19
  misc_feature: MA Experiment 108534 PARAMETER Experiment Name: Zm_4deg_Cold_P Parameter: Temperature (deg C) Value: 4 vs. 22
  misc_feature: MA Experiment 108534 PARAMETER Experiment Name: Zm_4deg_Cold_P Parameter: Timepoint (hr) Value: 6
  misc_feature: MA Experiment 108534 PARAMETER Experiment Name: Zm_4deg_Cold_P Parameter: Tissue Value: Aerial
  misc_feature: MA Experiment ID: 108559 Result: Down-regulated in Transcription
  misc_feature: MA Experiment 108559 PARAMETER Experiment Name: Zm_5mM_NO_P Parameter: Age (day) Value: 8
  misc_feature: MA Experiment 108559 PARAMETER Experiment Name: Zm_5mM_NO_P Parameter: Organism Value: Zea mays
  misc_feature: MA Experiment 108559 PARAMETER Experiment Name: Zm_5mM_NO_P Parameter: Plant Line Value: 35A19
  misc_feature: MA Experiment 108559 PARAMETER Experiment Name: Zm_5mM_NO_P Parameter: Timepoint (hr) Value: 12
  misc_feature: MA Experiment 108559 PARAMETER Experiment Name: Zm_5mM_NO_P Parameter: Tissue Value: Aerial
  misc_feature: MA Experiment 108559 PARAMETER Experiment Name: Zm_5mM_NO_P Parameter: Treatment Value: 5mM NO vs. No Treatment
  misc_feature: MA Experiment ID: 20000477 Result: Down-regulated in Transcription
  misc_feature: MA Experiment 20000477 PARAMETER Experiment Name: Zm_5mM_SA_P Parameter: Age (day) Value: 10
  misc_feature: MA Experiment 20000477 PARAMETER Experiment Name: Zm_5mM_SA_P Parameter: Organism Value: Zea mays
  misc_feature: MA Experiment 20000477 PARAMETER Experiment Name: Zm_5mM_SA_P Parameter: Plant Line Value: 35A19
  misc_feature: MA Experiment 20000477 PARAMETER Experiment Name: Zm_5mM_SA_P Parameter: Timepoint (hr) Value: 48
  misc_feature: MA Experiment 20000477 PARAMETER Experiment Name: Zm_5mM_SA_P Parameter: Tissue Value: Aerial
  misc_feature: MA Experiment 20000477 PARAMETER Experiment Name: Zm_5mM_SA_P Parameter: Treatment Value: 5mM SA vs. No Treatment
  misc_feature: MA Experiment ID: 20000532 Result: Up-regulated in Transcription
  misc_feature: MA Experiment 20000532 PARAMETER Experiment Name: Zm_0.001percent_MeJA_P Parameter: Age (day) Value: 10
  misc_feature: MA Experiment 20000532 PARAMETER Experiment Name: Zm_0.001percent_MeJA_P Parameter: Organism Value: Zea mays
  misc_feature: MA Experiment 20000532 PARAMETER Experiment Name: Zm_0.001percent_MeJA_P Parameter: Plant Line Value: 35A19
  misc_feature: MA Experiment 20000532 PARAMETER Experiment Name: Zm_0.001percent_MeJA_P Parameter: Timepoint (hr) Value: 48
  misc_feature: MA Experiment 20000532 PARAMETER Experiment Name: Zm_0.001percent_MeJA_P Parameter: Tissue Value: Aerial
  misc_feature: MA Experiment 20000532 PARAMETER Experiment Name: Zm_0.001percent_MeJA_P Parameter: Treatment Value: 0.001percent MeJA vs. No Treatment
  misc_feature: MA Experiment ID: 20000535 Result: Down-regulated in Transcription
  misc_feature: MA Experiment 20000535 PARAMETER Experiment Name: Zm_Hybrid_Seed_Dev_P Parameter: DAP Value: 30 vs. 12
  misc_feature: MA Experiment 20000535 PARAMETER Experiment Name: Zm_Hybrid_Seed_Dev_P Parameter: Organism Value: Zea mays
  misc_feature: MA Experiment 20000535 PARAMETER Experiment Name: Zm_Hybrid_Seed_Dev_P Parameter: Plant Line Value: 35A19
  misc_feature: MA Experiment 20000535 PARAMETER Experiment Name: Zm_Hybrid_Seed_Dev_P Parameter: Tissue Value: Embryo vs. Unfert Floret
  misc_feature: MA Experiment ID: 20001608 Result: Down-regulated in Transcription
  misc_feature: MA Experiment 20001608 PARAMETER Experiment Name: Zm_50ppm_KNO3_L-to-H_P Parameter: Age (day) Value: 21
  misc_feature: MA Experiment 20001608 PARAMETER Experiment Name: Zm_50ppm_KNO3_L-to-H_P Parameter: Organism Value: Zea mays
  misc_feature: MA Experiment 20001608 PARAMETER Experiment Name: Zm_50ppm_KNO3_L-to-H_P Parameter: Plant Line Value: 35A19
  misc_feature: MA Experiment 20001608 PARAMETER Experiment Name: Zm_50ppm_KNO3_L-to-H_P Parameter: Timepoint (hr) Value: 48
  misc_feature: MA Experiment 20001608 PARAMETER Experiment Name: Zm_50ppm_KNO3_L-to-H_P Parameter: Tissue Value: Shoots
  misc_feature: MA Experiment 20001608 PARAMETER Experiment Name: Zm_50ppm_KNO3_L-to-H_P Parameter: Treatment Value: 50ppm KNO3 vs. 50ppm KCl
acgaattccccattcccttcccccatcgcatcgagagccaggccagccagccacctctgctaggtctccatggccgccgcgctcaggtccccggcctcggccaaggtctcgagccccgccgccgcctccacgtgcgccaggcgtccagagtcgcggtgggcgggttccggcagcatccgcggagccgtgtcggccccgtggccgtgcgggcgtcgctgttctcgcccaagcccgcggcggccaaggacgcgcggccgaccaaggtgcaggagctgtacgtgtacgagatgaacgagcgggaccgcgagagccccgcgtacctgcgcctcagcgccaagcagacggagaacgcgctgggcgacctggtccccttcacaaacaaggtccgtcgtcgttgtgttccttgctttgctttttgcttttgcttttgcttttgccttgatcggtgcctccgcttagccgctcttcctccccacccacccatgcacccaggtttacaacggcagcctggacaagcggctgggcatcaccgccggcatctgcgtgctcatccagcacgtccccgaccgcaacggcgaccggtacgaggccatctacagcttctacttcggcgactacggccacatctcggtgcagggcgcgtacctgacctacgaggagtcgtacctggccgtcacgggcggntccggcgtacttcgagggcgcctacggccaggtcaagctccaccagatcgtcttccccttcaagatcttctacaccttctacctccggggcatcccggacctgcccagggacctgctctgcacgcccgtcccgccctcccccaccgtcgagcccacgcccgccgccagggccgccgagccgcacgcctgcgtcaacaactacaccaactgactgatcaactccagcccaggaaccatctctgcctgccatgcctgtccctcactcgatttgtatgtttgtatggcttangtccttcgattcgtacgttcgtgcgtggtagcaccaataaacatgcgatcgattgagttgtgtgtgcttctccattcattcacttgctctttctgcagctcgtgatcgagttgtgtgtgctccattcccaaattatgtatgatcgattagtagcgttaggggttaaccagtagccgctgtgtacttgtgtcacccttggacaaacaatgagatatttctttgtcgtcg

SEQ ID NO: 15826 - protein, 298 aa, Zea mays subsp. mays
  peptide (1)..(298): Ceres Seq. ID no. 12407125
  misc_feature (231)..(298): Pfam Name: Equine herpesvirus glycoprotein gp2 Pfam Description: Equine herpesvirus glycoprotein gp2
  misc_feature (59)..(128): Homolog of NCBI NO: 15230874 NR Description: hypothetical protein; protein id: At3g25760.1
  misc_feature (58)..(128): Homolog of NCBI NO: 23956574 NR Description: allene oxide cyclase [Solanum tuberosum]
  misc_feature (83)..(128): Homolog of NCBI NO: 16416376 NR Description: mangrin [Bruguiera sexangula]
  misc_feature (62)..(128): Homolog of NCBI NO: 40644130 NR Description: allene oxide cyclase [Nicotiana tabacum]
  misc_feature (56)..(128): Homolog of NCBI NO: 8977961 NR Description: allene oxide cyclase [Lycopersicon esculentum]
  misc_feature (56)..(128): Homolog of NCBI NO: 1362093 NR Description: hypothetical protein (clone TPP15) - tomato
  misc_feature (44)..(128): Homolog of NCBI NO: 39980760 NR Description: allene oxide cyclase [Zea mays]
  misc_feature (70)..(128): Homolog of NCBI NO: 40644132 NR Description: allene oxide cyclase [Medicago truncatula]
  misc_feature (46)..(128): Homolog of NCBI NO: 40643247 NR Description: allene oxide cyclase [Hordeum vulgare]
  misc_feature (26)..(128): Homolog of NCBI NO: 21727906 NR Description: allene oxide cyclase [Oryza sativa (japonica
  misc_feature (228)..(228): Xaa is any aa, unknown or other
EFPIPFPHRIESQASQPPLLGLHGRRAQVPGLGQGLEPRRRLHVRQASRVAVGGFRQHPRSRVGPVAVRASLFSPKPAAAKDARPTKVQELYVYEMNERDRESPAYLRLSAKQTENALGDLVPFTNKVRRRCVPCFAFCFCFCFCLDRCLRLAALPPHPPMHPGLQRQPGQAAGHHRRHLRAHPARPRPQRRPVRGHLQLLLRRLRPHLGAGRVPDLRGVVPGRHGRXRRTSRAPTARSSSTRSSSPSRSSTPSTSGASRTCPGTCSARPSRPPPPSSPRPPPGPPSRTPASTTTPTD

SEQ ID NO: 15827 - protein, 203 aa, Zea mays subsp. mays
  peptide (1)..(203): Ceres Seq. ID no. 12407126
  misc_feature (136)..(203): Pfam Name: Equine herpesvirus glycoprotein gp2 Pfam Description: Equine herpesvirus glycoprotein gp2
  misc_feature (1)..(33): Homolog of NCBI NO: 15230874 NR Description: hypothetical protein; protein id: At3g25760.1
  misc_feature (1)..(33): Homolog of NCBI NO: 23956574 NR Description: allene oxide cyclase [Solanum tuberosum]
  misc_feature (1)..(33): Homolog of NCBI NO: 16416376 NR Description: mangrin [Bruguiera sexangula]
  misc_feature (1)..(33): Homolog of NCBI NO: 40644130 NR Description: allene oxide cyclase [Nicotiana tabacum]
  misc_feature (1)..(33): Homolog of NCBI NO: 8977961 NR Description: allene oxide cyclase [Lycopersicon esculentum]
  misc_feature (1)..(33): Homolog of NCBI NO: 1362093 NR Description: hypothetical protein (clone TPP15) - tomato
  misc_feature (1)..(33): Homolog of NCBI NO: 39980760 NR Description: allene oxide cyclase [Zea mays]
  misc_feature (1)..(33): Homolog of NCBI NO: 40644132 NR Description: allene oxide cyclase [Medicago truncatula]
  misc_feature (1)..(33): Homolog of NCBI NO: 40643247 NR Description: allene oxide cyclase [Hordeum vulgare]
  misc_feature (1)..(33): Homolog of NCBI NO: 21727906 NR Description: allene oxide cyclase [Oryza sativa (japonica
  misc_feature (133)..(133): Xaa is any aa, unknown or other
MNERDRESPAYLRLSAKQTENALGDLVPFTNKVRRRCVPCFAFCFCFCFCLDRCLRLAALPPHPPMHPGLQRQPGQAAGHHRRHLRAHPARPRPQRRPVRGHLQLLLRRLRPHLGAGRVPDLRGVVPGRHGRXRRTSRAPTARSSSTRSSSPSRSSTPSTSGASRTCPGTCSARPSRPPPPSSPRPPPGPPSRTPASTTTPTD

SEQ ID NO: 15828 - DNA, 983 bp, Zea mays subsp. mays
  misc_feature (1)..(983): Ceres Seq. ID no. 12350640
  misc_feature: MA Experiment ID: 108527 Result: Down-regulated in Transcription
  misc_feature: MA Experiment 108527 PARAMETER Experiment Name: Zm_5mM_NO_P Parameter: Age (day) Value: 8
  misc_feature: MA Experiment 108527 PARAMETER Experiment Name: Zm_5mM_NO_P Parameter: Organism Value: Zea mays
  misc_feature: MA Experiment 108527 PARAMETER Experiment Name: Zm_5mM_NO_P Parameter: Plant Line Value: 35A19
  misc_feature: MA Experiment 108527 PARAMETER Experiment Name: Zm_5mM_NO_P Parameter: Timepoint (hr) Value: 6
  misc_feature: MA Experiment 108527 PARAMETER Experiment Name: Zm_5mM_NO_P Parameter: Tissue Value: Aerial
  misc_feature: MA Experiment 108527 PARAMETER Experiment Name: Zm_5mM_NO_P Parameter: Treatment Value: 5mM NO vs. No Treatment
  misc_feature: MA Experiment ID: 108534 Result: Up-regulated in Transcription
  misc_feature: MA Experiment 108534 PARAMETER Experiment Name: Zm_4deg_Cold_P Parameter: Age (hr) Value: 8
  misc_feature: MA Experiment 108534 PARAMETER Experiment Name: Zm_4deg_Cold_P Parameter: Organism Value: Zea mays
  misc_feature: MA Experiment 108534 PARAMETER Experiment Name: Zm_4deg_Cold_P Parameter: Plant Line Value: 35A19
  misc_feature: MA Experiment 108534 PARAMETER Experiment Name: Zm_4deg_Cold_P Parameter: Temperature (deg C) Value: 4 vs. 22
  misc_feature: MA Experiment 108534 PARAMETER Experiment Name: Zm_4deg_Cold_P Parameter: Timepoint (hr) Value: 6
  misc_feature: MA Experiment 108534 PARAMETER Experiment Name: Zm_4deg_Cold_P Parameter: Tissue Value: Aerial
  misc_feature: MA Experiment ID: 108543 Result: Up-regulated in Transcription
  misc_feature: MA Experiment ID: 108544 Result: Down-regulated in Transcription
  misc_feature: MA Experiment ID: 108556 Result: Down-regulated in Transcription
  misc_feature: MA Experiment 108556 PARAMETER Experiment Name: Zm_Drought_P Parameter: Age (day) Value: 9
  misc_feature: MA Experiment 108556 PARAMETER Experiment Name: Zm_Drought_P Parameter: Organism Value: Zea mays
  misc_feature: MA Experiment 108556 PARAMETER Experiment Name: Zm_Drought_P Parameter: Plant Line Value: 35A19
  misc_feature: MA Experiment 108556 PARAMETER Experiment Name: Zm_Drought_P Parameter: Timepoint (hr) Value: 24
  misc_feature: MA Experiment 108556 PARAMETER Experiment Name: Zm_Drought_P Parameter: Tissue Value: Aerial
  misc_feature: MA Experiment 108556 PARAMETER Experiment Name: Zm_Drought_P Parameter: Treatment Value: Drought vs. No Drought
  misc_feature: MA Experiment ID: 108559 Result: Down-regulated in Transcription
  misc_feature: MA Experiment 108559 PARAMETER Experiment Name: Zm_5mM_NO_P Parameter: Age (day) Value: 8
  misc_feature: MA Experiment 108559 PARAMETER Experiment Name: Zm_5mM_NO_P Parameter: Organism Value: Zea mays
  misc_feature: MA Experiment 108559 PARAMETER Experiment Name: Zm_5mM_NO_P Parameter: Plant Line Value: 35A19
  misc_feature: MA Experiment 108559 PARAMETER Experiment Name: Zm_5mM_NO_P Parameter: Timepoint (hr) Value: 12
  misc_feature: MA Experiment 108559 PARAMETER Experiment Name: Zm_5mM_NO_P Parameter: Tissue Value: Aerial
  misc_feature: MA Experiment 108559 PARAMETER Experiment Name: Zm_5mM_NO_P Parameter: Treatment Value: 5mM NO vs. No Treatment
  misc_feature: MA Experiment ID: 20000478 Result: Down-regulated in Transcription
  misc_feature: MA Experiment 20000478 PARAMETER Experiment Name: Zm_5mM_SA_P Parameter: Age (day) Value: 11
  misc_feature: MA Experiment 20000478 PARAMETER Experiment Name: Zm_5mM_SA_P Parameter: Organism Value: Zea mays
  misc_feature: MA Experiment 20000478 PARAMETER Experiment Name: Zm_5mM_SA_P Parameter: Plant Line Value: 35A19
  misc_feature: MA Experiment 20000478 PARAMETER Experiment Name: Zm_5mM_SA_P Parameter: Timepoint (hr) Value: 72
  misc_feature: MA Experiment 20000478 PARAMETER Experiment Name: Zm_5mM_SA_P Parameter: Tissue Value: Aerial
  misc_feature: MA Experiment 20000478 PARAMETER Experiment Name: Zm_5mM_SA_P Parameter: Treatment Value: 5mM SA vs. No Treatment
  misc_feature: MA Experiment ID: 20000479 Result: Down-regulated in Transcription
  misc_feature: MA Experiment 20000479 PARAMETER Experiment Name: Zm_Drought_P Parameter: Age (day) Value: 10
  misc_feature: MA Experiment 20000479 PARAMETER Experiment Name: Zm_Drought_P Parameter: Organism Value: Zea mays
  misc_feature: MA Experiment 20000479 PARAMETER Experiment Name: Zm_Drought_P Parameter: Plant Line Value: 35A19
  misc_feature: MA Experiment 20000479 PARAMETER Experiment Name: Zm_Drought_P Parameter: Timepoint (hr) Value: 48
  misc_feature: MA Experiment 20000479 PARAMETER Experiment Name: Zm_Drought_P Parameter: Tissue Value: Aerial
  misc_feature: MA Experiment 20000479 PARAMETER Experiment Name: Zm_Drought_P Parameter: Treatment Value: Drought vs. No Drought
  misc_feature: MA Experiment ID: 20000480 Result: Down-regulated in Transcription
  misc_feature: MA Experiment 20000480 PARAMETER Experiment Name: Zm_Drought_P Parameter: Age (day) Value: 11
  misc_feature: MA Experiment 20000480 PARAMETER Experiment Name: Zm_Drought_P Parameter: Organism Value: Zea mays
  misc_feature: MA Experiment 20000480 PARAMETER Experiment Name: Zm_Drought_P Parameter: Plant Line Value: 35A19
  misc_feature: MA Experiment 20000480 PARAMETER Experiment Name: Zm_Drought_P Parameter: Timepoint (hr) Value: 72
  misc_feature: MA Experiment 20000480 PARAMETER Experiment Name: Zm_Drought_P Parameter: Tissue Value: Aerial
  misc_feature: MA Experiment 20000480 PARAMETER Experiment Name: Zm_Drought_P Parameter: Treatment Value: Drought vs. No Drought
  misc_feature: MA Experiment ID: 20000535 Result: Down-regulated in Transcription
  misc_feature: MA Experiment 20000535 PARAMETER Experiment Name: Zm_Hybrid_Seed_Dev_P Parameter: DAP Value: 30 vs. 12
  misc_feature: MA Experiment 20000535 PARAMETER Experiment Name: Zm_Hybrid_Seed_Dev_P Parameter: Organism Value: Zea mays
  misc_feature: MA Experiment 20000535 PARAMETER Experiment Name: Zm_Hybrid_Seed_Dev_P Parameter: Plant Line Value: 35A19
  misc_feature: MA Experiment 20000535 PARAMETER Experiment Name: Zm_Hybrid_Seed_Dev_P Parameter: Tissue Value: Embryo vs. Unfert Floret
accagagagccacagcaccagcggcaggcacccaaagcccaggaccgccaatggccgaccgcgtgtaccccgccgccaagccgaacccgcctccaggcgcggcgggcaacagcaacggcgcgcaggcgtcgtcgttccctgcgcccaagtcgcagatgtaccagcggcccatctaccgtccgcaggcccccgcgaagcggcagcgcgggcggtcgtgccggtgcagcttgtgctgctgcttctgctgggcgctggtggtggtgatcctgctggcgttcgtggccgcggtgtgcggcggcgtcttctacctgctgtaccggccgcagcggccgtcgttcagcgtgtcgtcagtgcggctggcgtcgctgaacctgacgtcgtcggcgacggcgcccgtgctgagcgacgccatcacgctgaccgtgacggcgcggaacccgaacaagaagatggtgtacctgtacgacgacctgaccctgctggtggccacggccgccaacgccgtgccgctggggagcgccaccgtgcccgggttcgcgcacgcggccggcaacaccaccgtgctgaccgccaccgtctccgccagcgcggtgggcgtggaccccagcggcgccagctccgacatcaagcggtccggcggcgggtcgttctccgtggtggtggacgcggacaccagcgccggcgtccgggtgggcgggcttaagacgaagaagatcggcatccaggtgcactgcgagggcatcaagctgacggcaccgcctccgccaccgccggcgcccaagagggccaaggggaagaacagcaccgccgcgctcgcgcctgctccggcgccgtccgccgccgacgcgacgccggcgaagacggccacggtgagcacggcggcgcactcgtgcaaggttagggtccgcgtcaagatctggaagtggactttctaggtacgggcagcgggaggataggacacacctttaggggctgcagcgcgc

SEQ ID NO: 15829 - protein, 310 aa, Zea mays subsp. mays
  peptide (1)..(310): Ceres Seq. ID no. 12350641
  misc_feature (17)..(249): Homolog of NCBI NO: 26449684 NR Description: unknown protein [Arabidopsis thaliana]
  misc_feature (17)..(249): Homolog of NCBI NO: 30690312 NR Description: expressed protein [Arabidopsis thaliana]
  misc_feature (17)..(249): Homolog of NCBI NO: 25408980 NR Description: hypothetical protein At2g46300 [imported] -
  misc_feature (17)..(252): Homolog of NCBI NO: 18401317 NR Description: expressed protein
  misc_feature (15)..(263): Homolog of NCBI NO: 15239804 NR Description: putative protein
  misc_feature (15)..(263): Homolog of NCBI NO: 21536796 NR Description: unknown [Arabidopsis thaliana]
  misc_feature (2)..(301): Homolog of NCBI NO: 34914304 NR Description: B1151A10.19 [Oryza sativa (japonica
  misc_feature (19)..(252): Homolog of NCBI NO: 18394509 NR Description: expressed protein
  misc_feature (19)..(252): Homolog of NCBI NO: 11762174 NR Description: At1g17620 [Arabidopsis thaliana]
  misc_feature (15)..(310): Homolog of NCBI NO: 34903552 NR Description: P0001B06.28 [Oryza sativa (japonica
QRATAPAAGTQSPGPPMADRVYPAAKPNPPPGAAGNSNGAQASSFPAPKSQMYQRPIYRPQAPAKRQRGRSCRCSLCCCFCWALVVVILLAFVAAVCGGVFYLLYRPQRPSFSVSSVRLASLNLTSSATAPVLSDAITLTVTARNPNKKMVYLYDDLTLLVATAANAVPLGSATVPGFAHAAGNTTVLTATVSASAVGVDPSGASSDIKRSGGGSFSVVVDADTSAGVRVGGLKTKKIGIQVHCEGIKLTAPPPPPPAPKRAKGKNSTAALAPAPAPSAADATPAKTATVSTAAHSCKVRVRVKIWKWTF

SEQ ID NO: 15830 - protein, 294 aa, Zea mays subsp. mays
  peptide (1)..(294): Ceres Seq. ID no. 12350642
  misc_feature (1)..(233): Homolog of NCBI NO: 26449684 NR Description: unknown protein [Arabidopsis thaliana]
  misc_feature (1)..(233): Homolog of NCBI NO: 30690312 NR Description: expressed protein [Arabidopsis thaliana]
  misc_feature (1)..(233): Homolog of NCBI NO: 25408980 NR Description: hypothetical protein At2g46300 [imported] -
  misc_feature (1)..(236): Homolog of NCBI NO: 18401317 NR Description: expressed protein
  misc_feature (1)..(247): Homolog of NCBI NO: 15239804 NR Description: putative protein
  misc_feature (1)..(247): Homolog of NCBI NO: 21536796 NR Description: unknown [Arabidopsis thaliana]
  misc_feature (1)..(285): Homolog of NCBI NO: 34914304 NR Description: B1151A10.19 [Oryza sativa (japonica
  misc_feature (3)..(236): Homolog of NCBI NO: 18394509 NR Description: expressed protein
  misc_feature (3)..(236): Homolog of NCBI NO: 11762174 NR Description: At1g17620 [Arabidopsis thaliana]
  misc_feature (1)..(294): Homolog of NCBI NO: 34903552 NR Description: P0001B06.28 [Oryza sativa (japonica
MADRVYPAAKPNPPPGAAGNSNGAQASSFPAPKSQMYQRPIYRPQAPAKRQRGRSCRCSLCCCFCWALVVVILLAFVAAVCGGVFYLLYRPQRPSFSVSSVRLASLNLTSSATAPVLSDAITLTVTARNPNKKMVYLYDDLTLLVATAANAVPLGSATVPGFAHAAGNTTVLTATVSASAVGVDPSGASSDIKRSGGGSFSVVVDADTSAGVRVGGLKTKKIGIQVHCEGIKLTAPPPPPPAPKRAKGKNSTAALAPAPAPSAADATPAKTATVSTAAHSCKVRVRVKIWKWTF

SEQ ID NO: 15831 - protein, 259 aa, Zea mays subsp. mays
  peptide (1)..(259): Ceres Seq. ID no. 12350643
  misc_feature (1)..(198): Homolog of NCBI NO: 26449684 NR Description: unknown protein [Arabidopsis thaliana]
  misc_feature (1)..(198): Homolog of NCBI NO: 30690312 NR Description: expressed protein [Arabidopsis thaliana]
  misc_feature (1)..(198): Homolog of NCBI NO: 25408980 NR Description: hypothetical protein At2g46300 [imported] -
  misc_feature (1)..(201): Homolog of NCBI NO: 18401317 NR Description: expressed protein
  misc_feature (1)..(212): Homolog of NCBI NO: 15239804 NR Description: putative protein
  misc_feature (1)..(212): Homolog of NCBI NO: 21536796 NR Description: unknown [Arabidopsis thaliana]
  misc_feature (1)..(250): Homolog of NCBI NO: 34914304 NR Description: B1151A10.19 [Oryza sativa (japonica
  misc_feature (1)..(201): Homolog of NCBI NO: 18394509 NR Description: expressed protein
  misc_feature (1)..(201): Homolog of NCBI NO: 11762174 NR Description: At1g17620 [Arabidopsis thaliana]
  misc_feature (1)..(259): Homolog of NCBI NO: 34903552 NR Description: P0001B06.28 [Oryza sativa (japonica
MYQRPIYRPQAPAKRQRGRSCRCSLCCCFCWALVVVILLAFVAAVCGGVFYLLYRPQRPSFSVSSVRLASLNLTSSATAPVLSDAITLTVTARNPNKKMVYLYDDLTLLVATAANAVPLGSATVPGFAHAAGNTTVLTATVSASAVGVDPSGASSDIKRSGGGSFSVVVDADTSAGVRVGGLKTKKIGIQVHCEGIKLTAPPPPPPAPKRAKGKNSTAALAPAPAPSAADATPAKTATVSTAAHSCKVRVRVKIWKWTF

SEQ ID NO: 15832 - DNA, 1084 bp, Zea mays subsp. mays
  misc_feature (1)..(1084): Ceres Seq. ID no. 12382191
  misc_feature: MA Experiment ID: 108515 Result: Up-regulated in Transcription
  misc_feature: MA Experiment 108515 PARAMETER Experiment Name: Zm_2mM_SA_P Parameter: Age (day) Value: 8
  misc_feature: MA Experiment 108515 PARAMETER Experiment Name: Zm_2mM_SA_P Parameter: Organism Value: Zea mays
  misc_feature: MA Experiment 108515 PARAMETER Experiment Name: Zm_2mM_SA_P Parameter: Plant Line Value: 35A19
  misc_feature: MA Experiment 108515 PARAMETER Experiment Name: Zm_2mM_SA_P Parameter: Timepoint (hr) Value: 12
  misc_feature: MA Experiment 108515 PARAMETER Experiment Name: Zm_2mM_SA_P Parameter: Tissue Value: Aerial
  misc_feature: MA Experiment 108515 PARAMETER Experiment Name: Zm_2mM_SA_P Parameter: Treatment Value: 2mM SA vs. No Treatment
  misc_feature: MA Experiment ID: 108527 Result: Up-regulated in Transcription
  misc_feature: MA Experiment 108527 PARAMETER Experiment Name: Zm_5mM_NO_P Parameter: Age (day) Value: 8
  misc_feature: MA Experiment 108527 PARAMETER Experiment Name: Zm_5mM_NO_P Parameter: Organism Value: Zea mays
  misc_feature: MA Experiment 108527 PARAMETER Experiment Name: Zm_5mM_NO_P Parameter: Plant Line Value: 35A19
  misc_feature: MA Experiment 108527 PARAMETER Experiment Name: Zm_5mM_NO_P Parameter: Timepoint (hr) Value: 6
  misc_feature: MA Experiment 108527 PARAMETER Experiment Name: Zm_5mM_NO_P Parameter: Tissue Value: Aerial
  misc_feature: MA Experiment 108527 PARAMETER Experiment Name: Zm_5mM_NO_P Parameter: Treatment Value: 5mM NO vs. No Treatment
  misc_feature: MA Experiment ID: 108529 Result: Up-regulated in Transcription
  misc_feature: MA Experiment 108529 PARAMETER Experiment Name: Zm_Imbibed_Seeds_P Parameter: Age (day) Value: 5 vs. 2
  misc_feature: MA Experiment 108529 PARAMETER Experiment Name: Zm_Imbibed_Seeds_P Parameter: Organism Value: Zea mays
  misc_feature: MA Experiment 108529 PARAMETER Experiment Name: Zm_Imbibed_Seeds_P Parameter: Plant Line Value: 35A19
  misc_feature: MA Experiment 108529 PARAMETER Experiment Name: Zm_Imbibed_Seeds_P Parameter: Tissue Value: Roots vs. Embryo
  misc_feature: MA Experiment ID: 108533 Result: Down-regulated in Transcription
  misc_feature: MA Experiment 108533 PARAMETER Experiment Name: Zm_4deg_Cold_P Parameter: Age (hr) Value: 8
  misc_feature: MA Experiment 108533 PARAMETER Experiment Name: Zm_4deg_Cold_P Parameter: Organism Value: Zea mays
  misc_feature: MA Experiment 108533 PARAMETER Experiment Name: Zm_4deg_Cold_P Parameter: Plant Line Value: 35A19
  misc_feature: MA Experiment 108533 PARAMETER Experiment Name: Zm_4deg_Cold_P Parameter: Temperature (deg C) Value: 4 vs. 22
  misc_feature: MA Experiment 108533 PARAMETER Experiment Name: Zm_4deg_Cold_P Parameter: Timepoint (hr) Value: 1
  misc_feature: MA Experiment 108533 PARAMETER Experiment Name: Zm_4deg_Cold_P Parameter: Tissue Value: Aerial
  misc_feature: MA Experiment ID: 108543 Result: Down-regulated in Transcription
  misc_feature: MA Experiment ID: 108689 Result: Down-regulated in Transcription
  misc_feature: MA Experiment 108689 PARAMETER Experiment Name: Zm_Drought_Roots_P Parameter: Age (day) Value: 9
  misc_feature: MA Experiment 108689 PARAMETER Experiment Name: Zm_Drought_Roots_P Parameter: Organism Value: Zea mays
  misc_feature: MA Experiment 108689 PARAMETER Experiment Name: Zm_Drought_Roots_P Parameter: Plant Line Value: 35A19
  misc_feature: MA Experiment 108689 PARAMETER Experiment Name: Zm_Drought_Roots_P Parameter: Timepoint (hr) Value: 24
  misc_feature: MA Experiment 108689 PARAMETER Experiment Name: Zm_Drought_Roots_P Parameter: Tissue Value: Roots
  misc_feature: MA Experiment 108689 PARAMETER Experiment Name: Zm_Drought_Roots_P Parameter: Treatment Value: Drought vs. No Drought
  misc_feature: MA Experiment ID: 20000477 Result: Up-regulated in Transcription
  misc_feature: MA Experiment 20000477 PARAMETER Experiment Name: Zm_5mM_SA_P Parameter: Age (day) Value: 10
  misc_feature: MA Experiment 20000477 PARAMETER Experiment Name: Zm_5mM_SA_P Parameter: Organism Value: Zea mays
  misc_feature: MA Experiment 20000477 PARAMETER Experiment Name: Zm_5mM_SA_P Parameter: Plant Line Value: 35A19
  misc_feature: MA Experiment 20000477 PARAMETER Experiment Name: Zm_5mM_SA_P Parameter: Timepoint (hr) Value: 48
  misc_feature: MA Experiment 20000477 PARAMETER Experiment Name: Zm_5mM_SA_P Parameter: Tissue Value: Aerial
  misc_feature: MA Experiment 20000477 PARAMETER Experiment Name: Zm_5mM_SA_P Parameter: Treatment Value: 5mM SA vs. No Treatment
  misc_feature: MA Experiment ID: 20000478 Result: Up-regulated in Transcription
  misc_feature: MA Experiment 20000478 PARAMETER Experiment Name: Zm_5mM_SA_P Parameter: Age (day) Value: 11
  misc_feature: MA Experiment 20000478 PARAMETER Experiment Name: Zm_5mM_SA_P Parameter: Organism Value: Zea mays
  misc_feature: MA Experiment 20000478 PARAMETER Experiment Name: Zm_5mM_SA_P Parameter: Plant Line Value: 35A19
  misc_feature: MA Experiment 20000478 PARAMETER Experiment Name: Zm_5mM_SA_P Parameter: Timepoint (hr) Value: 72
  misc_feature: MA Experiment 20000478 PARAMETER Experiment Name: Zm_5mM_SA_P Parameter: Tissue Value: Aerial
  misc_feature: MA Experiment 20000478 PARAMETER Experiment Name: Zm_5mM_SA_P Parameter: Treatment Value: 5mM SA vs. No Treatment
  misc_feature: MA Experiment ID: 20000479 Result: Up-regulated in Transcription
  misc_feature: MA Experiment 20000479 PARAMETER Experiment Name: Zm_Drought_P Parameter: Age (day) Value: 10
  misc_feature: MA Experiment 20000479 PARAMETER Experiment Name: Zm_Drought_P Parameter: Organism Value: Zea mays
  misc_feature: MA Experiment 20000479 PARAMETER Experiment Name: Zm_Drought_P Parameter: Plant Line Value: 35A19
  misc_feature: MA Experiment 20000479 PARAMETER Experiment Name: Zm_Drought_P Parameter: Timepoint (hr) Value: 48
  misc_feature: MA Experiment 20000479 PARAMETER Experiment Name: Zm_Drought_P Parameter: Tissue Value: Aerial
  misc_feature: MA Experiment 20000479 PARAMETER Experiment Name: Zm_Drought_P Parameter: Treatment Value: Drought vs. No Drought
  misc_feature: MA Experiment ID: 20000488 Result: Down-regulated in Transcription
  misc_feature: MA Experiment 20000488 PARAMETER Experiment Name: Zm_50mM_NH4NO3_L_to_H_P Parameter: Organism Value: Zea mays
  misc_feature: MA Experiment 20000488 PARAMETER Experiment Name: Zm_50mM_NH4NO3_L_to_H_P Parameter: Timepoint (hr) Value: 8
  misc_feature: MA Experiment 20000488 PARAMETER Experiment Name: Zm_50mM_NH4NO3_L_to_H_P Parameter: Tissue Value: Leaves
  misc_feature: MA Experiment 20000488 PARAMETER Experiment Name: Zm_50mM_NH4NO3_L_to_H_P Parameter: Treatment Value: 50mM NH4NO3 vs. 100mM Mannitol
  misc_feature: MA Experiment ID: 20000532 Result: Up-regulated in Transcription
  misc_feature: MA Experiment 20000532 PARAMETER Experiment Name: Zm_0.001percent_MeJA_P Parameter: Age (day) Value: 10
  misc_feature: MA Experiment 20000532 PARAMETER Experiment Name: Zm_0.001percent_MeJA_P Parameter: Organism Value: Zea mays
  misc_feature: MA Experiment 20000532 PARAMETER Experiment Name: Zm_0.001percent_MeJA_P Parameter: Plant Line Value: 35A19
  misc_feature: MA Experiment 20000532 PARAMETER Experiment Name: Zm_0.001percent_MeJA_P Parameter: Timepoint (hr) Value: 48
  misc_feature: MA Experiment 20000532 PARAMETER Experiment Name: Zm_0.001percent_MeJA_P Parameter: Tissue Value: Aerial
  misc_feature: MA Experiment 20000532 PARAMETER Experiment Name: Zm_0.001percent_MeJA_P Parameter: Treatment Value: 0.001percent MeJA vs. No Treatment
  misc_feature: MA Experiment ID: 20000626 Result: Up-regulated in Transcription
  misc_feature: MA Experiment 20000626 PARAMETER Experiment Name: Zm_Herbicide-Treatments_P Parameter: Timepoint (hr) Value: 12
  misc_feature: MA Experiment 20000626 PARAMETER Experiment Name: Zm_Herbicide-Treatments_P Parameter: Tissue Value: Aerial
  misc_feature: MA Experiment 20000626 PARAMETER Experiment Name: Zm_Herbicide-Treatments_P Parameter: Treatment Value: Roundup vs. No Treatment
  misc_feature: MA Experiment ID: 20000630 Result: Up-regulated in Transcription
  misc_feature: MA Experiment 20000630 PARAMETER Experiment Name: Zm_Herbicide-Treatments_P Parameter: Timepoint (hr) Value: 4
  misc_feature: MA Experiment 20000630 PARAMETER Experiment Name: Zm_Herbicide-Treatments_P Parameter: Tissue Value: Aerial
  misc_feature: MA Experiment 20000630 PARAMETER Experiment Name: Zm_Herbicide-Treatments_P Parameter: Treatment Value: Roundup vs. No Treatment
ggaagaagcttcgaaccccttctggccatctctcgtcctcctttcaattcttgagctttgtgcttccatctcctctcctctgttctcttctttgtctctgcgtgcctgttcttgtcgtctcgctcgatcgtaagtgcaacggaataagaatggcgtcgccgtcagcgtcaggagagaagaagactacgatcctggtggcgaggaagggccggctgcggcagcgctacgacggcgagtaccgcctggtggccgggtgcgtgccgtaccgcgtggacgcggacggccagacgcagctgctcatggtgtccacgcccaacagggacgacctcgtcttccccaagggcgggtgggaggacgacgaggacgtgcacgaggcggcgtgccgcgaagcgctggaggaggccggcgtcaggggcgccatcaaccgaagtgcgctcgggatgtgggtgttcaggagcaagagcagtccggtgagcagcgacagcccccggggcgcctgcaagggctacatcttcgcgctggaggtggcggaggagctggagcagtggccggagcaggacacccacggcaggcagtgggtctccccggcggacgcgtaccgcctctgccgctacgactggatgcgcgaggcgctgtcggcactgctcgaccgcctcacggaggagcccgagccccccaagtcccccgccgcggacggcctcggcgagcacgcaggcgtgtgcatgatggtcaaggcgaccacagccgctgcggatcgagcggtggcgctctgctagtggcatcattctgaacatgtgcaaatcctcatcatctgggtcgtcaggctcggctgttcgttcgaacttggtgtggttggtcggtgaatgcagtgtatggaaacttgtctcgtcaatccagggcttgtaaatgatgtcggttacgccacgtgttaaatcaaatggctacaactgtccgtagtgcgtagctgagagtttccttgtcaaatctattgaggtttccactgtttgatcctcgcttcgtgtgctaaccttctcgacttctttcaactgtccccccctatatacaatatcttagttttgttttt

SEQ ID NO: 15833 - protein, 257 aa, Zea mays subsp. mays
  peptide (1)..(257): Ceres Seq. ID no. 12382192
  misc_feature (79)..(215): Pfam Name: NUDIX domain Pfam Description: NUDIX domain
  misc_feature (53)..(217): Homolog of NCBI NO: 22330598 NR Description: unknown protein
  misc_feature (59)..(216): Homolog of NCBI NO: 15221055 NR Description: unknown protein; protein id: At1g18300.1
  misc_feature (64)..(212): Homolog of NCBI NO: 34900054 NR Description: MutT-like protein~contains ESTs
  misc_feature (139)..(257): Homolog of NCBI NO: 38605803 NR Description: OSJNBb0014D23.5 [Oryza sativa (japonica
  misc_feature (51)..(166): Homolog of NCBI NO: 38605803 NR Description: OSJNBb0014D23.5 [Oryza sativa (japonica
  misc_feature (64)..(212): Homolog of NCBI NO: 38175436 NR Description: MutT-like protein [Oryza sativa (japonica
  misc_feature (64)..(211): Homolog of NCBI NO: 18399682 NR Description: expressed protein; protein id: At3g12600.1
  misc_feature (62)..(221): Homolog of NCBI NO: 25518008 NR Description: F13K23.14 protein - Arabidopsis thaliana
  misc_feature (62)..(221): Homolog of NCBI NO: 18391450 NR Description: expressed protein
  misc_feature (64)..(221): Homolog of NCBI NO: 15231598 NR Description: MutT-like protein; protein id: At3g26690.1
KKLRTPSGHLSSSFQFLSFVLPSPLLCSLLCLCVPVLVVSLDRKCNGIRMASPSASGEKKTTILVARKGRLRQRYDGEYRLVAGCVPYRVDADGQTQLLMVSTPNRDDLVFPKGGWEDDEDVHEAACREALEEAGVRGAINRSALGMWVFRSKSSPVSSDSPRGACKGYIFALEVAEELEQWPEQDTHGRQWVSPADAYRLCRYDWMREALSALLDRLTEEPEPPKSPAADGLGEHAGVCMMVKATTAAADRAVALC

SEQ ID NO: 15834 - protein, 208 aa, Zea mays subsp. mays
  peptide (1)..(208): Ceres Seq. ID no. 12382193
  misc_feature (30)..(166): Pfam Name: NUDIX domain Pfam Description: NUDIX domain
  misc_feature (4)..(168): Homolog of NCBI NO: 22330598 NR Description: unknown protein
  misc_feature (10)..(167): Homolog of NCBI NO: 15221055 NR Description: unknown protein; protein id: At1g18300.1
  misc_feature (15)..(163): Homolog of NCBI NO: 34900054 NR Description: MutT-like protein~contains ESTs
  misc_feature (90)..(208): Homolog of NCBI NO: 38605803 NR Description: OSJNBb0014D23.5 [Oryza sativa (japonica
  misc_feature (2)..(117): Homolog of NCBI NO: 38605803 NR Description: OSJNBb0014D23.5 [Oryza sativa (japonica
  misc_feature (15)..(163): Homolog of NCBI NO: 38175436 NR Description: MutT-like protein [Oryza sativa (japonica
  misc_feature (15)..(162): Homolog of NCBI NO: 18399682 NR Description: expressed protein; protein id: At3g12600.1
  misc_feature (13)..(172): Homolog of NCBI NO: 25518008 NR Description: F13K23.14 protein - Arabidopsis thaliana
  misc_feature (13)..(172): Homolog of NCBI NO: 18391450 NR Description: expressed protein
  misc_feature (15)..(172): Homolog of NCBI NO: 15231598 NR Description: MutT-like protein; protein id: At3g26690.1
MASPSASGEKKTTILVARKGRLRQRYDGEYRLVAGCVPYRVDADGQTQLLMVSTPNRDDLVFPKGGWEDDEDVHEAACREALEEAGVRGAINRSALGMWVFRSKSSPVSSDSPRGACKGYIFALEVAEELEQWPEQDTHGRQWVSPADAYRLCRYDWMREALSALLDRLTEEPEPPKSPAADGLGEHAGVCMMVKATTAAADRAVALC

SEQ ID NO: 15835 - protein, 158 aa, Zea mays subsp. mays
  peptide (1)..(158): Ceres Seq. ID no. 12382194
  misc_feature (1)..(116): Pfam Name: NUDIX domain Pfam Description: NUDIX domain
  misc_feature (1)..(118): Homolog of NCBI NO: 22330598 NR Description: unknown protein
  misc_feature (1)..(117): Homolog of NCBI NO: 15221055 NR Description: unknown protein; protein id: At1g18300.1
  misc_feature (1)..(113): Homolog of NCBI NO: 34900054 NR Description: MutT-like protein~contains ESTs
  misc_feature (40)..(158): Homolog of NCBI NO: 38605803 NR Description: OSJNBb0014D23.5 [Oryza sativa (japonica
  misc_feature (1)..(67): Homolog of NCBI NO: 38605803 NR Description: OSJNBb0014D23.5 [Oryza sativa (japonica
  misc_feature (1)..(113): Homolog of NCBI NO: 38175436 NR Description: MutT-like protein [Oryza sativa (japonica
  misc_feature (1)..(112): Homolog of NCBI NO: 18399682 NR Description: expressed protein; protein id: At3g12600.1
  misc_feature (1)..(122): Homolog of NCBI NO: 25518008 NR Description: F13K23.14 protein - Arabidopsis thaliana
  misc_feature (1)..(122): Homolog of NCBI NO: 18391450 NR Description: expressed protein
  misc_feature (1)..(122): Homolog of NCBI NO: 15231598 NR Description: MutT-like protein; protein id: At3g26690.1
MVSTPNRDDLVFPKGGWEDDEDVHEAACREALEEAGVRGAINRSALGMWVFRSKSSPVSSDSPRGACKGYIFALEVAEELEQWPEQDTHGRQWVSPADAYRLCRYDWMREALSALLDRLTEEPEPPKSPAADGLGEHAGVCMMVKATTAAADRAVALC

SEQ ID NO: 15836 - DNA, 1199 bp, Zea mays subsp. mays
  misc_feature (1)..(1199): Ceres Seq. ID no. 12386722
  misc_feature: MA Experiment ID: 20000535 Result: Up-regulated in Transcription
  misc_feature: MA Experiment 20000535 PARAMETER Experiment Name: Zm_Hybrid_Seed_Dev_P Parameter: DAP Value: 30 vs. 12
  misc_feature: MA Experiment 20000535 PARAMETER Experiment Name: Zm_Hybrid_Seed_Dev_P Parameter: Organism Value: Zea mays
  misc_feature: MA Experiment 20000535 PARAMETER Experiment Name: Zm_Hybrid_Seed_Dev_P Parameter: Plant Line Value: 35A19
  misc_feature: MA Experiment 20000535 PARAMETER Experiment Name: Zm_Hybrid_Seed_Dev_P Parameter: Tissue Value: Embryo vs. Unfert Floret
gcacgagaccattacctagaacatcctaatcgaaaacttcccgttccccaattcgaaatcgagtcgggtactcgggtcggtcttgccgtgcgtgcgtggctgcgcgaaccagcccacgctcccactccccgcccgccaccgccgggtccctctagggttttgccgcgatgtcgctccggccgagcgagcgggagcagatgcggaagggcaactacaagcagacggtggacgccgaggagagccgccgccgccgcgagggccagatggtcgacatccgcaaggccaagcgagaggaaagcctccagaagaagcgccgcgatgggttccccgccgccggcgccgtgccgccgatgggccactccaccgcactccagcagaagctcgatggcttgccggcgatggtacaggccgttcactccaacgaccccactgtgcagcttgaggccaccacgcagttcaggaagctgctctccatagagcgtagtcccccaattgaagaggtgatcagcacaggagtcgtgccccgattcattgagttccttacacgtgaggaccatccacaactccagtttgaggctgcatgggcgctcaccaacattgcatcaggcacatcagagaacactaaggtggtggttgagagtggtgctgtgcccatctttgttaagctcctcaactccaatagcgaggatgttcgtgaacaggctgtatgggctttaggtaatgttgctggtgactccccaaagtgccgtgatctggtgctaggccatggtgggctattccccttgctgcaacagcttaatgagcatgctaagctctcgatgctgaggaatgccacatggacactatcaaacttctgccgtgggaagccacaaccgaactttgatcaggtcaaaccagcattgccagcacttcagcaacttatccactctcaggatgaggaggtcctaactgatgcctgttgggctctatcatacctatctgatgggactaatgacaaaatccaagctgttattgaatctggcgtgttccctcgccttgtggaacttctgatgcatccttcagcctctgtactgattccagctctgcgcacggtgggtaacatcgtaactggggacgacatgcagactcagtgtgtcattgacaatcaagcacttccatgccttttgaacctactgaccaccacaccaaaacccgcatcc

SEQ ID NO: 15837 - protein, 344 aa, Zea mays subsp. mays
  peptide (1)..(344): Ceres Seq. ID no. 12386723
  misc_feature (4)..(96): Pfam Name: Importin beta binding domain Pfam Description: Importin beta binding domain
  misc_feature (1)..(341): Homolog of NCBI NO: 15809794 NR Description: AT3g06720/F3E22_14 [Arabidopsis thaliana]
  misc_feature (1)..(341): Homolog of NCBI NO: 25314876 NR Description: probable nuclear transport factor importin
  misc_feature (1)..(341): Homolog of NCBI NO: 15230778 NR Description: importin alpha
  misc_feature (1)..(341): Homolog of NCBI NO: 4191744 NR Description: importin alpha homolog [Arabidopsis thaliana]
  misc_feature (1)..(341): Homolog of NCBI NO: 25314870 NR Description: probable nuclear transport factor importin alpha
  misc_feature (1)..(341): Homolog of NCBI NO: 18414597 NR Description: Expressed protein; protein id: At4g16143.1
  misc_feature (1)..(341): Homolog of NCBI NO: 13605661 NR Description: AT3g06720/F3E22_14 [Arabidopsis thaliana]
  misc_feature (1)..(341): Homolog of NCBI NO: 13752562 NR Description: importin alpha 2 [Capsicum annuum]
  misc_feature (1)..(341): Homolog of NCBI NO: 34897636 NR Description: putative impotin alpha 1b [Oryza sativa]
  misc_feature (1)..(341): Homolog of NCBI NO: 6682927 NR Description: importin alpha 1b [Oryza sativa (japonica
MSLRPSEREQMRKGNYKQTVDAEESRRRREGQMVDIRKAKREESLQKKRRDGFPAAGAVPPMGHSTALQQKLDGLPAMVQAVHSNDPTVQLEATTQFRKLLSIERSPPIEEVISTGVVPRFIEFLTREDHPQLQFEAAWALTNIASGTSENTKVVVESGAVPIFVKLLNSNSEDVREQAVWALGNVAGDSPKCRDLVLGHGGLFPLLQQLNEHAKLSMLRNATWTLSNFCRGKPQPNFDQVKPALPALQQLIHSQDEEVLTDACWALSYLSDGTNDKIQAVIESGVFPRLVELLMHPSASVLIPALRTVGNIVTGDDMQTQCVIDNQALPCLLNLLTTTPKPAS

SEQ ID NO: 15838 - protein, 334 aa, Zea mays subsp. mays
  peptide (1)..(334): Ceres Seq. ID no. 12386724
  misc_feature (1)..(86): Pfam Name: Importin beta binding domain Pfam Description: Importin beta binding domain
  misc_feature (1)..(331): Homolog of NCBI NO: 15809794 NR Description: AT3g06720/F3E22_14 [Arabidopsis thaliana]
  misc_feature (1)..(331): Homolog of NCBI NO: 25314876 NR Description: probable nuclear transport factor importin
  misc_feature (1)..(331): Homolog of NCBI NO: 15230778 NR Description: importin alpha
  misc_feature (1)..(331): Homolog of NCBI NO: 4191744 NR Description: importin alpha homolog [Arabidopsis thaliana]
  misc_feature (1)..(331): Homolog of NCBI NO: 25314870 NR Description: probable nuclear transport factor importin alpha
  misc_feature (1)..(331): Homolog of NCBI NO: 18414597 NR Description: Expressed protein; protein id: At4g16143.1
  misc_feature (1)..(331): Homolog of NCBI NO: 13605661 NR Description: AT3g06720/F3E22_14 [Arabidopsis thaliana]
  misc_feature (1)..(331): Homolog of NCBI NO: 13752562 NR Description: importin alpha 2 [Capsicum annuum]
  misc_feature (1)..(331): Homolog of NCBI NO: 34897636 NR Description: putative impotin alpha 1b [Oryza sativa]
  misc_feature (1)..(331): Homolog of NCBI NO: 6682927 NR Description: importin alpha 1b [Oryza sativa (japonica
MRKGNYKQTVDAEESRRRREGQMVDIRKAKREESLQKKRRDGFPAAGAVPPMGHSTALQQKLDGLPAMVQAVHSNDPTVQLEATTQFRKLLSIERSPPIEEVISTGVVPRFIEFLTREDHPQLQFEAAWALTNIASGTSENTKVVVESGAVPIFVKLLNSNSEDVREQAVWALGNVAGDSPKCRDLVLGHGGLFPLLQQLNEHAKLSMLRNATWTLSNFCRGKPQPNFDQVKPALPALQQLIHSQDEEVLTDACWALSYLSDGTNDKIQAVIESGVFPRLVELLMHPSASVLIPALRTVGNIVTGDDMQTQCVIDNQALPCLLNLLTTTPKPAS

SEQ ID NO: 15839 - protein, 312 aa, Zea mays subsp. mays
  peptide (1)..(312): Ceres Seq. ID no. 12386725
  misc_feature (1)..(64): Pfam Name: Importin beta binding domain Pfam Description: Importin beta binding domain
  misc_feature (1)..(309): Homolog of NCBI NO: 18414597 NR Description: Expressed protein; protein id: At4g16143.1
  misc_feature (1)..(309): Homolog of NCBI NO: 13605661 NR Description: AT3g06720/F3E22_14 [Arabidopsis thaliana]
  misc_feature (1)..(309): Homolog of NCBI NO: 13752562 NR Description: importin alpha 2 [Capsicum annuum]
  misc_feature (1)..(309): Homolog of NCBI NO: 25314876 NR Description: probable nuclear transport factor importin
  misc_feature (1)..(309): Homolog of NCBI NO: 4191744 NR Description: importin alpha homolog [Arabidopsis thaliana]
  misc_feature (1)..(309): Homolog of NCBI NO: 25314870 NR Description: probable nuclear transport factor importin alpha
  misc_feature (1)..(309): Homolog of NCBI NO: 15230778 NR Description: importin alpha
  misc_feature (1)..(309): Homolog of NCBI NO: 15809794 NR Description: AT3g06720/F3E22_14 [Arabidopsis thaliana]
  misc_feature (1)..(309): Homolog of NCBI NO: 34897636 NR Description: putative impotin alpha 1b [Oryza sativa]
  misc_feature (1)..(309): Homolog of NCBI NO: 6682927 NR Description: importin alpha 1b [Oryza sativa (japonica
MVDIRKAKREESLQKKRRDGFPAAGAVPPMGHSTALQQKLDGLPAMVQAVHSNDPTVQLEATTQFRKLLSIERSPPIEEVISTGVVPRFIEFLTREDHPQLQFEAAWALTNIASGTSENTKVVVESGAVPIFVKLLNSNSEDVREQAVWALGNVAGDSPKCRDLVLGHGGLFPLLQQLNEHAKLSMLRNATWTLSNFCRGKPQPNFDQVKPALPALQQLIHSQDEEVLTDACWALSYLSDGTNDKIQAVIESGVFPRLVELLMHPSASVLIPALRTVGNIVTGDDMQTQCVIDNQALPCLLNLLTTTPKPAS

SEQ ID NO: 15840 - DNA, 1258 bp, Zea mays subsp. mays
  misc_feature (1)..(1258): Ceres Seq. ID no. 12382152
  misc_feature: MA Experiment ID: 108513 Result: Up-regulated in Transcription
  misc_feature: MA Experiment 108513 PARAMETER Experiment Name: Zm_100uM_ABA_P Parameter: Age (day) Value: 8
  misc_feature: MA Experiment 108513 PARAMETER Experiment Name: Zm_100uM_ABA_P Parameter: Organism Value: Zea mays
  misc_feature: MA Experiment 108513 PARAMETER Experiment Name: Zm_100uM_ABA_P Parameter: Plant Line Value: 35A19
  misc_feature: MA Experiment 108513 PARAMETER Experiment Name: Zm_100uM_ABA_P Parameter: Timepoint (hr) Value: 6
  misc_feature: MA Experiment 108513 PARAMETER Experiment Name: Zm_100uM_ABA_P Parameter: Tissue Value: Aerial
  misc_feature: MA Experiment 108513 PARAMETER Experiment Name: Zm_100uM_ABA_P Parameter: Treatment Value: 100uM ABA vs. No Treatment
  misc_feature: MA Experiment ID: 108522 Result: Down-regulated in Transcription
  misc_feature: MA Experiment 108522 PARAMETER Experiment Name: Zm_42deg_Heat_P Parameter: Age (day) Value: 8
  misc_feature: MA Experiment 108522 PARAMETER Experiment Name: Zm_42deg_Heat_P Parameter: Organism Value: Zea mays
  misc_feature: MA Experiment 108522 PARAMETER Experiment Name: Zm_42deg_Heat_P Parameter: Plant Line Value: 35A19
  misc_feature: MA Experiment 108522 PARAMETER Experiment Name: Zm_42deg_Heat_P Parameter: Temperature (deg C) Value: 42 vs. 22
  misc_feature: MA Experiment 108522 PARAMETER Experiment Name: Zm_42deg_Heat_P Parameter: Timepoint (hr) Value: 1
  misc_feature: MA Experiment 108522 PARAMETER Experiment Name: Zm_42deg_Heat_P Parameter: Tissue Value: Aerial
  misc_feature: MA Experiment ID: 108528 Result: Down-regulated in Transcription
  misc_feature: MA Experiment 108528 PARAMETER Experiment Name: Zm_Imbibed_Seeds_P Parameter: Age (day) Value: 5 vs. 2
  misc_feature: MA Experiment 108528 PARAMETER Experiment Name: Zm_Imbibed_Seeds_P Parameter: Organism Value: Zea mays
  misc_feature: MA Experiment 108528 PARAMETER Experiment Name: Zm_Imbibed_Seeds_P Parameter: Plant Line Value: 35A19
  misc_feature: MA Experiment 108528 PARAMETER Experiment Name: Zm_Imbibed_Seeds_P Parameter: Tissue Value: Aerial vs. Embryo
  misc_feature: MA Experiment ID: 108529 Result: Down-regulated in Transcription
  misc_feature: MA Experiment 108529 PARAMETER Experiment Name: Zm_Imbibed_Seeds_P Parameter: Age (day) Value: 5 vs. 2
  misc_feature: MA Experiment 108529 PARAMETER Experiment Name: Zm_Imbibed_Seeds_P Parameter: Organism Value: Zea mays
  misc_feature: MA Experiment 108529 PARAMETER Experiment Name: Zm_Imbibed_Seeds_P Parameter: Plant Line Value: 35A19
  misc_feature: MA Experiment 108529 PARAMETER Experiment Name: Zm_Imbibed_Seeds_P Parameter: Tissue Value: Roots vs. Embryo
  misc_feature: MA Experiment ID: 108534 Result: Up-regulated in Transcription
  misc_feature: MA Experiment 108534 PARAMETER Experiment Name: Zm_4deg_Cold_P Parameter: Age (hr) Value: 8
  misc_feature: MA Experiment 108534 PARAMETER Experiment Name: Zm_4deg_Cold_P Parameter: Organism Value: Zea mays
  misc_feature: MA Experiment 108534 PARAMETER Experiment Name: Zm_4deg_Cold_P Parameter: Plant Line Value: 35A19
  misc_feature: MA Experiment 108534 PARAMETER Experiment Name: Zm_4deg_Cold_P Parameter: Temperature (deg C) Value: 4 vs. 22
  misc_feature: MA Experiment 108534 PARAMETER Experiment Name: Zm_4deg_Cold_P Parameter: Timepoint (hr) Value: 6
  misc_feature: MA Experiment 108534 PARAMETER Experiment Name: Zm_4deg_Cold_P Parameter: Tissue Value: Aerial
  misc_feature: MA Experiment ID: 108535 Result: Up-regulated in Transcription
  misc_feature: MA Experiment 108535 PARAMETER Experiment Name: Zm_Meristem_P Parameter: Age (day) Value: 8
  misc_feature: MA Experiment 108535 PARAMETER Experiment Name: Zm_Meristem_P Parameter: Organism Value: Zea mays
  misc_feature: MA Experiment 108535 PARAMETER Experiment Name: Zm_Meristem_P Parameter: Plant Line Value: 35A19
  misc_feature: MA Experiment 108535 PARAMETER Experiment Name: Zm_Meristem_P Parameter: Tissue Value: Root Meristem vs. Above Root Meristem
  misc_feature: MA Experiment ID: 108536 Result: Down-regulated in Transcription
  misc_feature: MA Experiment 108536 PARAMETER Experiment Name: Zm_Meristem_P Parameter: Age (day) Value: 8
  misc_feature: MA Experiment 108536 PARAMETER Experiment Name: Zm_Meristem_P Parameter: Organism Value: Zea mays
  misc_feature: MA Experiment 108536 PARAMETER Experiment Name: Zm_Meristem_P Parameter: Plant Line Value: 35A19
  misc_feature: MA Experiment 108536 PARAMETER Experiment Name: Zm_Meristem_P Parameter: Tissue Value: Shoot Meristem vs. Above Shoot Meristem
  misc_feature: MA Experiment ID: 108543 Result: Up-regulated in Transcription
  misc_feature: MA Experiment ID: 108544 Result: Down-regulated in Transcription
  misc_feature: MA Experiment ID: 108546 Result: Down-regulated in Transcription
  misc_feature: MA Experiment 108546 PARAMETER Experiment Name: Zm_Imbibed_Seeds_P Parameter: Age (day) Value: 3 vs. 2
  misc_feature: MA Experiment 108546 PARAMETER Experiment Name: Zm_Imbibed_Seeds_P Parameter: Organism Value: Zea mays
  misc_feature: MA Experiment 108546 PARAMETER Experiment Name: Zm_Imbibed_Seeds_P Parameter: Plant Line Value: 35A19
  misc_feature: MA Experiment 108546 PARAMETER Experiment Name: Zm_Imbibed_Seeds_P Parameter: Tissue Value: Roots vs. Embryo
  misc_feature: MA Experiment ID: 108556 Result: Up-regulated in Transcription
  misc_feature: MA Experiment 108556 PARAMETER Experiment Name: Zm_Drought_P Parameter: Age (day) Value: 9
  misc_feature: MA Experiment 108556 PARAMETER Experiment Name: Zm_Drought_P Parameter: Organism Value: Zea mays
  misc_feature: MA Experiment 108556 PARAMETER Experiment Name: Zm_Drought_P Parameter: Plant Line Value: 35A19
  misc_feature: MA Experiment 108556 PARAMETER Experiment Name: Zm_Drought_P Parameter: Timepoint (hr) Value: 24
  misc_feature: MA Experiment 108556 PARAMETER Experiment Name: Zm_Drought_P Parameter: Tissue Value: Aerial
  misc_feature: MA Experiment 108556 PARAMETER Experiment Name: Zm_Drought_P Parameter: Treatment Value: Drought vs. No Drought
  misc_feature: MA Experiment ID: 108597 Result: Up-regulated in Transcription
  misc_feature: MA Experiment 108597 PARAMETER Experiment Name: Zm_100uM_ABA_P Parameter: Age (day) Value: 9
  misc_feature: MA Experiment 108597 PARAMETER Experiment Name: Zm_100uM_ABA_P Parameter: Organism Value: Zea mays
  misc_feature: MA Experiment 108597 PARAMETER Experiment Name: Zm_100uM_ABA_P Parameter: Plant Line Value: 35A19
  misc_feature: MA Experiment 108597 PARAMETER Experiment Name: Zm_100uM_ABA_P Parameter: Timepoint (hr) Value: 24
  misc_feature: MA Experiment 108597 PARAMETER Experiment Name: Zm_100uM_ABA_P Parameter: Tissue Value: Aerial
  misc_feature: MA Experiment 108597 PARAMETER Experiment Name: Zm_100uM_ABA_P Parameter: Treatment Value: 100uM ABA vs. No Treatment
  misc_feature: MA Experiment ID: 108687 Result: Down-regulated in Transcription
  misc_feature: MA Experiment 108687 PARAMETER Experiment Name: Zm_Embryos-Flowers__P Parameter: Tissue Value: Embryo vs. Aerial+
  misc_feature: MA Experiment ID: 108688 Result: Down-regulated in Transcription
  misc_feature: MA Experiment 108688 PARAMETER Experiment Name: Zm_Embryos-Flowers__P Parameter: Tissue Value: Immature Flowers vs. Aerial+
  misc_feature: MA Experiment ID: 108689 Result: Up-regulated in Transcription
  misc_feature: MA Experiment 108689 PARAMETER Experiment Name: Zm_Drought_Roots_P Parameter: Age (day) Value: 9
  misc_feature: MA Experiment 108689 PARAMETER Experiment Name: Zm_Drought_Roots_P Parameter: Organism Value: Zea mays
  misc_feature: MA Experiment 108689 PARAMETER Experiment Name: Zm_Drought_Roots_P Parameter: Plant Line Value: 35A19
  misc_feature: MA Experiment 108689 PARAMETER Experiment Name: Zm_Drought_Roots_P Parameter: Timepoint (hr) Value: 24
  misc_feature: MA Experiment 108689 PARAMETER Experiment Name: Zm_Drought_Roots_P Parameter: Tissue Value: Roots
  misc_feature: MA Experiment 108689 PARAMETER Experiment Name: Zm_Drought_Roots_P Parameter: Treatment Value: Drought vs. No Drought
  misc_feature: MA Experiment ID: 20000480 Result: Up-regulated in Transcription
  misc_feature: MA Experiment 20000480 PARAMETER Experiment Name: Zm_Drought_P Parameter: Age (day) Value: 11
  misc_feature: MA Experiment 20000480 PARAMETER Experiment Name: Zm_Drought_P Parameter: Organism Value: Zea mays
  misc_feature: MA Experiment 20000480 PARAMETER Experiment Name: Zm_Drought_P Parameter: Plant Line Value: 35A19
  misc_feature: MA Experiment 20000480 PARAMETER Experiment Name: Zm_Drought_P Parameter: Timepoint (hr) Value: 72
  misc_feature: MA Experiment 20000480 PARAMETER Experiment Name: Zm_Drought_P Parameter: Tissue Value: Aerial
  misc_feature: MA Experiment 20000480 PARAMETER Experiment Name: Zm_Drought_P Parameter: Treatment Value: Drought vs. No Drought
  misc_feature: MA Experiment ID: 20000487 Result: Down-regulated in Transcription
  misc_feature: MA Experiment 20000487 PARAMETER Experiment Name: Zm_50mM_NH4NO3_L_to_H_P Parameter: Organism Value: Zea mays
  misc_feature: MA Experiment 20000487 PARAMETER Experiment Name: Zm_50mM_NH4NO3_L_to_H_P Parameter: Timepoint (hr) Value: 4
  misc_feature: MA Experiment 20000487 PARAMETER Experiment Name: Zm_50mM_NH4NO3_L_to_H_P Parameter: Tissue Value: Leaves
  misc_feature: MA Experiment 20000487 PARAMETER Experiment Name: Zm_50mM_NH4NO3_L_to_H_P Parameter: Treatment Value: 50mM NH4NO3 vs. 100mM Mannitol
  misc_feature: MA Experiment ID: 20000626 Result: Down-regulated in Transcription
  misc_feature: MA Experiment 20000626 PARAMETER Experiment Name: Zm_Herbicide-Treatments_P Parameter: Timepoint (hr) Value: 12
  misc_feature: MA Experiment 20000626 PARAMETER Experiment Name: Zm_Herbicide-Treatments_P Parameter: Tissue Value: Aerial
  misc_feature: MA Experiment 20000626 PARAMETER Experiment Name: Zm_Herbicide-Treatments_P Parameter: Treatment Value: Roundup vs. No Treatment
  misc_feature: MA Experiment ID: 20000627 Result: Down-regulated in Transcription
  misc_feature: MA Experiment 20000627 PARAMETER Experiment Name: Zm_Herbicide-Treatments_P Parameter: Timepoint (hr) Value: 12
  misc_feature: MA Experiment 20000627 PARAMETER Experiment Name: Zm_Herbicide-Treatments_P Parameter: Tissue Value: Aerial
  misc_feature: MA Experiment 20000627 PARAMETER Experiment Name: Zm_Herbicide-Treatments_P Parameter: Treatment Value: Finale vs. No Treatment
  misc_feature: MA Experiment ID: 20000628 Result: Down-regulated in Transcription
  misc_feature: MA Experiment 20000628 PARAMETER Experiment Name: Zm_Herbicide-Treatments_P Parameter: Timepoint (hr) Value: 12
  misc_feature: MA Experiment 20000628 PARAMETER Experiment Name: Zm_Herbicide-Treatments_P Parameter: Tissue Value: Aerial
  misc_feature: MA Experiment 20000628 PARAMETER Experiment Name: Zm_Herbicide-Treatments_P Parameter: Treatment Value: Glean vs. No Treatment
  misc_feature: MA Experiment ID: 20000629 Result: Down-regulated in Transcription
  misc_feature: MA Experiment 20000629 PARAMETER Experiment Name: Zm_Herbicide-Treatments_P Parameter: Timepoint (hr) Value: 12
  misc_feature: MA Experiment 20000629 PARAMETER Experiment Name: Zm_Herbicide-Treatments_P Parameter: Tissue Value: Aerial
  misc_feature: MA Experiment 20000629 PARAMETER Experiment Name: Zm_Herbicide-Treatments_P Parameter: Treatment Value: Trimec vs. No Treatment
  misc_feature: MA Experiment ID: 20001614 Result: Up-regulated in Transcription
  misc_feature: MA Experiment 20001614 PARAMETER Experiment Name: Zm_50ppm_KNO3_L-to-H_P Parameter: Age (day) Value: 21
  misc_feature: MA Experiment 20001614 PARAMETER Experiment Name: Zm_50ppm_KNO3_L-to-H_P Parameter: Organism Value: Zea mays
  misc_feature: MA Experiment 20001614 PARAMETER Experiment Name: Zm_50ppm_KNO3_L-to-H_P Parameter: Plant Line Value: 35A19
  misc_feature: MA Experiment 20001614 PARAMETER Experiment Name: Zm_50ppm_KNO3_L-to-H_P Parameter: Timepoint (hr) Value: 48
  misc_feature: MA Experiment 20001614 PARAMETER Experiment Name: Zm_50ppm_KNO3_L-to-H_P Parameter: Tissue Value: Roots
  misc_feature: MA Experiment 20001614 PARAMETER Experiment Name: Zm_50ppm_KNO3_L-to-H_P Parameter: Treatment Value: 50ppm KNO3 vs. 50ppm KCl
gcacgagaccattacctagaacatcctaatcgaaaaatagaactagagccagctccttgttgcccatggccatgacgagagcactggccatggtggccatgttggccactgctgccttgttcttcatgtccgctcgcgcacagcagtgcggtatgcaggccggcggcgcgctctgccccgactgcctctgctgcagccagtggggctattgcggctccactcccgactactgtaccggcggctgccagagccagtgcatcggcagcggctgcggcggcggcggcggtggtacccctgctactcccccgagcggcccggtgtctgaaatcatctccgagtccctgttcaacgagatgctgctgcaccgcaacgacgtggcgtgcccggccaccggcttctacacctacgacgcgttcatcgcggccgcgaacgcgttcccgggcttcggcaccacgggcggcgccgacacgcagaagcgcgagctggcggcgttcctggcgcagacgtcgcacgagaccacgggcgggtgggacacggcgcccgacgggccctacacctgggcctactgcttcaaggaggaggtcggcggcgtgtgggggccggactactgccagcccagcccccagtggccgtgcgccgacggccagaagtactacggccgcgggcccatccagctatcctggaactacaactacgggcccgccggggaggccatcggccaggaccttctgggcaacccaggtctggttgccgccgactccactgtctccttcgagacggcgctctggtactggatgacggccgcagccgcccaagccgtcctgccacgacgtcatcacgggccagtgggcgccctcgcccgacgacgtggccgcagggaggctgccggggtatggcgtcctcaccaacatcatcaacggcggcctcgagtgcggccacggcgccgacgctcgtgttgccagccggatcggcttctacaaacgctactgcgacatgtttggtctcagctacggcgacaacttggactgctacgaccagagccccttcggaaacacaatcttaagcaccaccaataataccacctcatatcacgttgacgcctaataagtaacaagagctacctgttactacaactgcaagacacagacatcgtgtagtgcacatgtgcgtcaaatctctaaactttgtacacccagaataaaactctgtaatctgaaactttgcacacccagaataaaagttttcgatttcaaactcc

SEQ ID NO: 15841 - protein, 336 aa, Zea mays subsp. mays
  peptide (1)..(336): Ceres Seq. ID no. 12382153
  misc_feature (25)..(64): Pfam Name: Chitin recognition protein Pfam Description: Chitin recognition protein
  misc_feature (5)..(245): Homolog of NCBI NO: 116317 NR Description: BASIC ENDOCHITINASE 2 PRECURSOR
  misc_feature (5)..(275): Homolog of NCBI NO: 12407647 NR Description: 31.7 kDa class I endochitinase-antifreeze protein
  misc_feature (5)..(275): Homolog of NCBI NO: 18146829 NR Description: chitinase 3 [Triticum aestivum]
  misc_feature (5)..(275): Homolog of NCBI NO: 38112709 NR Description: class I chitinase [Triticum aestivum]
  misc_feature (26)..(275): Homolog of NCBI NO: 20202 NR Description: chitinase [Oryza sativa (japonica cultivar-group)]
  misc_feature (22)..(275): Homolog of NCBI NO: 383024 NR Description: chitinase
  misc_feature (5)..(275): Homolog of NCBI NO: 481478 NR Description: chitinase (EC 3.2.1.14) - wheat
  misc_feature (5)..(245): Homolog of NCBI NO: 500617 NR Description: endochitinase [Oryza sativa (japonica
  misc_feature (5)..(275): Homolog of NCBI NO: 7435363 NR Description: chitinase (EC 3.2.1.14) - rice
  misc_feature (5)..(245): Homolog of NCBI NO: 31126701 NR Description: putative endochitinase [Oryza sativa (japonica
MAMTRALAMVAMLATAALFFMSARAQQCGMQAGGALCPDCLCCSQWGYCGSTPDYCTGGCQSQCIGSGCGGGGGGTPATPPSGPVSEIISESLFNEMLLHRNDVACPATGFYTYDAFIAAANAFPGFGTTGGADTQKRELAAFLAQTSHETTGGWDTAPDGPYTWAYCFKEEVGGVWGPDYCQPSPQWPCADGQKYYGRGPIQLSWNYNYGPAGEAIGQDLLGNPGLVAADSTVSFETALWYWMTAAAAQAVLPRRHHGPVGALARRRGRREAAGVWRPHQHHQRRPRVRPRRRRSCCQPDRLLQTLLRHVWSQLRRQLGLLRPEPLRKHNLKHHQ

SEQ ID NO: 15842 - protein, 334 aa, Zea mays subsp. mays
  peptide (1)..(334): Ceres Seq. ID no. 12382154
  misc_feature (23)..(62): Pfam Name: Chitin recognition protein Pfam Description: Chitin recognition protein
  misc_feature (3)..(243): Homolog of NCBI NO: 116317 NR Description: BASIC ENDOCHITINASE 2 PRECURSOR
  misc_feature (3)..(273): Homolog of NCBI NO: 12407647 NR Description: 31.7 kDa class I endochitinase-antifreeze protein
  misc_feature (3)..(273): Homolog of NCBI NO: 18146829 NR Description: chitinase 3 [Triticum aestivum]
  misc_feature (3)..(273): Homolog of NCBI NO: 38112709 NR Description: class I chitinase [Triticum aestivum]
  misc_feature (24)..(273): Homolog of NCBI NO: 20202 NR Description: chitinase [Oryza sativa (japonica cultivar-group)]
  misc_feature (20)..(273): Homolog of NCBI NO: 383024 NR Description: chitinase
  misc_feature (3)..(273): Homolog of NCBI NO: 481478 NR Description: chitinase (EC 3.2.1.14) - wheat
  misc_feature (3)..(243): Homolog of NCBI NO: 500617 NR Description: endochitinase [Oryza sativa (japonica
  misc_feature (3)..(273): Homolog of NCBI NO: 7435363 NR Description: chitinase (EC 3.2.1.14) - rice
  misc_feature (3)..(243): Homolog of NCBI NO: 31126701 NR Description: putative endochitinase [Oryza sativa (japonica
MTRALAMVAMLATAALFFMSARAQQCGMQAGGALCPDCLCCSQWGYCGSTPDYCTGGCQSQCIGSGCGGGGGGTPATPPSGPVSEIISESLFNEMLLHRNDVACPATGFYTYDAFIAAANAFPGFGTTGGADTQKRELAAFLAQTSHETTGGWDTAPDGPYTWAYCFKEEVGGVWGPDYCQPSPQWPCADGQKYYGRGPIQLSWNYNYGPAGEAIGQDLLGNPGLVAADSTVSFETALWYWMTAAAAQAVLPRRHHGPVGALARRRGRREAAGVWRPHQHHQRRPRVRPRRRRSCCQPDRLLQTLLRHVWSQLRRQLGLLRPEPLRKHNLKHHQ

SEQ ID NO: 15843 - protein, 328 aa, Zea mays subsp. mays
  peptide (1)..(328): Ceres Seq. ID no. 12382155
  misc_feature (17)..(56): Pfam Name: Chitin recognition protein Pfam Description: Chitin recognition protein
  misc_feature (1)..(237): Homolog of NCBI NO: 116317 NR Description: BASIC ENDOCHITINASE 2 PRECURSOR
  misc_feature (1)..(267): Homolog of NCBI NO: 12407647 NR Description: 31.7 kDa class I endochitinase-antifreeze protein
  misc_feature (1)..(267): Homolog of NCBI NO: 18146829 NR Description: chitinase 3 [Triticum aestivum]
  misc_feature (1)..(267): Homolog of NCBI NO: 38112709 NR Description: class I chitinase [Triticum aestivum]
  misc_feature (18)..(267): Homolog of NCBI NO: 20202 NR Description: chitinase [Oryza sativa (japonica cultivar-group)]
  misc_feature (14)..(267): Homolog of NCBI NO: 383024 NR Description: chitinase
  misc_feature (1)..(267): Homolog of NCBI NO: 481478 NR Description: chitinase (EC 3.2.1.14) - wheat
  misc_feature (1)..(237): Homolog of NCBI NO: 500617 NR Description: endochitinase [Oryza sativa (japonica
  misc_feature (1)..(267): Homolog of NCBI NO: 7435363 NR Description: chitinase (EC 3.2.1.14) - rice
  misc_feature (1)..(237): Homolog of NCBI NO: 31126701 NR Description: putative endochitinase [Oryza sativa (japonica
MVAMLATAALFFMSARAQQCGMQAGGALCPDCLCCSQWGYCGSTPDYCTGGCQSQCIGSGCGGGGGGTPATPPSGPVSEIISESLFNEMLLHRNDVACPATGFYTYDAFIAAANAFPGFGTTGGADTQKRELAAFLAQTSHETTGGWDTAPDGPYTWAYCFKEEVGGVWGPDYCQPSPQWPCADGQKYYGRGPIQLSWNYNYGPAGEAIGQDLLGNPGLVAADSTVSFETALWYWMTAAAAQAVLPRRHHGPVGALARRRGRREAAGVWRPHQHHQRRPRVRPRRRRSCCQPDRLLQTLLRHVWSQLRRQLGLLRPEPLRKHNLKHHQ

SEQ ID NO: 15844 - DNA, 1340 bp, Zea mays subsp. mays
  misc_feature (1)..(1340): Ceres Seq. ID no. 12373073
  misc_feature: MA Experiment ID: 20000535 Result: Up-regulated in Transcription
  misc_feature: MA Experiment 20000535 PARAMETER Experiment Name: Zm_Hybrid_Seed_Dev_P Parameter: DAP Value: 30 vs. 12
  misc_feature: MA Experiment 20000535 PARAMETER Experiment Name: Zm_Hybrid_Seed_Dev_P Parameter: Organism Value: Zea mays
  misc_feature: MA Experiment 20000535 PARAMETER Experiment Name: Zm_Hybrid_Seed_Dev_P Parameter: Plant Line Value: 35A19
  misc_feature: MA Experiment 20000535 PARAMETER Experiment Name: Zm_Hybrid_Seed_Dev_P Parameter: Tissue Value: Embryo vs. Unfert Floret
atagatcgatcacacagcctgcaggcacagacaagagttaggctgttctacctgatcatatgaccctccagcaattctctcatccacacacaaactgaagcaagaattattgcttatctatatcctgtctgtcctttcctctatttcccccctcccctttctatttccattgtgcagcttgttattagtagatagcagtggatcgatgtgtgatggaggaaacaagctagctagctagctaccagctgaagcagcagggagaagaaggatagagagagagagagagagaaaacatcttcttcatccatagtctcggcctttcttcaccaggtcgtctgcagatctgtctcctgtgaccttccagaggccaagctaggccaggaaggaaaaatggcgtccccgtcgagcaccagcaacaactcggccttctcccctgtggcggcgtcggccgggacgacgatgcctggtgccggggcgccgtgcgcggcgtgcaagttcctgcggcgcaagtgcctgccggggtgcgtgttcgcgccctacttcccgccggaggagccgcagaagttcgccaacgtgcacaaggtgttcggcgccagcaacgtgaccaagctgctgaacgagctgctgccgcaccagcgggaggacgccgtgagctcgctcgcctacgaggccgaggcgcgcgtcaaggaccccgtctacggctgcgtcggcgccatctccgtgctgcagcgccaggtccaccgcctccagaaggagctggacgccgcgcacgccgagctcctccgctacgcctgcggcgacgtcgccgccggcatccccaccgcgctccccgtcgtcagcgccgcccccaggctctccacggcgccaatgacgacgacgagccccggccagttcgccgccggcatgtacggcagcggcaggaggcttggggtcgtcgacggactagcagcgccaccgctgcctccgtcgggcggcggcggcggctgctacttcatgcggaaccaccacaacaacgtcgtcattagtagctccccaggcgctgacgtggcgcccgtcctgccttacgcttccgtggctaattgggcggtgaatgccatcagcgcgtcgacgaccaccacctccggatcagagagcattgggttggatcacaaggaagagggagacagcagcatgtgaagtgaagggaagcgctgcgctgccgtgaatggtaaggcgctgtttgtttctctctgagtaattttaattctgcacggcggccatgcccatgcatgatgtatagctactgtatgtgctagctagtttgtgtgttttaattatatacatatatagctgttcttatc

SEQ ID NO: 15845 - protein, 261 aa, Zea mays subsp. mays
  peptide (1)..(261): Ceres Seq. ID no. 12373074
  misc_feature (30)..(130): Pfam Name: Protein of unknown function DUF260 Pfam Description: Protein of unknown function DUF260
  misc_feature (27)..(171): Homolog of NCBI NO: 15227870 NR Description: hypothetical protein; protein id: At2g23660.1
  misc_feature (24)..(164): Homolog of NCBI NO: 15240110 NR Description: putative protein; protein id: At5g66870.1
  misc_feature (29)..(140): Homolog of NCBI NO: 15218746 NR Description: unknown protein
  misc_feature (3)..(220): Homolog of NCBI NO: 34907508 NR Description: B1099D03.24 [Oryza sativa (japonica
  misc_feature (29)..(134): Homolog of NCBI NO: 21618134 NR Description: unknown [Arabidopsis thaliana]
  misc_feature (29)..(134): Homolog of NCBI NO: 29427827 NR Description: LOB domain protein 25
  misc_feature (29)..(134): Homolog of NCBI NO: 18405472 NR Description: expressed protein
  misc_feature (29)..(134): Homolog of NCBI NO: 9294470 NR Description: gb|AAB60912.1~gene_id:MGF10.6~similar to unknown
  misc_feature (29)..(143): Homolog of NCBI NO: 15242624 NR Description: putative protein
  misc_feature (1)..(261): Homolog of NCBI NO: 34896184 NR Description: contains ESTs C98868(E3203),C98869(E3203)~similar
MASPSSTSNNSAFSPVAASAGTTMPGAGAPCAACKFLRRKCLPGCVFAPYFPPEEPQKFANVHKVFGASNVTKLLNELLPHQREDAVSSLAYEAEARVKDPVYGCVGAISVLQRQVHRLQKELDAAHAELLRYACGDVAAGIPTALPVVSAAPRLSTAPMTTTSPGQFAAGMYGSGRRLGVVDGLAAPPLPPSGGGGGCYFMRNHHNNVVISSSPGADVAPVLPYASVANWAVNAISASTTTTSGSESIGLDHKEEGDSSM

SEQ ID NO: 15846 - protein, 238 aa, Zea mays subsp. mays
  peptide (1)..(238): Ceres Seq. ID no. 12373075
  misc_feature (7)..(107): Pfam Name: Protein of unknown function DUF260 Pfam Description: Protein of unknown function DUF260
  misc_feature (4)..(148): Homolog of NCBI NO: 15227870 NR Description: hypothetical protein; protein id: At2g23660.1
  misc_feature (1)..(141): Homolog of NCBI NO: 15240110 NR Description: putative protein; protein id: At5g66870.1
  misc_feature (6)..(117): Homolog of NCBI NO: 15218746 NR Description: unknown protein
  misc_feature (1)..(197): Homolog of NCBI NO: 34907508 NR Description: B1099D03.24 [Oryza sativa (japonica
  misc_feature (6)..(111): Homolog of NCBI NO: 21618134 NR Description: unknown [Arabidopsis thaliana]
  misc_feature (6)..(111): Homolog of NCBI NO: 18405472 NR Description: expressed protein
  misc_feature (6)..(111): Homolog of NCBI NO: 29427827 NR Description: LOB domain protein 25
  misc_feature (6)..(111): Homolog of NCBI NO: 9294470 NR Description: gb|AAB60912.1~gene_id:MGF10.6~similar to unknown
  misc_feature (6)..(120): Homolog of NCBI NO: 15242624 NR Description: putative protein
  misc_feature (1)..(238): Homolog of NCBI NO: 34896184 NR Description: contains ESTs C98868(E3203),C98869(E3203)~similar
MPGAGAPCAACKFLRRKCLPGCVFAPYFPPEEPQKFANVHKVFGASNVTKLLNELLPHQREDAVSSLAYEAEARVKDPVYGCVGAISVLQRQVHRLQKELDAAHAELLRYACGDVAAGIPTALPVVSAAPRLSTAPMTTTSPGQFAAGMYGSGRRLGVVDGLAAPPLPPSGGGGGCYFMRNHHNNVVISSSPGADVAPVLPYASVANWAVNAISASTTTTSGSESIGLDHKEEGDSSM

SEQ ID NO: 15847 - DNA, 1870 bp, Zea mays subsp. mays
  misc_feature (1)..(1870): Ceres Seq. ID no. 12406420
  misc_feature: MA Experiment ID: 108504 Result: Up-regulated in Transcription
  misc_feature: MA Experiment 108504 PARAMETER Experiment Name: Zm_Drought_P Parameter: Age (day) Value: 8
  misc_feature: MA Experiment 108504 PARAMETER Experiment Name: Zm_Drought_P Parameter: Organism Value: Zea mays
  misc_feature: MA Experiment 108504 PARAMETER Experiment Name: Zm_Drought_P Parameter: Plant Line Value: 35A19
  misc_feature: MA Experiment 108504 PARAMETER Experiment Name: Zm_Drought_P Parameter: Timepoint (hr) Value: 12
  misc_feature: MA Experiment 108504 PARAMETER Experiment Name: Zm_Drought_P Parameter: Tissue Value: Aerial
  misc_feature: MA Experiment 108504 PARAMETER Experiment Name: Zm_Drought_P Parameter: Treatment Value: Drought vs. No Drought
  misc_feature: MA Experiment ID: 108522 Result: Up-regulated in Transcription
  misc_feature: MA Experiment 108522 PARAMETER Experiment Name: Zm_42deg_Heat_P Parameter: Age (day) Value: 8
  misc_feature: MA Experiment 108522 PARAMETER Experiment Name: Zm_42deg_Heat_P Parameter: Organism Value: Zea mays
  misc_feature: MA Experiment 108522 PARAMETER Experiment Name: Zm_42deg_Heat_P Parameter: Plant Line Value: 35A19
  misc_feature: MA Experiment 108522 PARAMETER Experiment Name: Zm_42deg_Heat_P Parameter: Temperature (deg C) Value: 42 vs. 22
  misc_feature: MA Experiment 108522 PARAMETER Experiment Name: Zm_42deg_Heat_P Parameter: Timepoint (hr) Value: 1
  misc_feature: MA Experiment 108522 PARAMETER Experiment Name: Zm_42deg_Heat_P Parameter: Tissue Value: Aerial
  misc_feature: MA Experiment ID: 108523 Result: Up-regulated in Transcription
  misc_feature: MA Experiment 108523 PARAMETER Experiment Name: Zm_42deg_Heat_P Parameter: Age (day) Value: 8
  misc_feature: MA Experiment 108523 PARAMETER Experiment Name: Zm_42deg_Heat_P Parameter: Organism Value: Zea mays
  misc_feature: MA Experiment 108523 PARAMETER Experiment Name: Zm_42deg_Heat_P Parameter: Plant Line Value: 35A19
  misc_feature: MA Experiment 108523 PARAMETER Experiment Name: Zm_42deg_Heat_P Parameter: Temperature (deg C) Value: 42 vs. 22
  misc_feature: MA Experiment 108523 PARAMETER Experiment Name: Zm_42deg_Heat_P Parameter: Timepoint (hr) Value: 6
  misc_feature: MA Experiment 108523 PARAMETER Experiment Name: Zm_42deg_Heat_P Parameter: Tissue Value: Aerial
  misc_feature: MA Experiment ID: 108527 Result: Up-regulated in Transcription
  misc_feature: MA Experiment 108527 PARAMETER Experiment Name: Zm_5mM_NO_P Parameter: Age (day) Value: 8
  misc_feature: MA Experiment 108527 PARAMETER Experiment Name: Zm_5mM_NO_P Parameter: Organism Value: Zea mays
  misc_feature: MA Experiment 108527 PARAMETER Experiment Name: Zm_5mM_NO_P Parameter: Plant Line Value: 35A19
  misc_feature: MA Experiment 108527 PARAMETER Experiment Name: Zm_5mM_NO_P Parameter: Timepoint (hr) Value: 6
  misc_feature: MA Experiment 108527 PARAMETER Experiment Name: Zm_5mM_NO_P Parameter: Tissue Value: Aerial
  misc_feature: MA Experiment 108527 PARAMETER Experiment Name: Zm_5mM_NO_P Parameter: Treatment Value: 5mM NO vs. No Treatment
  misc_feature: MA Experiment ID: 108529 Result: Up-regulated in Transcription
  misc_feature: MA Experiment 108529 PARAMETER Experiment Name: Zm_Imbibed_Seeds_P Parameter: Age (day) Value: 5 vs. 2
  misc_feature: MA Experiment 108529 PARAMETER Experiment Name: Zm_Imbibed_Seeds_P Parameter: Organism Value: Zea mays
  misc_feature: MA Experiment 108529 PARAMETER Experiment Name: Zm_Imbibed_Seeds_P Parameter: Plant Line Value: 35A19
  misc_feature: MA Experiment 108529 PARAMETER Experiment Name: Zm_Imbibed_Seeds_P Parameter: Tissue Value: Roots vs. Embryo
  misc_feature: MA Experiment ID: 108543 Result: Up-regulated in Transcription
  misc_feature: MA Experiment ID: 108544 Result: Up-regulated in Transcription
  misc_feature: MA Experiment ID: 108556 Result: Up-regulated in Transcription
  misc_feature: MA Experiment 108556 PARAMETER Experiment Name: Zm_Drought_P Parameter: Age (day) Value: 9
  misc_feature: MA Experiment 108556 PARAMETER Experiment Name: Zm_Drought_P Parameter: Organism Value: Zea mays
  misc_feature: MA Experiment 108556 PARAMETER Experiment Name: Zm_Drought_P Parameter: Plant Line Value: 35A19
  misc_feature: MA Experiment 108556 PARAMETER Experiment Name: Zm_Drought_P Parameter: Timepoint (hr) Value: 24
  misc_feature: MA Experiment 108556 PARAMETER Experiment Name: Zm_Drought_P Parameter: Tissue Value: Aerial
  misc_feature: MA Experiment 108556 PARAMETER Experiment Name: Zm_Drought_P Parameter: Treatment Value: Drought vs. No Drought
  misc_feature: MA Experiment ID: 108559 Result: Up-regulated in Transcription
  misc_feature: MA Experiment 108559 PARAMETER Experiment Name: Zm_5mM_NO_P Parameter: Age (day) Value: 8
  misc_feature: MA Experiment 108559 PARAMETER Experiment Name: Zm_5mM_NO_P Parameter: Organism Value: Zea mays
  misc_feature: MA Experiment 108559 PARAMETER Experiment Name: Zm_5mM_NO_P Parameter: Plant Line Value: 35A19
  misc_feature: MA Experiment 108559 PARAMETER Experiment Name: Zm_5mM_NO_P Parameter: Timepoint (hr) Value: 12
  misc_feature: MA Experiment 108559 PARAMETER Experiment Name: Zm_5mM_NO_P Parameter: Tissue Value: Aerial
  misc_feature: MA Experiment 108559 PARAMETER Experiment Name: Zm_5mM_NO_P Parameter: Treatment Value: 5mM NO vs. No Treatment
  misc_feature: MA Experiment ID: 108597 Result: Up-regulated in Transcription
  misc_feature: MA Experiment 108597 PARAMETER Experiment Name: Zm_100uM_ABA_P Parameter: Age (day) Value: 9
  misc_feature: MA Experiment 108597 PARAMETER Experiment Name: Zm_100uM_ABA_P Parameter: Organism Value: Zea mays
  misc_feature: MA Experiment 108597 PARAMETER Experiment Name: Zm_100uM_ABA_P Parameter: Plant Line Value: 35A19
  misc_feature: MA Experiment 108597 PARAMETER Experiment Name: Zm_100uM_ABA_P Parameter: Timepoint (hr) Value: 24
  misc_feature: MA Experiment 108597 PARAMETER Experiment Name: Zm_100uM_ABA_P Parameter: Tissue Value: Aerial
  misc_feature: MA Experiment 108597 PARAMETER Experiment Name: Zm_100uM_ABA_P Parameter: Treatment Value: 100uM ABA vs. No Treatment
  misc_feature: MA Experiment ID: 20000478 Result: Up-regulated in Transcription
  misc_feature: MA Experiment 20000478 PARAMETER Experiment Name: Zm_5mM_SA_P Parameter: Age (day) Value: 11
  misc_feature: MA Experiment 20000478 PARAMETER Experiment Name: Zm_5mM_SA_P Parameter: Organism Value: Zea mays
  misc_feature: MA Experiment 20000478 PARAMETER Experiment Name: Zm_5mM_SA_P Parameter: Plant Line Value: 35A19
  misc_feature: MA Experiment 20000478 PARAMETER Experiment Name: Zm_5mM_SA_P Parameter: Timepoint (hr) Value: 72
  misc_feature: MA Experiment 20000478 PARAMETER Experiment Name: Zm_5mM_SA_P Parameter: Tissue Value: Aerial
  misc_feature: MA Experiment 20000478 PARAMETER Experiment Name: Zm_5mM_SA_P Parameter: Treatment Value: 5mM SA vs. No Treatment
  misc_feature: MA Experiment ID: 20000480 Result: Up-regulated in Transcription
  misc_feature: MA Experiment 20000480 PARAMETER Experiment Name: Zm_Drought_P Parameter: Age (day) Value: 11
  misc_feature: MA Experiment 20000480 PARAMETER Experiment Name: Zm_Drought_P Parameter: Organism Value: Zea mays
  misc_feature: MA Experiment 20000480 PARAMETER Experiment Name: Zm_Drought_P Parameter: Plant Line Value: 35A19
  misc_feature: MA Experiment 20000480 PARAMETER Experiment Name: Zm_Drought_P Parameter: Timepoint (hr) Value: 72
  misc_feature: MA Experiment 20000480 PARAMETER Experiment Name: Zm_Drought_P Parameter: Tissue Value: Aerial
  misc_feature: MA Experiment 20000480 PARAMETER Experiment Name: Zm_Drought_P Parameter: Treatment Value: Drought vs. No Drought
  misc_feature: MA Experiment ID: 20000492 Result: Down-regulated in Transcription
  misc_feature: MA Experiment 20000492 PARAMETER Experiment Name: Zm_Hybrid_Seed_Dev_P Parameter: DAP Value: 12
  misc_feature: MA Experiment 20000492 PARAMETER Experiment Name: Zm_Hybrid_Seed_Dev_P Parameter: Organism Value: Zea mays
  misc_feature: MA Experiment 20000492 PARAMETER Experiment Name: Zm_Hybrid_Seed_Dev_P Parameter: Plant Line Value: 35A19
  misc_feature: MA Experiment 20000492 PARAMETER Experiment Name: Zm_Hybrid_Seed_Dev_P Parameter: Tissue Value: Fert Kernel vs. Unfert Floret
  misc_feature: MA Experiment ID: 20000535 Result: Down-regulated in Transcription
  misc_feature: MA Experiment 20000535 PARAMETER Experiment Name: Zm_Hybrid_Seed_Dev_P Parameter: DAP Value: 30 vs. 12
  misc_feature: MA Experiment 20000535 PARAMETER Experiment Name: Zm_Hybrid_Seed_Dev_P Parameter: Organism Value: Zea mays
  misc_feature: MA Experiment 20000535 PARAMETER Experiment Name: Zm_Hybrid_Seed_Dev_P Parameter: Plant Line Value: 35A19
  misc_feature: MA Experiment 20000535 PARAMETER Experiment Name: Zm_Hybrid_Seed_Dev_P Parameter: Tissue Value: Embryo vs. Unfert Floret
  misc_feature: MA Experiment ID: 20000627 Result: Up-regulated in Transcription
  misc_feature: MA Experiment 20000627 PARAMETER Experiment Name: Zm_Herbicide-Treatments_P Parameter: Timepoint (hr) Value: 12
  misc_feature: MA Experiment 20000627 PARAMETER Experiment Name: Zm_Herbicide-Treatments_P Parameter: Tissue Value: Aerial
  misc_feature: MA Experiment 20000627 PARAMETER Experiment Name: Zm_Herbicide-Treatments_P Parameter: Treatment Value: Finale vs. No Treatment
acgctctcgcgagtcgcgacgacatcctccgcggagcttgcgcgggtacggcacggagatggccgcggccgggccgacgacgtccccggccacggcgggcgccgtggaggagctcacgcggctgtaccgggagctgccgccgcgcccggccgtggaggaggtggaggcggcggcggcggtgctggcgtcggcggccgcggaggaggaggcgcgcctcgccggagatcgacagggaggaggcgctggcgcgcgggggcgcgccgcccgagctcctcgacgtgctgtgggaggcccggcgcagctccgtgcgcctccgcgcgctgcagcagcgcaaggaggccgcgcacgtcctcgagctcgagaggcggttcaggctcttcgacgacctcatccagcgggcgtcgcgtcttctgtcccccggcggtggtgccggggccaggagcggcacaggtggtgccgcggtggaccacgacgaggtcgtcgaggtcgacgccacccggaacacggagctggacgccgcgccagccgagattggtcgcgggagcaagggcggcttgggactggaacccaagtccgtctcgtcgctgcgtcgtgctgcttcggcaggtactgacacagaaaagctgggccttatccaagtggcaagccttatagagtcatcggcaaagaaggggactacagagctcaatctccggggtaagctggtggaccaagttgaatggctccctgtctcgcttgggaagttacaggatgtgactgagcttgatctatctgagaataggatcatggcactcccatcaacaattggtagccttagatacttgacaaagctcgacctccactcaaaccagctgatcaatctgcctgataccttcggggaactttccagcctgattgatcttgacttgcgtgcaaaccagctaaagtctcttcctacatcatttggaaatctcacgagcctcgccaatcttgacctgagctcgaatctgttgaaggtccttcctgattgtttaggaaagttgaaaaacttgagaaggttaattgctgagacgaatgagcttgaggagctaccctatactattggatcgtgcacctctctcgtggagcttagactggattttaatcagctcaaagccctcccagaagccattgggaagttggaaaacctggaaatcctgacgttacactacaatagaatcaaaggcctgcctacaacaattggccatcttaccaggttgagggagctggatgtcagtttcaacgaagttgagactatacctgagaacatttgctttgcagccagccttgtgaagttgaatgtcagcaggaactttgccgacttaagagccctgccaaaatcaataggggaacttgagatgctagaggagctggacatcagtatcaaccagatacgagtgcttccagactcttttgggcatctctcaaagctacgtgtgtttcatgctgatgaaactccactggaagtaccgcccaaagaagttgtaaagctaggggctcaggagctggttaattatatgaagaatatggttgctgcaagggaagtgagccagaatcaaacagataagaggagcttctggacctggctccgctcactgtttggttgttacaaaaagaatcaaggattgggaccagttccagcctagctgaaccatatcgtccgcatgtattgtcatgaattattcagttttgctccatctctcaagtcagcgacgaaatgaggcatgactactattattatttcaactttatgtttgtgtatacaatggataaatattgtagcgctttcttgtacataagattaggttatgtgtaagttcatctgtacgaaacactatcatgttaatccatg

SEQ ID NO: 15848 - protein, 553 aa, Zea mays subsp. mays
  peptide (1)..(553): Ceres Seq. ID no. 12406421
  misc_feature (18)..(75): Pfam Name: TT viral orf 1 Pfam Description: TT viral orf 1
  misc_feature (200)..(512): Homolog of NCBI NO: 12321872 NR Description: hypothetical protein; 91861-89496 [Arabidopsis
  misc_feature (169)..(503): Homolog of NCBI NO: 24215150 NR Description: putative outermembrane protein
  misc_feature (241)..(525): Homolog of NCBI NO: 24216020 NR Description: Leucine-rich repeat containing protein
  misc_feature (149)..(529): Homolog of NCBI NO: 15239256 NR Description: putative protein; protein id: At5g05850.1
  misc_feature (249)..(512): Homolog of NCBI NO: 22330985 NR Description: hypothetical protein
  misc_feature (79)..(147): Homolog of NCBI NO: 15237011 NR Description: putative protein
  misc_feature (184)..(532): Homolog of NCBI NO: 15237011 NR Description: putative protein
  misc_feature (75)..(541): Homolog of NCBI NO: 15227838 NR Description: unknown protein; protein id: At2g17440.1
  misc_feature (87)..(532): Homolog of NCBI NO: 20148766 NR Description: PSR9 [Brassica nigra]
  misc_feature (68)..(551): Homolog of NCBI NO: 37537048 NR Description: putative leucine-rich repeat protein
ALASRDDILRGACAGTARRWPRPGRRRPRPRRAPWRSSRGCTGSCRRARPWRRWRRRRRCWRRRPRRRRRASPEIDREEALARGGAPPELLDVLWEARRSSVRLRALQQRKEAAHVLELERRFRLFDDLIQRASRLLSPGGGAGARSGTGGAAVDHDEVVEVDATRNTELDAAPAEIGRGSKGGLGLEPKSVSSLRRAASAGTDTEKLGLIQVASLIESSAKKGTTELNLRGKLVDQVEWLPVSLGKLQDVTELDLSENRIMALPSTIGSLRYLTKLDLHSNQLINLPDTFGELSSLIDLDLRANQLKSLPTSFGNLTSLANLDLSSNLLKVLPDCLGKLKNLRRLIAETNELEELPYTIGSCTSLVELRLDFNQLKALPEAIGKLENLEILTLHYNRIKGLPTTIGHLTRLRELDVSFNEVETIPENICFAASLVKLNVSRNFADLRALPKSIGELEMLEELDISINQIRVLPDSFGHLSKLRVFHADETPLEVPPKEVVKLGAQELVNYMKNMVAAREVSQNQTDKRSFWTWLRSLFGCYKKNQGLGPVPA

SEQ ID NO: 15849 - protein, 292 aa, Zea mays subsp. mays
  peptide (1)..(292): Ceres Seq. ID no. 12406422
  misc_feature (1)..(264): Homolog of NCBI NO: 24215664 NR Description: Leucine-rich repeat containing protein
  misc_feature (1)..(251): Homolog of NCBI NO: 12321872 NR Description: hypothetical protein; 91861-89496 [Arabidopsis
  misc_feature (1)..(242): Homolog of NCBI NO: 24215150 NR Description: putative outermembrane protein
  misc_feature (1)..(264): Homolog of NCBI NO: 24216020 NR Description: Leucine-rich repeat containing protein
  misc_feature (1)..(268): Homolog of NCBI NO: 15239256 NR Description: putative protein; protein id: At5g05850.1
  misc_feature (1)..(251): Homolog of NCBI NO: 22330985 NR Description: hypothetical protein
  misc_feature (1)..(271): Homolog of NCBI NO: 15237011 NR Description: putative protein
  misc_feature (1)..(280): Homolog of NCBI NO: 15227838 NR Description: unknown protein; protein id: At2g17440.1
  misc_feature (1)..(271): Homolog of NCBI NO: 20148766 NR Description: PSR9 [Brassica nigra]
  misc_feature (1)..(290): Homolog of NCBI NO: 37537048 NR Description: putative leucine-rich repeat protein
MALPSTIGSLRYLTKLDLHSNQLINLPDTFGELSSLIDLDLRANQLKSLPTSFGNLTSLANLDLSSNLLKVLPDCLGKLKNLRRLIAETNELEELPYTIGSCTSLVELRLDFNQLKALPEAIGKLENLEILTLHYNRIKGLPTTIGHLTRLRELDVSFNEVETIPENICFAASLVKLNVSRNFADLRALPKSIGELEMLEELDISINQIRVLPDSFGHLSKLRVFHADETPLEVPPKEVVKLGAQELVNYMKNMVAAREVSQNQTDKRSFWTWLRSLFGCYKKNQGLGPVPA

SEQ ID NO: 15850 - DNA, 1200 bp, Zea mays subsp. mays
  misc_feature (1)..(1200): Ceres Seq. ID no. 12357037
  misc_feature: MA Experiment ID: 108527 Result: Up-regulated in Transcription
  misc_feature: MA Experiment 108527 PARAMETER Experiment Name: Zm_5mM_NO_P Parameter: Age (day) Value: 8
  misc_feature: MA Experiment 108527 PARAMETER Experiment Name: Zm_5mM_NO_P Parameter: Organism Value: Zea mays
  misc_feature: MA Experiment 108527 PARAMETER Experiment Name: Zm_5mM_NO_P Parameter: Plant Line Value: 35A19
  misc_feature: MA Experiment 108527 PARAMETER Experiment Name: Zm_5mM_NO_P Parameter: Timepoint (hr) Value: 6
  misc_feature: MA Experiment 108527 PARAMETER Experiment Name: Zm_5mM_NO_P Parameter: Tissue Value: Aerial
  misc_feature: MA Experiment 108527 PARAMETER Experiment Name: Zm_5mM_NO_P Parameter: Treatment Value: 5mM NO vs. No Treatment
  misc_feature: MA Experiment ID: 108535 Result: Up-regulated in Transcription
  misc_feature: MA Experiment 108535 PARAMETER Experiment Name: Zm_Meristem_P Parameter: Age (day) Value: 8
  misc_feature: MA Experiment 108535 PARAMETER Experiment Name: Zm_Meristem_P Parameter: Organism Value: Zea mays
  misc_feature: MA Experiment 108535 PARAMETER Experiment Name: Zm_Meristem_P Parameter: Plant Line Value: 35A19
  misc_feature: MA Experiment 108535 PARAMETER Experiment Name: Zm_Meristem_P Parameter: Tissue Value: Root Meristem vs. Above Root Meristem
  misc_feature: MA Experiment ID: 108544 Result: Down-regulated in Transcription
  misc_feature: MA Experiment ID: 20000108 Result: Up-regulated in Transcription
  misc_feature: MA Experiment 20000108 PARAMETER Experiment Name: Zm_Root-Tips_P Parameter: Age (day) Value: 12
  misc_feature: MA Experiment 20000108 PARAMETER Experiment Name: Zm_Root-Tips_P Parameter: Organism Value: Zea mays
  misc_feature: MA Experiment 20000108 PARAMETER Experiment Name: Zm_Root-Tips_P Parameter: Tissue Value: Root tips vs. Root mid region    35
  misc_feature: MA Experiment 20000108 PARAMETER Experiment Name: Zm_Root-Tips_P Parameter: Tissue Value: Root tips vs. Root mid region   Sequence Listing-Misc Features (4)
  misc_feature: MA Experiment ID: 20000479 Result: Down-regulated in Transcription
  misc_feature: MA Experiment 20000479 PARAMETER Experiment Name: Zm_Drought_P Parameter: Age (day) Value: 10
  misc_feature: MA Experiment 20000479 PARAMETER Experiment Name: Zm_Drought_P Parameter: Organism Value: Zea mays
  misc_feature: MA Experiment 20000479 PARAMETER Experiment Name: Zm_Drought_P Parameter: Plant Line Value: 35A19
  misc_feature: MA Experiment 20000479 PARAMETER Experiment Name: Zm_Drought_P Parameter: Timepoint (hr) Value: 48
  misc_feature: MA Experiment 20000479 PARAMETER Experiment Name: Zm_Drought_P Parameter: Tissue Value: Aerial
  misc_feature: MA Experiment 20000479 PARAMETER Experiment Name: Zm_Drought_P Parameter: Treatment Value: Drought vs. No Drought
  misc_feature: MA Experiment ID: 20000480 Result: Down-regulated in Transcription
  misc_feature: MA Experiment 20000480 PARAMETER Experiment Name: Zm_Drought_P Parameter: Age (day) Value: 11
  misc_feature: MA Experiment 20000480 PARAMETER Experiment Name: Zm_Drought_P Parameter: Organism Value: Zea mays
  misc_feature: MA Experiment 20000480 PARAMETER Experiment Name: Zm_Drought_P Parameter: Plant Line Value: 35A19
  misc_feature: MA Experiment 20000480 PARAMETER Experiment Name: Zm_Drought_P Parameter: Timepoint (hr) Value: 72
  misc_feature: MA Experiment 20000480 PARAMETER Experiment Name: Zm_Drought_P Parameter: Tissue Value: Aerial
  misc_feature: MA Experiment 20000480 PARAMETER Experiment Name: Zm_Drought_P Parameter: Treatment Value: Drought vs. No Drought
acgacgaccacatctccccgctgggacctggtgctcggcggcgtgcgccccactacccaaccaactgaaccatgcacaagagcactgcacgacgcccgcacggcaccgaccccgcaccaagccaacggaaaccgagcacccgcacccgcccggggtggaattgggaactgaggaaaaaaaaaacacccacacccacacccgcgtccgcgtgctctctctgccccatccgcgcgcccctcctcctccaccgcccgtcccactcccgccgccgccgccgcccggccgtctgctggcgatggcgtaccgggcggacgacgactacgactacctcttcaaggtggtgctcatcggcgactccggcgtcggcaagtcgaacctgctctcgcgcttcacgcgcaacgagttcagcctcggagtccaagtccaccatcggcgtcgagttcgccacccgcagcatccacgtcgaggacaaggtcgtcaaggcccagatctgggacaccgccggccaggaaagataccgcgctatcacgagcgcgtactaccgcggagcggtaggggcgctggtcgtgtacgacgtcacgcggcacgtcaccttcgagaacgtggagcggtggatgagggagctgagggaccacacggacgccaacatcgtcatgatgctggtagggaacaaggcggacctgcgccacctcagggccgtcccgaccgaggacgccaaggccttcgccgagcgccagaacgccttcttcatggagacgtcggccctggaggcgatgaacgtggaggacgccttcaccgaggtgctcgcgcagatctaccgcgtcgtcagcaagaaggcgctcgacatcggcgacgaccccgccgcgcctcccaggggccataccatcaacgtcggcggcaaggacgacgtgtccgcggtcaagaagtctgcctgctgctcgtcttagcttgggaggacaggatagagcgtgtacttgggtttggttgttgatacttcagcactagagggcacatgacgttattgcagtcatggtcctcgatctgtattcattcgtttccaggtgtctcgttgattttgccatttgatacattgattcattcaggacttgggcctttctggtatagtgtagggacaccttgttccttttatttcttgtacctgcatactgtcgcttctcttatcaaactagctgcattact

SEQ ID NO: 15851 - protein, 329 aa, Zea mays subsp. mays
  peptide (1)..(329): Ceres Seq. ID no. 12357038
  misc_feature (100)..(136): Homolog of NCBI NO: 10764861 NR Description: F1K23.21 [Arabidopsis thaliana]
  misc_feature (98)..(137): Homolog of NCBI NO: 34910940 NR Description: putative GTP-binding protein
  misc_feature (100)..(137): Homolog of NCBI NO: 15233873 NR Description: membrane-bound small GTP-binding - like protein
  misc_feature (100)..(137): Homolog of NCBI NO: 1370156 NR Description: RAB11H [Lotus japonicus]
  misc_feature (108)..(137): Homolog of NCBI NO: 7438389 NR Description: GTP-binding protein, ras-like (clone vfa-ypt3a) -
  misc_feature (100)..(136): Homolog of NCBI NO: 15218719 NR Description: GTP-binding protein, putative; protein id:
  misc_feature (97)..(137): Homolog of NCBI NO: 3024504 NR Description: RAS-RELATED PROTEIN RAB11B
  misc_feature (100)..(137): Homolog of NCBI NO: 15232477 NR Description: Ras family GTP-binding protein, putative; protein
  misc_feature (100)..(137): Homolog of NCBI NO: 7438432 NR Description: GTP-binding protein - garden pea
  misc_feature (100)..(137): Homolog of NCBI NO: 15239462 NR Description: GTP-binding protein, putative; protein id:
RRPHLPAGTWCSAACAPLPNQLNHAQEHCTTPARHRPRTKPTETEHPHPPGVELGTEEKKNTHTHTRVRVLSLPHPRAPPPPPPVPLPPPPPPGRLLAMAYRADDDYDYLFKVVLIGDSGVGKSNLLSRFTRNEFSLGVQVHHRRRVRHPQHPRRGQGRQGPDLGHRRPGKIPRYHERVLPRSGRGAGRVRRHAARHLRERGAVDEGAEGPHGRQHRHDAGREQGGPAPPQGRPDRGRQGLRRAPERLLHGDVGPGGDERGGRLHRGARADLPRRQQEGARHRRRPRRASQGPYHQRRRQGRRVRGQEVCLLLVLAWEDRIERVLGFGC

SEQ ID NO: 15852 - protein, 291 aa, Zea mays subsp. mays
  peptide (1)..(291): Ceres Seq. ID no. 12357039
  misc_feature (100)..(250): Pfam Name: Ras family Pfam Description: Ras family
  misc_feature (100)..(291): Homolog of NCBI NO: 15239462 NR Description: GTP-binding protein, putative; protein id:
  misc_feature (100)..(291): Homolog of NCBI NO: 10764861 NR Description: F1K23.21 [Arabidopsis thaliana]
  misc_feature (100)..(291): Homolog of NCBI NO: 34910940 NR Description: putative GTP-binding protein
  misc_feature (100)..(290): Homolog of NCBI NO: 15233873 NR Description: membrane-bound small GTP-binding - like protein
  misc_feature (107)..(291): Homolog of NCBI NO: 1370156 NR Description: RAB11H [Lotus japonicus]
  misc_feature (107)..(291): Homolog of NCBI NO: 7438389 NR Description: GTP-binding protein, ras-like (clone vfa-ypt3a) -
  misc_feature (100)..(291): Homolog of NCBI NO: 15218719 NR Description: GTP-binding protein, putative; protein id:
  misc_feature (100)..(291): Homolog of NCBI NO: 3024504 NR Description: RAS-RELATED PROTEIN RAB11B
  misc_feature (100)..(291): Homolog of NCBI NO: 15232477 NR Description: Ras family GTP-binding protein, putative; protein
  misc_feature (107)..(291): Homolog of NCBI NO: 7438432 NR Description: GTP-binding protein - garden pea
MHKSTARRPHGTDPAPSQRKPSTRTRPGWNWELRKKKTPTPTPASACSLCPIRAPLLLHRPSHSRRRRRPAVCWRWRTGRTTTTTTSSRWCSSATPASASRTCSRASRATSSASESKSTIGVEFATRSIHVEDKVVKAQIWDTAGQERYRAITSAYYRGAVGALVVYDVTRHVTFENVERWMRELRDHTDANIVMMLVGNKADLRHLRAVPTEDAKAFAERQNAFFMETSALEAMNVEDAFTEVLAQIYRVVSKKALDIGDDPAAPPRGHTINVGGKDDVSAVKKSACCSS

SEQ ID NO: 15853 - protein, 231 aa, Zea mays subsp. mays
  peptide (1)..(231): Ceres Seq. ID no. 12357040
  misc_feature (2)..(38): Homolog of NCBI NO: 10764861 NR Description: F1K23.21 [Arabidopsis thaliana]
  misc_feature (1)..(39): Homolog of NCBI NO: 34910940 NR Description: putative GTP-binding protein
  misc_feature (2)..(39): Homolog of NCBI NO: 15233873 NR Description: membrane-bound small GTP-binding - like protein
  misc_feature (2)..(39): Homolog of NCBI NO: 1370156 NR Description: RAB11H [Lotus japonicus]
  misc_feature (10)..(39): Homolog of NCBI NO: 7438389 NR Description: GTP-binding protein, ras-like (clone vfa-ypt3a) -
  misc_feature (2)..(38): Homolog of NCBI NO: 15218719 NR Description: GTP-binding protein, putative; protein id:
  misc_feature (1)..(39): Homolog of NCBI NO: 3024504 NR Description: RAS-RELATED PROTEIN RAB11B
  misc_feature (2)..(39): Homolog of NCBI NO: 15232477 NR Description: Ras family GTP-binding protein, putative; protein
  misc_feature (2)..(39): Homolog of NCBI NO: 7438432 NR Description: GTP-binding protein - garden pea
  misc_feature (2)..(39): Homolog of NCBI NO: 15239462 NR Description: GTP-binding protein, putative; protein id:
MAYRADDDYDYLFKVVLIGDSGVGKSNLLSRFTRNEFSLGVQVHHRRRVRHPQHPRRGQGRQGPDLGHRRPGKIPRYHERVLPRSGRGAGRVRRHAARHLRERGAVDEGAEGPHGRQHRHDAGREQGGPAPPQGRPDRGRQGLRRAPERLLHGDVGPGGDERGGRLHRGARADLPRRQQEGARHRRRPRRASQGPYHQRRRQGRRVRGQEVCLLLVLAWEDRIERVLGFGC

SEQ ID NO: 15854 - DNA, 1086 bp, Zea mays subsp. mays
  misc_feature (1)..(1086): Ceres Seq. ID no. 12350847
  misc_feature: MA Experiment ID: 108504 Result: Down-regulated in Transcription
  misc_feature: MA Experiment 108504 PARAMETER Experiment Name: Zm_Drought_P Parameter: Age (day) Value: 8
  misc_feature: MA Experiment 108504 PARAMETER Experiment Name: Zm_Drought_P Parameter: Organism Value: Zea mays
  misc_feature: MA Experiment 108504 PARAMETER Experiment Name: Zm_Drought_P Parameter: Plant Line Value: 35A19
  misc_feature: MA Experiment 108504 PARAMETER Experiment Name: Zm_Drought_P Parameter: Timepoint (hr) Value: 12
  misc_feature: MA Experiment 108504 PARAMETER Experiment Name: Zm_Drought_P Parameter: Tissue Value: Aerial
  misc_feature: MA Experiment 108504 PARAMETER Experiment Name: Zm_Drought_P Parameter: Treatment Value: Drought vs. No Drought
  misc_feature: MA Experiment ID: 108527 Result: Down-regulated in Transcription
  misc_feature: MA Experiment 108527 PARAMETER Experiment Name: Zm_5mM_NO_P Parameter: Age (day) Value: 8
  misc_feature: MA Experiment 108527 PARAMETER Experiment Name: Zm_5mM_NO_P Parameter: Organism Value: Zea mays
  misc_feature: MA Experiment 108527 PARAMETER Experiment Name: Zm_5mM_NO_P Parameter: Plant Line Value: 35A19
  misc_feature: MA Experiment 108527 PARAMETER Experiment Name: Zm_5mM_NO_P Parameter: Timepoint (hr) Value: 6
  misc_feature: MA Experiment 108527 PARAMETER Experiment Name: Zm_5mM_NO_P Parameter: Tissue Value: Aerial
  misc_feature: MA Experiment 108527 PARAMETER Experiment Name: Zm_5mM_NO_P Parameter: Treatment Value: 5mM NO vs. No Treatment
  misc_feature: MA Experiment ID: 108528 Result: Up-regulated in Transcription
  misc_feature: MA Experiment 108528 PARAMETER Experiment Name: Zm_Imbibed_Seeds_P Parameter: Age (day) Value: 5 vs. 2
  misc_feature: MA Experiment 108528 PARAMETER Experiment Name: Zm_Imbibed_Seeds_P Parameter: Organism Value: Zea mays
  misc_feature: MA Experiment 108528 PARAMETER Experiment Name: Zm_Imbibed_Seeds_P Parameter: Plant Line Value: 35A19
  misc_feature: MA Experiment 108528 PARAMETER Experiment Name: Zm_Imbibed_Seeds_P Parameter: Tissue Value: Aerial vs. Embryo
  misc_feature: MA Experiment ID: 108529 Result: Down-regulated in Transcription
  misc_feature: MA Experiment 108529 PARAMETER Experiment Name: Zm_Imbibed_Seeds_P Parameter: Age (day) Value: 5 vs. 2
  misc_feature: MA Experiment 108529 PARAMETER Experiment Name: Zm_Imbibed_Seeds_P Parameter: Organism Value: Zea mays
  misc_feature: MA Experiment 108529 PARAMETER Experiment Name: Zm_Imbibed_Seeds_P Parameter: Plant Line Value: 35A19
  misc_feature: MA Experiment 108529 PARAMETER Experiment Name: Zm_Imbibed_Seeds_P Parameter: Tissue Value: Roots vs. Embryo
  misc_feature: MA Experiment ID: 108530 Result: Up-regulated in Transcription
  misc_feature: MA Experiment 108530 PARAMETER Experiment Name: Zm_Imbibed_Seeds_P Parameter: Age (day) Value: 6 vs. 2
  misc_feature: MA Experiment 108530 PARAMETER Experiment Name: Zm_Imbibed_Seeds_P Parameter: Organism Value: Zea mays
  misc_feature: MA Experiment 108530 PARAMETER Experiment Name: Zm_Imbibed_Seeds_P Parameter: Plant Line Value: 35A19
  misc_feature: MA Experiment 108530 PARAMETER Experiment Name: Zm_Imbibed_Seeds_P Parameter: Tissue Value: Aerial vs. Embryo
  misc_feature: MA Experiment ID: 108534 Result: Down-regulated in Transcription
  misc_feature: MA Experiment 108534 PARAMETER Experiment Name: Zm_4deg_Cold_P Parameter: Age (hr) Value: 8
  misc_feature: MA Experiment 108534 PARAMETER Experiment Name: Zm_4deg_Cold_P Parameter: Organism Value: Zea mays
  misc_feature: MA Experiment 108534 PARAMETER Experiment Name: Zm_4deg_Cold_P Parameter: Plant Line Value: 35A19
  misc_feature: MA Experiment 108534 PARAMETER Experiment Name: Zm_4deg_Cold_P Parameter: Temperature (deg C) Value: 4 vs. 22
  misc_feature: MA Experiment 108534 PARAMETER Experiment Name: Zm_4deg_Cold_P Parameter: Timepoint (hr) Value: 6
  misc_feature: MA Experiment 108534 PARAMETER Experiment Name: Zm_4deg_Cold_P Parameter: Tissue Value: Aerial
  misc_feature: MA Experiment ID: 108535 Result: Up-regulated in Transcription
  misc_feature: MA Experiment 108535 PARAMETER Experiment Name: Zm_Meristem_P Parameter: Age (day) Value: 8
  misc_feature: MA Experiment 108535 PARAMETER Experiment Name: Zm_Meristem_P Parameter: Organism Value: Zea mays
  misc_feature: MA Experiment 108535 PARAMETER Experiment Name: Zm_Meristem_P Parameter: Plant Line Value: 35A19
  misc_feature: MA Experiment 108535 PARAMETER Experiment Name: Zm_Meristem_P Parameter: Tissue Value: Root Meristem vs. Above Root Meristem
  misc_feature: MA Experiment ID: 108536 Result: Down-regulated in Transcription
  misc_feature: MA Experiment 108536 PARAMETER Experiment Name: Zm_Meristem_P Parameter: Age (day) Value: 8
  misc_feature: MA Experiment 108536 PARAMETER Experiment Name: Zm_Meristem_P Parameter: Organism Value: Zea mays
  misc_feature: MA Experiment 108536 PARAMETER Experiment Name: Zm_Meristem_P Parameter: Plant Line Value: 35A19
  misc_feature: MA Experiment 108536 PARAMETER Experiment Name: Zm_Meristem_P Parameter: Tissue Value: Shoot Meristem vs. Above Shoot Meristem
  misc_feature: MA Experiment ID: 108540 Result: Down-regulated in Transcription
  misc_feature: MA Experiment 108540 PARAMETER Experiment Name: Zm_20percent_PEG_P Parameter: Age (day) Value: 8
  misc_feature: MA Experiment 108540 PARAMETER Experiment Name: Zm_20percent_PEG_P Parameter: Organism Value: Zea mays
  misc_feature: MA Experiment 108540 PARAMETER Experiment Name: Zm_20percent_PEG_P Parameter: Plant Line Value: 35A19
  misc_feature: MA Experiment 108540 PARAMETER Experiment Name: Zm_20percent_PEG_P Parameter: Timepoint (hr) Value: 6
  misc_feature: MA Experiment 108540 PARAMETER Experiment Name: Zm_20percent_PEG_P Parameter: Tissue Value: Aerial
  misc_feature: MA Experiment 108540 PARAMETER Experiment Name: Zm_20percent_PEG_P Parameter: Treatment Value: 20percent PEG vs. No Treatment
  misc_feature: MA Experiment ID: 108544 Result: Down-regulated in Transcription
  misc_feature: MA Experiment ID: 108545 Result: Up-regulated in Transcription
  misc_feature: MA Experiment 108545 PARAMETER Experiment Name: Zm_Imbibed_Seeds_P Parameter: Age (day) Value: 3 vs. 2
  misc_feature: MA Experiment 108545 PARAMETER Experiment Name: Zm_Imbibed_Seeds_P Parameter: Organism Value: Zea mays
  misc_feature: MA Experiment 108545 PARAMETER Experiment Name: Zm_Imbibed_Seeds_P Parameter: Plant Line Value: 35A19
  misc_feature: MA Experiment 108545 PARAMETER Experiment Name: Zm_Imbibed_Seeds_P Parameter: Tissue Value: Aerial vs. Embryo
  misc_feature: MA Experiment ID: 108547 Result: Up-regulated in Transcription
  misc_feature: MA Experiment 108547 PARAMETER Experiment Name: Zm_Imbibed_Seeds_P Parameter: Age (day) Value: 4 vs. 2
  misc_feature: MA Experiment 108547 PARAMETER Experiment Name: Zm_Imbibed_Seeds_P Parameter: Organism Value: Zea mays
  misc_feature: MA Experiment 108547 PARAMETER Experiment Name: Zm_Imbibed_Seeds_P Parameter: Plant Line Value: 35A19
  misc_feature: MA Experiment 108547 PARAMETER Experiment Name: Zm_Imbibed_Seeds_P Parameter: Tissue Value: Aerial vs. Embryo
  misc_feature: MA Experiment ID: 108556 Result: Down-regulated in Transcription
  misc_feature: MA Experiment 108556 PARAMETER Experiment Name: Zm_Drought_P Parameter: Age (day) Value: 9
  misc_feature: MA Experiment 108556 PARAMETER Experiment Name: Zm_Drought_P Parameter: Organism Value: Zea mays
  misc_feature: MA Experiment 108556 PARAMETER Experiment Name: Zm_Drought_P Parameter: Plant Line Value: 35A19
  misc_feature: MA Experiment 108556 PARAMETER Experiment Name: Zm_Drought_P Parameter: Timepoint (hr) Value: 24
  misc_feature: MA Experiment 108556 PARAMETER Experiment Name: Zm_Drought_P Parameter: Tissue Value: Aerial
  misc_feature: MA Experiment 108556 PARAMETER Experiment Name: Zm_Drought_P Parameter: Treatment Value: Drought vs. No Drought
  misc_feature: MA Experiment ID: 108597 Result: Down-regulated in Transcription
  misc_feature: MA Experiment 108597 PARAMETER Experiment Name: Zm_100uM_ABA_P Parameter: Age (day) Value: 9
  misc_feature: MA Experiment 108597 PARAMETER Experiment Name: Zm_100uM_ABA_P Parameter: Organism Value: Zea mays
  misc_feature: MA Experiment 108597 PARAMETER Experiment Name: Zm_100uM_ABA_P Parameter: Plant Line Value: 35A19
  misc_feature: MA Experiment 108597 PARAMETER Experiment Name: Zm_100uM_ABA_P Parameter: Timepoint (hr) Value: 24
  misc_feature: MA Experiment 108597 PARAMETER Experiment Name: Zm_100uM_ABA_P Parameter: Tissue Value: Aerial
  misc_feature: MA Experiment 108597 PARAMETER Experiment Name: Zm_100uM_ABA_P Parameter: Treatment Value: 100uM ABA vs. No Treatment
  misc_feature: MA Experiment ID: 108689 Result: Down-regulated in Transcription
  misc_feature: MA Experiment 108689 PARAMETER Experiment Name: Zm_Drought_Roots_P Parameter: Age (day) Value: 9
  misc_feature: MA Experiment 108689 PARAMETER Experiment Name: Zm_Drought_Roots_P Parameter: Organism Value: Zea mays
  misc_feature: MA Experiment 108689 PARAMETER Experiment Name: Zm_Drought_Roots_P Parameter: Plant Line Value: 35A19
  misc_feature: MA Experiment 108689 PARAMETER Experiment Name: Zm_Drought_Roots_P Parameter: Timepoint (hr) Value: 24
  misc_feature: MA Experiment 108689 PARAMETER Experiment Name: Zm_Drought_Roots_P Parameter: Tissue Value: Roots
  misc_feature: MA Experiment 108689 PARAMETER Experiment Name: Zm_Drought_Roots_P Parameter: Treatment Value: Drought vs. No Drought
  misc_feature: MA Experiment ID: 20000478 Result: Down-regulated in Transcription
  misc_feature: MA Experiment 20000478 PARAMETER Experiment Name: Zm_5mM_SA_P Parameter: Age (day) Value: 11
  misc_feature: MA Experiment 20000478 PARAMETER Experiment Name: Zm_5mM_SA_P Parameter: Organism Value: Zea mays
  misc_feature: MA Experiment 20000478 PARAMETER Experiment Name: Zm_5mM_SA_P Parameter: Plant Line Value: 35A19
  misc_feature: MA Experiment 20000478 PARAMETER Experiment Name: Zm_5mM_SA_P Parameter: Timepoint (hr) Value: 72
  misc_feature: MA Experiment 20000478 PARAMETER Experiment Name: Zm_5mM_SA_P Parameter: Tissue Value: Aerial
  misc_feature: MA Experiment 20000478 PARAMETER Experiment Name: Zm_5mM_SA_P Parameter: Treatment Value: 5mM SA vs. No Treatment
  misc_feature: MA Experiment ID: 20000479 Result: Down-regulated in Transcription
  misc_feature: MA Experiment 20000479 PARAMETER Experiment Name: Zm_Drought_P Parameter: Age (day) Value: 10
  misc_feature: MA Experiment 20000479 PARAMETER Experiment Name: Zm_Drought_P Parameter: Organism Value: Zea mays
  misc_feature: MA Experiment 20000479 PARAMETER Experiment Name: Zm_Drought_P Parameter: Plant Line Value: 35A19
  misc_feature: MA Experiment 20000479 PARAMETER Experiment Name: Zm_Drought_P Parameter: Timepoint (hr) Value: 48
  misc_feature: MA Experiment 20000479 PARAMETER Experiment Name: Zm_Drought_P Parameter: Tissue Value: Aerial
  misc_feature: MA Experiment 20000479 PARAMETER Experiment Name: Zm_Drought_P Parameter: Treatment Value: Drought vs. No Drought
  misc_feature: MA Experiment ID: 20000480 Result: Down-regulated in Transcription
  misc_feature: MA Experiment 20000480 PARAMETER Experiment Name: Zm_Drought_P Parameter: Age (day) Value: 11
  misc_feature: MA Experiment 20000480 PARAMETER Experiment Name: Zm_Drought_P Parameter: Organism Value: Zea mays
  misc_feature: MA Experiment 20000480 PARAMETER Experiment Name: Zm_Drought_P Parameter: Plant Line Value: 35A19
  misc_feature: MA Experiment 20000480 PARAMETER Experiment Name: Zm_Drought_P Parameter: Timepoint (hr) Value: 72
  misc_feature: MA Experiment 20000480 PARAMETER Experiment Name: Zm_Drought_P Parameter: Tissue Value: Aerial
  misc_feature: MA Experiment 20000480 PARAMETER Experiment Name: Zm_Drought_P Parameter: Treatment Value: Drought vs. No Drought
atcacctcagtcctcacactgacatttcactctcggctgctggagtgtcggccgctgccatctgcctgccgctcactcccacgcgccgcaatgtgccactccccactcggcgccgccaccaccaccgcgggggcgctagcgctcctcttcctcctgccgctagcctcggccgccgccgccggcggcggcaccgcggcgaaggcgacgcccaacatcacggcgctcatgtccaagggcgggtgcaaggcgttcgcgtcgctgctggacaagtcccccgacgctctgtcggcgttcgagtcggcggtgagcggcggcgtgacggcgttctgcccgacggacgaggccgtgcgcgggttcatgcccagctaccggaacctgagcgcggacggcaaggcgtcgctgctgctgtttccacgcggtgcccgtgtactacacgctgcggggcctgaaatccagcaacgggcccatgaacacgctggccaccgacggcgccgccagcaactacaacctgacggtgcagaacgcgggcgaccaggtgacgctgcggacgccggcggccgacgcgccggcccgcgtgcgctccaccgtctacgacagggaccccgtcgccatctacgccgtggacgcggtgctggagcccgtggagctgttcgaccccgtggcggacgcgccgacccctgcgcccgcgccggcgccggcgctggcgcctaggtccgccaagcggacgcggcaccagcggcggcgcggagcggacgcgcctggcccggccgccgccgacgcctcgccggccgaccagaggaaggactacaagaagaacgcggcggccccgtgccgcacgcggtggctcgcgaccgccgccgccgctatcgccgtggccgccgccttggctgcttagggcggggtggtttaaagattgctcggccacccagctgttgtctttggatggagacgccatgcctttttggttnttggtcannnncggttgcttattacttcatcgattactgccgttgttagtatgaagtatgaacaaggtcgatatgtgacctggtggtgtacatcaaaactcaaatcttgttgattcgt

SEQ ID NO: 15855 - protein, 236 aa, Zea mays subsp. mays
  peptide (1)..(236): Ceres Seq. ID no. 12350848
  misc_feature (72)..(137): Pfam Name: Fasciclin domain Pfam Description: Fasciclin domain
  misc_feature (46)..(137): Homolog of NCBI NO: 15235459 NR Description: fasciclin-like arabinogalactan-protein (FLA2)
  misc_feature (46)..(137): Homolog of NCBI NO: 21593810 NR Description: putative pollen surface protein [Arabidopsis
  misc_feature (46)..(137): Homolog of NCBI NO: 13377778 NR Description: fasciclin-like arabinogalactan-protein 2
  misc_feature (56)..(137): Homolog of NCBI NO: 29836531 NR Description: putative pollen surface protein [Gossypium
  misc_feature (56)..(137): Homolog of NCBI NO: 29836533 NR Description: putative pollen surface protein [Gossypioides
  misc_feature (56)..(137): Homolog of NCBI NO: 29836527 NR Description: putative pollen surface protein [Gossypium
  misc_feature (56)..(137): Homolog of NCBI NO: 29836525 NR Description: putative pollen surface protein [Gossypium
  misc_feature (56)..(137): Homolog of NCBI NO: 29836529 NR Description: putative pollen surface protein [Gossypium
  misc_feature (46)..(137): Homolog of NCBI NO: 38424037 NR Description: putative fasciclin-like arabinogalactan-protein
  misc_feature (51)..(137): Homolog of NCBI NO: 15240570 NR Description: fasciclin-like arabinogalactan-protein (FLA1)
ITSVLTLTFHSRLLECRPLPSACRSLPRAAMCHSPLGAATTTAGALALLFLLPLASAAAAGGGTAAKATPNITALMSKGGCKAFASLLDKSPDALSAFESAVSGGVTAFCPTDEAVRGFMPSYRNLSADGKASLLLFPRGARVLHAAGPEIQQRAHEHAGHRRRRQQLQPDGAERGRPGDAADAGGRRAGPRALHRLRQGPRRHLRRGRGAGARGAVRPRGGRADPCARAGAGAGA

SEQ ID NO: 15856 - protein, 206 aa, Zea mays subsp. mays
  peptide (1)..(206): Ceres Seq. ID no. 12350849
  misc_feature (42)..(107): Pfam Name: Fasciclin domain Pfam Description: Fasciclin domain
  misc_feature (16)..(107): Homolog of NCBI NO: 15235459 NR Description: fasciclin-like arabinogalactan-protein (FLA2)
  misc_feature (16)..(107): Homolog of NCBI NO: 21593810 NR Description: putative pollen surface protein [Arabidopsis
  misc_feature (16)..(107): Homolog of NCBI NO: 13377778 NR Description: fasciclin-like arabinogalactan-protein 2
  misc_feature (26)..(107): Homolog of NCBI NO: 29836531 NR Description: putative pollen surface protein [Gossypium
  misc_feature (26)..(107): Homolog of NCBI NO: 29836533 NR Description: putative pollen surface protein [Gossypioides
  misc_feature (26)..(107): Homolog of NCBI NO: 29836527 NR Description: putative pollen surface protein [Gossypium
  misc_feature (26)..(107): Homolog of NCBI NO: 29836525 NR Description: putative pollen surface protein [Gossypium
  misc_feature (26)..(107): Homolog of NCBI NO: 29836529 NR Description: putative pollen surface protein [Gossypium
  misc_feature (16)..(107): Homolog of NCBI NO: 38424037 NR Description: putative fasciclin-like arabinogalactan-protein
  misc_feature (21)..(107): Homolog of NCBI NO: 15240570 NR Description: fasciclin-like arabinogalactan-protein (FLA1)
MCHSPLGAATTTAGALALLFLLPLASAAAAGGGTAAKATPNITALMSKGGCKAFASLLDKSPDALSAFESAVSGGVTAFCPTDEAVRGFMPSYRNLSADGKASLLLFPRGARVLHAAGPEIQQRAHEHAGHRRRRQQLQPDGAERGRPGDAADAGGRRAGPRALHRLRQGPRRHLRRGRGAGARGAVRPRGGRADPCARAGAGAGA

SEQ ID NO: 15857 - protein, 161 aa, Zea mays subsp. mays
  peptide (1)..(161): Ceres Seq. ID no. 12350850
  misc_feature (1)..(62): Pfam Name: Fasciclin domain Pfam Description: Fasciclin domain
  misc_feature (1)..(62): Homolog of NCBI NO: 15235459 NR Description: fasciclin-like arabinogalactan-protein (FLA2)
  misc_feature (1)..(62): Homolog of NCBI NO: 21593810 NR Description: putative pollen surface protein [Arabidopsis
  misc_feature (1)..(62): Homolog of NCBI NO: 13377778 NR Description: fasciclin-like arabinogalactan-protein 2
  misc_feature (1)..(62): Homolog of NCBI NO: 29836531 NR Description: putative pollen surface protein [Gossypium
  misc_feature (1)..(62): Homolog of NCBI NO: 29836533 NR Description: putative pollen surface protein [Gossypioides
  misc_feature (1)..(62): Homolog of NCBI NO: 29836527 NR Description: putative pollen surface protein [Gossypium
  misc_feature (1)..(62): Homolog of NCBI NO: 29836525 NR Description: putative pollen surface protein [Gossypium
  misc_feature (1)..(62): Homolog of NCBI NO: 29836529 NR Description: putative pollen surface protein [Gossypium
  misc_feature (1)..(62): Homolog of NCBI NO: 38424037 NR Description: putative fasciclin-like arabinogalactan-protein
  misc_feature (1)..(62): Homolog of NCBI NO: 15240570 NR Description: fasciclin-like arabinogalactan-protein (FLA1)
MSKGGCKAFASLLDKSPDALSAFESAVSGGVTAFCPTDEAVRGFMPSYRNLSADGKASLLLFPRGARVLHAAGPEIQQRAHEHAGHRRRRQQLQPDGAERGRPGDAADAGGRRAGPRALHRLRQGPRRHLRRGRGAGARGAVRPRGGRADPCARAGAGAGA

SEQ ID NO: 15858 - DNA, 1243 bp, Zea mays subsp. mays
  misc_feature (1)..(1243): Ceres Seq. ID no. 13491142
  misc_feature: MA Experiment ID: 108527 Result: Up-regulated in Transcription
  misc_feature: MA Experiment 108527 PARAMETER Experiment Name: Zm_5mM_NO_P Parameter: Age (day) Value: 8
  misc_feature: MA Experiment 108527 PARAMETER Experiment Name: Zm_5mM_NO_P Parameter: Organism Value: Zea mays
  misc_feature: MA Experiment 108527 PARAMETER Experiment Name: Zm_5mM_NO_P Parameter: Plant Line Value: 35A19
  misc_feature: MA Experiment 108527 PARAMETER Experiment Name: Zm_5mM_NO_P Parameter: Timepoint (hr) Value: 6
  misc_feature: MA Experiment 108527 PARAMETER Experiment Name: Zm_5mM_NO_P Parameter: Tissue Value: Aerial
  misc_feature: MA Experiment 108527 PARAMETER Experiment Name: Zm_5mM_NO_P Parameter: Treatment Value: 5mM NO vs. No Treatment
  misc_feature: MA Experiment ID: 108529 Result: Up-regulated in Transcription
  misc_feature: MA Experiment 108529 PARAMETER Experiment Name: Zm_Imbibed_Seeds_P Parameter: Age (day) Value: 5 vs. 2
  misc_feature: MA Experiment 108529 PARAMETER Experiment Name: Zm_Imbibed_Seeds_P Parameter: Organism Value: Zea mays
  misc_feature: MA Experiment 108529 PARAMETER Experiment Name: Zm_Imbibed_Seeds_P Parameter: Plant Line Value: 35A19
  misc_feature: MA Experiment 108529 PARAMETER Experiment Name: Zm_Imbibed_Seeds_P Parameter: Tissue Value: Roots vs. Embryo
  misc_feature: MA Experiment ID: 108532 Result: Up-regulated in Transcription
  misc_feature: MA Experiment 108532 PARAMETER Experiment Name: Zm_20uM_KNO3_H-to-L_P Parameter: Age (day) Value: 11
  misc_feature: MA Experiment 108532 PARAMETER Experiment Name: Zm_20uM_KNO3_H-to-L_P Parameter: Organism Value: Zea mays
  misc_feature: MA Experiment 108532 PARAMETER Experiment Name: Zm_20uM_KNO3_H-to-L_P Parameter: Plant Line Value: 35A19
  misc_feature: MA Experiment 108532 PARAMETER Experiment Name: Zm_20uM_KNO3_H-to-L_P Parameter: Timepoint (hr) Value: 16
  misc_feature: MA Experiment 108532 PARAMETER Experiment Name: Zm_20uM_KNO3_H-to-L_P Parameter: Tissue Value: Roots
  misc_feature: MA Experiment 108532 PARAMETER Experiment Name: Zm_20uM_KNO3_H-to-L_P Parameter: Treatment Value: 20uM KNO3 vs. 60mM KNO3
  misc_feature: MA Experiment ID: 108534 Result: Up-regulated in Transcription
  misc_feature: MA Experiment 108534 PARAMETER Experiment Name: Zm_4deg_Cold_P Parameter: Age (hr) Value: 8
  misc_feature: MA Experiment 108534 PARAMETER Experiment Name: Zm_4deg_Cold_P Parameter: Organism Value: Zea mays
  misc_feature: MA Experiment 108534 PARAMETER Experiment Name: Zm_4deg_Cold_P Parameter: Plant Line Value: 35A19
  misc_feature: MA Experiment 108534 PARAMETER Experiment Name: Zm_4deg_Cold_P Parameter: Temperature (deg C) Value: 4 vs. 22
  misc_feature: MA Experiment 108534 PARAMETER Experiment Name: Zm_4deg_Cold_P Parameter: Timepoint (hr) Value: 6
  misc_feature: MA Experiment 108534 PARAMETER Experiment Name: Zm_4deg_Cold_P Parameter: Tissue Value: Aerial
  misc_feature: MA Experiment ID: 108535 Result: Down-regulated in Transcription
  misc_feature: MA Experiment 108535 PARAMETER Experiment Name: Zm_Meristem_P Parameter: Age (day) Value: 8
  misc_feature: MA Experiment 108535 PARAMETER Experiment Name: Zm_Meristem_P Parameter: Organism Value: Zea mays
  misc_feature: MA Experiment 108535 PARAMETER Experiment Name: Zm_Meristem_P Parameter: Plant Line Value: 35A19
  misc_feature: MA Experiment 108535 PARAMETER Experiment Name: Zm_Meristem_P Parameter: Tissue Value: Root Meristem vs. Above Root Meristem
  misc_feature: MA Experiment ID: 108543 Result: Up-regulated in Transcription
  misc_feature: MA Experiment ID: 108545 Result: Down-regulated in Transcription
  misc_feature: MA Experiment 108545 PARAMETER Experiment Name: Zm_Imbibed_Seeds_P Parameter: Age (day) Value: 3 vs. 2
  misc_feature: MA Experiment 108545 PARAMETER Experiment Name: Zm_Imbibed_Seeds_P Parameter: Organism Value: Zea mays
  misc_feature: MA Experiment 108545 PARAMETER Experiment Name: Zm_Imbibed_Seeds_P Parameter: Plant Line Value: 35A19
  misc_feature: MA Experiment 108545 PARAMETER Experiment Name: Zm_Imbibed_Seeds_P Parameter: Tissue Value: Aerial vs. Embryo
  misc_feature: MA Experiment ID: 108546 Result: Up-regulated in Transcription
  misc_feature: MA Experiment 108546 PARAMETER Experiment Name: Zm_Imbibed_Seeds_P Parameter: Age (day) Value: 3 vs. 2
  misc_feature: MA Experiment 108546 PARAMETER Experiment Name: Zm_Imbibed_Seeds_P Parameter: Organism Value: Zea mays
  misc_feature: MA Experiment 108546 PARAMETER Experiment Name: Zm_Imbibed_Seeds_P Parameter: Plant Line Value: 35A19
  misc_feature: MA Experiment 108546 PARAMETER Experiment Name: Zm_Imbibed_Seeds_P Parameter: Tissue Value: Roots vs. Embryo
  misc_feature: MA Experiment ID: 20000108 Result: Down-regulated in Transcription
  misc_feature: MA Experiment 20000108 PARAMETER Experiment Name: Zm_Root-Tips_P Parameter: Age (day) Value: 12
  misc_feature: MA Experiment 20000108 PARAMETER Experiment Name: Zm_Root-Tips_P Parameter: Organism Value: Zea mays
  misc_feature: MA Experiment 20000108 PARAMETER Experiment Name: Zm_Root-Tips_P Parameter: Tissue Value: Root tips vs. Root mid region    35
  misc_feature: MA Experiment 20000108 PARAMETER Experiment Name: Zm_Root-Tips_P Parameter: Tissue Value: Root tips vs. Root mid region   Sequence Listing-Misc Features (4)
  misc_feature: MA Experiment ID: 20000478 Result: Up-regulated in Transcription
  misc_feature: MA Experiment 20000478 PARAMETER Experiment Name: Zm_5mM_SA_P Parameter: Age (day) Value: 11
  misc_feature: MA Experiment 20000478 PARAMETER Experiment Name: Zm_5mM_SA_P Parameter: Organism Value: Zea mays
  misc_feature: MA Experiment 20000478 PARAMETER Experiment Name: Zm_5mM_SA_P Parameter: Plant Line Value: 35A19
  misc_feature: MA Experiment 20000478 PARAMETER Experiment Name: Zm_5mM_SA_P Parameter: Timepoint (hr) Value: 72
  misc_feature: MA Experiment 20000478 PARAMETER Experiment Name: Zm_5mM_SA_P Parameter: Tissue Value: Aerial
  misc_feature: MA Experiment 20000478 PARAMETER Experiment Name: Zm_5mM_SA_P Parameter: Treatment Value: 5mM SA vs. No Treatment
  misc_feature: MA Experiment ID: 20000480 Result: Down-regulated in Transcription
  misc_feature: MA Experiment 20000480 PARAMETER Experiment Name: Zm_Drought_P Parameter: Age (day) Value: 11
  misc_feature: MA Experiment 20000480 PARAMETER Experiment Name: Zm_Drought_P Parameter: Organism Value: Zea mays
  misc_feature: MA Experiment 20000480 PARAMETER Experiment Name: Zm_Drought_P Parameter: Plant Line Value: 35A19
  misc_feature: MA Experiment 20000480 PARAMETER Experiment Name: Zm_Drought_P Parameter: Timepoint (hr) Value: 72
  misc_feature: MA Experiment 20000480 PARAMETER Experiment Name: Zm_Drought_P Parameter: Tissue Value: Aerial
  misc_feature: MA Experiment 20000480 PARAMETER Experiment Name: Zm_Drought_P Parameter: Treatment Value: Drought vs. No Drought
  misc_feature: MA Experiment ID: 20000626 Result: Up-regulated in Transcription
  misc_feature: MA Experiment 20000626 PARAMETER Experiment Name: Zm_Herbicide-Treatments_P Parameter: Timepoint (hr) Value: 12
  misc_feature: MA Experiment 20000626 PARAMETER Experiment Name: Zm_Herbicide-Treatments_P Parameter: Tissue Value: Aerial
  misc_feature: MA Experiment 20000626 PARAMETER Experiment Name: Zm_Herbicide-Treatments_P Parameter: Treatment Value: Roundup vs. No Treatment
gtccacagcagagtagagtagcacacgcactcgcctcttgtgtctttctttgtgagctgtggtgtggtggtcgagacacacacagcagcagcaacaacaacatacatacatgcacgctagcctcgcctcctacgccgcggcagctatgccggcgctggacctccgccccgagatagcgcacgcgcaccagcccgtcatgtcgccctctcaccacggctgggacggcaatggcgccacagccgtgcccacaccgatgcccaagaggctggacgggaaggtggccattgtgacgggcggcgcgcgcgggatcggcgaggccatcgtgcggctgttcgccaagcacggggcccgggtggtgatcgcggacatcgacgacgccgcgggggaggcgctggcgtcggcgctgggcccgcaggtcagcttcgtgcgctgcgacgtgtccgtggaggacgacgtccggcgcgccgtggactgggcgctgtcgcgccacggcggccgcctcgacgtctactgcaacaacgccggggtgctgggccgccagacgcgcgccgccaggagcatcctgtccttcgacgcggccgagttcgaccgcgtgctccgcgtcaacgcgctgggcgccgcgctcgggatgaagcacgcggcgcgcgccatggcgccgcgccgcgcggggagcatcgtctccgtcgccagcgtcgcggccgtgctgggcggcctcggcccgcacgcctacaccgcctccaagcacgccatcgtcgggctcaccaagaacgccgcctgcgagctgcgcgcgcacggggtccgggtcaactgcgtctcgcccttcggcgtcgccacgcccatgctcatcaacgcctggcgccagggccacgacgacgccaccgccgacgccgaccgagacctcgacctcgacctcgacgtcaccgtgcccagcgaccaggaggtggagaagatggaggaggtggtcaggggcctggccacgctcaagggccccacgctcaggcccagggacatcgccgaggcggtgctcttcctggccagcgacgaggccaggtatatatcgggccacaaccttgtcgtggacggcggcgtcaccacatccaggaacctcatcggcttgtgaatcaatgtcaatccgttccaaatatcccattcccatggctaggctaattagagaaggagagagagaaaactgctattagttgtacttgaagtgatcgattttcatttggttgattgattcatc

SEQ ID NO: 15859 - protein, 336 aa, Zea mays subsp. mays
  peptide (1)..(336): Ceres Seq. ID no. 13491143
  misc_feature (19)..(314): Homolog of NCBI NO: 15192945 NR Description: alcohol dehydrogenase [Zea mays subsp. mays]
  misc_feature (19)..(314): Homolog of NCBI NO: 15192933 NR Description: alcohol dehydrogenase [Zea mays subsp. mays]
  misc_feature (19)..(314): Homolog of NCBI NO: 15192931 NR Description: alcohol dehydrogenase [Zea mays subsp. mays]
  misc_feature (19)..(314): Homolog of NCBI NO: 15192925 NR Description: alcohol dehydrogenase [Zea mays subsp. mays]
  misc_feature (19)..(314): Homolog of NCBI NO: 15192927 NR Description: alcohol dehydrogenase [Zea mays subsp. mays]
  misc_feature (19)..(314): Homolog of NCBI NO: 15192935 NR Description: alcohol dehydrogenase [Zea mays subsp. mays]
  misc_feature (19)..(314): Homolog of NCBI NO: 15192953 NR Description: alcohol dehydrogenase [Zea mays subsp. mays]
  misc_feature (19)..(314): Homolog of NCBI NO: 15192969 NR Description: alcohol dehydrogenase [Zea mays subsp. mays]
  misc_feature (1)..(336): Homolog of NCBI NO: 1877480 NR Description: short-chain alcohol dehydrogenase [Tripsacum
  misc_feature (1)..(336): Homolog of NCBI NO: 1717794 NR Description: SEX DETERMINATION PROTEIN TASSELSEED 2
MHASLASYAAAAMPALDLRPEIAHAHQPVMSPSHHGWDGNGATAVPTPMPKRLDGKVAIVTGGARGIGEAIVRLFAKHGARVVIADIDDAAGEALASALGPQVSFVRCDVSVEDDVRRAVDWALSRHGGRLDVYCNNAGVLGRQTRAARSILSFDAAEFDRVLRVNALGAALGMKHAARAMAPRRAGSIVSVASVAAVLGGLGPHAYTASKHAIVGLTKNAACELRAHGVRVNCVSPFGVATPMLINAWRQGHDDATADADRDLDLDLDVTVPSDQEVEKMEEVVRGLATLKGPTLRPRDIAEAVLFLASDEARYISGHNLVVDGGVTTSRNLIGL

SEQ ID NO: 15860 - protein, 324 aa, Zea mays subsp. mays
  peptide (1)..(324): Ceres Seq. ID no. 13491144
  misc_feature (7)..(302): Homolog of NCBI NO: 15192945 NR Description: alcohol dehydrogenase [Zea mays subsp. mays]
  misc_feature (7)..(302): Homolog of NCBI NO: 15192933 NR Description: alcohol dehydrogenase [Zea mays subsp. mays]
  misc_feature (7)..(302): Homolog of NCBI NO: 15192931 NR Description: alcohol dehydrogenase [Zea mays subsp. mays]
  misc_feature (7)..(302): Homolog of NCBI NO: 15192925 NR Description: alcohol dehydrogenase [Zea mays subsp. mays]
  misc_feature (7)..(302): Homolog of NCBI NO: 15192927 NR Description: alcohol dehydrogenase [Zea mays subsp. mays]
  misc_feature (7)..(302): Homolog of NCBI NO: 15192935 NR Description: alcohol dehydrogenase [Zea mays subsp. mays]
  misc_feature (7)..(302): Homolog of NCBI NO: 15192953 NR Description: alcohol dehydrogenase [Zea mays subsp. mays]
  misc_feature (7)..(302): Homolog of NCBI NO: 15192969 NR Description: alcohol dehydrogenase [Zea mays subsp. mays]
  misc_feature (1)..(324): Homolog of NCBI NO: 1877480 NR Description: short-chain alcohol dehydrogenase [Tripsacum
  misc_feature (1)..(324): Homolog of NCBI NO: 1717794 NR Description: SEX DETERMINATION PROTEIN TASSELSEED 2
MPALDLRPEIAHAHQPVMSPSHHGWDGNGATAVPTPMPKRLDGKVAIVTGGARGIGEAIVRLFAKHGARVVIADIDDAAGEALASALGPQVSFVRCDVSVEDDVRRAVDWALSRHGGRLDVYCNNAGVLGRQTRAARSILSFDAAEFDRVLRVNALGAALGMKHAARAMAPRRAGSIVSVASVAAVLGGLGPHAYTASKHAIVGLTKNAACELRAHGVRVNCVSPFGVATPMLINAWRQGHDDATADADRDLDLDLDVTVPSDQEVEKMEEVVRGLATLKGPTLRPRDIAEAVLFLASDEARYISGHNLVVDGGVTTSRNLIGL

SEQ ID NO: 15861 - protein, 307 aa, Zea mays subsp. mays
  peptide (1)..(307): Ceres Seq. ID no. 13491145
  misc_feature (1)..(285): Homolog of NCBI NO: 15192945 NR Description: alcohol dehydrogenase [Zea mays subsp. mays]
  misc_feature (1)..(285): Homolog of NCBI NO: 15192933 NR Description: alcohol dehydrogenase [Zea mays subsp. mays]
  misc_feature (1)..(285): Homolog of NCBI NO: 15192931 NR Description: alcohol dehydrogenase [Zea mays subsp. mays]
  misc_feature (1)..(285): Homolog of NCBI NO: 15192925 NR Description: alcohol dehydrogenase [Zea mays subsp. mays]
  misc_feature (1)..(285): Homolog of NCBI NO: 15192927 NR Description: alcohol dehydrogenase [Zea mays subsp. mays]
  misc_feature (1)..(285): Homolog of NCBI NO: 15192935 NR Description: alcohol dehydrogenase [Zea mays subsp. mays]
  misc_feature (1)..(285): Homolog of NCBI NO: 15192953 NR Description: alcohol dehydrogenase [Zea mays subsp. mays]
  misc_feature (1)..(285): Homolog of NCBI NO: 15192969 NR Description: alcohol dehydrogenase [Zea mays subsp. mays]
  misc_feature (1)..(307): Homolog of NCBI NO: 1877480 NR Description: short-chain alcohol dehydrogenase [Tripsacum
  misc_feature (1)..(307): Homolog of NCBI NO: 1717794 NR Description: SEX DETERMINATION PROTEIN TASSELSEED 2
MSPSHHGWDGNGATAVPTPMPKRLDGKVAIVTGGARGIGEAIVRLFAKHGARVVIADIDDAAGEALASALGPQVSFVRCDVSVEDDVRRAVDWALSRHGGRLDVYCNNAGVLGRQTRAARSILSFDAAEFDRVLRVNALGAALGMKHAARAMAPRRAGSIVSVASVAAVLGGLGPHAYTASKHAIVGLTKNAACELRAHGVRVNCVSPFGVATPMLINAWRQGHDDATADADRDLDLDLDVTVPSDQEVEKMEEVVRGLATLKGPTLRPRDIAEAVLFLASDEARYISGHNLVVDGGVTTSRNLIGL

SEQ ID NO: 15862 - DNA, 1226 bp, Zea mays subsp. mays
  misc_feature (1)..(1226): Ceres Seq. ID no. 12407532
  misc_feature: MA Experiment ID: 108523 Result: Up-regulated in Transcription
  misc_feature: MA Experiment 108523 PARAMETER Experiment Name: Zm_42deg_Heat_P Parameter: Age (day) Value: 8
  misc_feature: MA Experiment 108523 PARAMETER Experiment Name: Zm_42deg_Heat_P Parameter: Organism Value: Zea mays
  misc_feature: MA Experiment 108523 PARAMETER Experiment Name: Zm_42deg_Heat_P Parameter: Plant Line Value: 35A19
  misc_feature: MA Experiment 108523 PARAMETER Experiment Name: Zm_42deg_Heat_P Parameter: Temperature (deg C) Value: 42 vs. 22
  misc_feature: MA Experiment 108523 PARAMETER Experiment Name: Zm_42deg_Heat_P Parameter: Timepoint (hr) Value: 6
  misc_feature: MA Experiment 108523 PARAMETER Experiment Name: Zm_42deg_Heat_P Parameter: Tissue Value: Aerial
  misc_feature: MA Experiment ID: 108530 Result: Down-regulated in Transcription
  misc_feature: MA Experiment 108530 PARAMETER Experiment Name: Zm_Imbibed_Seeds_P Parameter: Age (day) Value: 6 vs. 2
  misc_feature: MA Experiment 108530 PARAMETER Experiment Name: Zm_Imbibed_Seeds_P Parameter: Organism Value: Zea mays
  misc_feature: MA Experiment 108530 PARAMETER Experiment Name: Zm_Imbibed_Seeds_P Parameter: Plant Line Value: 35A19
  misc_feature: MA Experiment 108530 PARAMETER Experiment Name: Zm_Imbibed_Seeds_P Parameter: Tissue Value: Aerial vs. Embryo
  misc_feature: MA Experiment ID: 108535 Result: Up-regulated in Transcription
  misc_feature: MA Experiment 108535 PARAMETER Experiment Name: Zm_Meristem_P Parameter: Age (day) Value: 8
  misc_feature: MA Experiment 108535 PARAMETER Experiment Name: Zm_Meristem_P Parameter: Organism Value: Zea mays
  misc_feature: MA Experiment 108535 PARAMETER Experiment Name: Zm_Meristem_P Parameter: Plant Line Value: 35A19
  misc_feature: MA Experiment 108535 PARAMETER Experiment Name: Zm_Meristem_P Parameter: Tissue Value: Root Meristem vs. Above Root Meristem
  misc_feature: MA Experiment ID: 108547 Result: Down-regulated in Transcription
  misc_feature: MA Experiment 108547 PARAMETER Experiment Name: Zm_Imbibed_Seeds_P Parameter: Age (day) Value: 4 vs. 2
  misc_feature: MA Experiment 108547 PARAMETER Experiment Name: Zm_Imbibed_Seeds_P Parameter: Organism Value: Zea mays
  misc_feature: MA Experiment 108547 PARAMETER Experiment Name: Zm_Imbibed_Seeds_P Parameter: Plant Line Value: 35A19
  misc_feature: MA Experiment 108547 PARAMETER Experiment Name: Zm_Imbibed_Seeds_P Parameter: Tissue Value: Aerial vs. Embryo
  misc_feature: MA Experiment ID: 20000488 Result: Up-regulated in Transcription
  misc_feature: MA Experiment 20000488 PARAMETER Experiment Name: Zm_50mM_NH4NO3_L_to_H_P Parameter: Organism Value: Zea mays
  misc_feature: MA Experiment 20000488 PARAMETER Experiment Name: Zm_50mM_NH4NO3_L_to_H_P Parameter: Timepoint (hr) Value: 8
  misc_feature: MA Experiment 20000488 PARAMETER Experiment Name: Zm_50mM_NH4NO3_L_to_H_P Parameter: Tissue Value: Leaves
  misc_feature: MA Experiment 20000488 PARAMETER Experiment Name: Zm_50mM_NH4NO3_L_to_H_P Parameter: Treatment Value: 50mM NH4NO3 vs. 100mM Mannitol
  misc_feature: MA Experiment ID: 20000535 Result: Down-regulated in Transcription
  misc_feature: MA Experiment 20000535 PARAMETER Experiment Name: Zm_Hybrid_Seed_Dev_P Parameter: DAP Value: 30 vs. 12
  misc_feature: MA Experiment 20000535 PARAMETER Experiment Name: Zm_Hybrid_Seed_Dev_P Parameter: Organism Value: Zea mays
  misc_feature: MA Experiment 20000535 PARAMETER Experiment Name: Zm_Hybrid_Seed_Dev_P Parameter: Plant Line Value: 35A19
  misc_feature: MA Experiment 20000535 PARAMETER Experiment Name: Zm_Hybrid_Seed_Dev_P Parameter: Tissue Value: Embryo vs. Unfert Floret
  misc_feature: MA Experiment ID: 20001605 Result: Up-regulated in Transcription
  misc_feature: MA Experiment 20001605 PARAMETER Experiment Name: Zm_50ppm_KNO3_L-to-H_P Parameter: Age (day) Value: 19
  misc_feature: MA Experiment 20001605 PARAMETER Experiment Name: Zm_50ppm_KNO3_L-to-H_P Parameter: Organism Value: Zea mays
  misc_feature: MA Experiment 20001605 PARAMETER Experiment Name: Zm_50ppm_KNO3_L-to-H_P Parameter: Plant Line Value: 35A19
  misc_feature: MA Experiment 20001605 PARAMETER Experiment Name: Zm_50ppm_KNO3_L-to-H_P Parameter: Timepoint (hr) Value: 4
  misc_feature: MA Experiment 20001605 PARAMETER Experiment Name: Zm_50ppm_KNO3_L-to-H_P Parameter: Tissue Value: Shoots
  misc_feature: MA Experiment 20001605 PARAMETER Experiment Name: Zm_50ppm_KNO3_L-to-H_P Parameter: Treatment Value: 50ppm KNO3 vs. 50ppm KCl
  misc_feature: MA Experiment ID: 20001606 Result: Up-regulated in Transcription
  misc_feature: MA Experiment 20001606 PARAMETER Experiment Name: Zm_50ppm_KNO3_L-to-H_P Parameter: Age (day) Value: 19
  misc_feature: MA Experiment 20001606 PARAMETER Experiment Name: Zm_50ppm_KNO3_L-to-H_P Parameter: Organism Value: Zea mays
  misc_feature: MA Experiment 20001606 PARAMETER Experiment Name: Zm_50ppm_KNO3_L-to-H_P Parameter: Plant Line Value: 35A19
  misc_feature: MA Experiment 20001606 PARAMETER Experiment Name: Zm_50ppm_KNO3_L-to-H_P Parameter: Timepoint (hr) Value: 8
  misc_feature: MA Experiment 20001606 PARAMETER Experiment Name: Zm_50ppm_KNO3_L-to-H_P Parameter: Tissue Value: Shoots
  misc_feature: MA Experiment 20001606 PARAMETER Experiment Name: Zm_50ppm_KNO3_L-to-H_P Parameter: Treatment Value: 50ppm KNO3 vs. 50ppm KCl
  misc_feature: MA Experiment ID: 20001608 Result: Up-regulated in Transcription
  misc_feature: MA Experiment 20001608 PARAMETER Experiment Name: Zm_50ppm_KNO3_L-to-H_P Parameter: Age (day) Value: 21
  misc_feature: MA Experiment 20001608 PARAMETER Experiment Name: Zm_50ppm_KNO3_L-to-H_P Parameter: Organism Value: Zea mays
  misc_feature: MA Experiment 20001608 PARAMETER Experiment Name: Zm_50ppm_KNO3_L-to-H_P Parameter: Plant Line Value: 35A19
  misc_feature: MA Experiment 20001608 PARAMETER Experiment Name: Zm_50ppm_KNO3_L-to-H_P Parameter: Timepoint (hr) Value: 48
  misc_feature: MA Experiment 20001608 PARAMETER Experiment Name: Zm_50ppm_KNO3_L-to-H_P Parameter: Tissue Value: Shoots
  misc_feature: MA Experiment 20001608 PARAMETER Experiment Name: Zm_50ppm_KNO3_L-to-H_P Parameter: Treatment Value: 50ppm KNO3 vs. 50ppm KCl
  misc_feature: MA Experiment ID: 20001610 Result: Up-regulated in Transcription
  misc_feature: MA Experiment 20001610 PARAMETER Experiment Name: Zm_50ppm_KNO3_L-to-H_P Parameter: Age (day) Value: 19
  misc_feature: MA Experiment 20001610 PARAMETER Experiment Name: Zm_50ppm_KNO3_L-to-H_P Parameter: Organism Value: Zea mays
  misc_feature: MA Experiment 20001610 PARAMETER Experiment Name: Zm_50ppm_KNO3_L-to-H_P Parameter: Plant Line Value: 35A19
  misc_feature: MA Experiment 20001610 PARAMETER Experiment Name: Zm_50ppm_KNO3_L-to-H_P Parameter: Timepoint (hr) Value: 2
  misc_feature: MA Experiment 20001610 PARAMETER Experiment Name: Zm_50ppm_KNO3_L-to-H_P Parameter: Tissue Value: Roots
  misc_feature: MA Experiment 20001610 PARAMETER Experiment Name: Zm_50ppm_KNO3_L-to-H_P Parameter: Treatment Value: 50ppm KNO3 vs. 50ppm KCl
  misc_feature: MA Experiment ID: 20001612 Result: Up-regulated in Transcription
  misc_feature: MA Experiment 20001612 PARAMETER Experiment Name: Zm_50ppm_KNO3_L-to-H_P Parameter: Age (day) Value: 19
  misc_feature: MA Experiment 20001612 PARAMETER Experiment Name: Zm_50ppm_KNO3_L-to-H_P Parameter: Organism Value: Zea mays
  misc_feature: MA Experiment 20001612 PARAMETER Experiment Name: Zm_50ppm_KNO3_L-to-H_P Parameter: Plant Line Value: 35A19
  misc_feature: MA Experiment 20001612 PARAMETER Experiment Name: Zm_50ppm_KNO3_L-to-H_P Parameter: Timepoint (hr) Value: 8
  misc_feature: MA Experiment 20001612 PARAMETER Experiment Name: Zm_50ppm_KNO3_L-to-H_P Parameter: Tissue Value: Roots
  misc_feature: MA Experiment 20001612 PARAMETER Experiment Name: Zm_50ppm_KNO3_L-to-H_P Parameter: Treatment Value: 50ppm KNO3 vs. 50ppm KCl
  misc_feature: MA Experiment ID: 20001613 Result: Up-regulated in Transcription
  misc_feature: MA Experiment 20001613 PARAMETER Experiment Name: Zm_50ppm_KNO3_L-to-H_P Parameter: Age (day) Value: 20
  misc_feature: MA Experiment 20001613 PARAMETER Experiment Name: Zm_50ppm_KNO3_L-to-H_P Parameter: Organism Value: Zea mays
  misc_feature: MA Experiment 20001613 PARAMETER Experiment Name: Zm_50ppm_KNO3_L-to-H_P Parameter: Plant Line Value: 35A19
  misc_feature: MA Experiment 20001613 PARAMETER Experiment Name: Zm_50ppm_KNO3_L-to-H_P Parameter: Timepoint (hr) Value: 24
  misc_feature: MA Experiment 20001613 PARAMETER Experiment Name: Zm_50ppm_KNO3_L-to-H_P Parameter: Tissue Value: Roots
  misc_feature: MA Experiment 20001613 PARAMETER Experiment Name: Zm_50ppm_KNO3_L-to-H_P Parameter: Treatment Value: 50ppm KNO3 vs. 50ppm KCl
  misc_feature: MA Experiment ID: 20001614 Result: Up-regulated in Transcription
  misc_feature: MA Experiment 20001614 PARAMETER Experiment Name: Zm_50ppm_KNO3_L-to-H_P Parameter: Age (day) Value: 21
  misc_feature: MA Experiment 20001614 PARAMETER Experiment Name: Zm_50ppm_KNO3_L-to-H_P Parameter: Organism Value: Zea mays
  misc_feature: MA Experiment 20001614 PARAMETER Experiment Name: Zm_50ppm_KNO3_L-to-H_P Parameter: Plant Line Value: 35A19
  misc_feature: MA Experiment 20001614 PARAMETER Experiment Name: Zm_50ppm_KNO3_L-to-H_P Parameter: Timepoint (hr) Value: 48
  misc_feature: MA Experiment 20001614 PARAMETER Experiment Name: Zm_50ppm_KNO3_L-to-H_P Parameter: Tissue Value: Roots
  misc_feature: MA Experiment 20001614 PARAMETER Experiment Name: Zm_50ppm_KNO3_L-to-H_P Parameter: Treatment Value: 50ppm KNO3 vs. 50ppm KCl
ctctacccgccgccacattcatcagtagaaaccacctatcctgcctgctctacctacctccgctccccagccatgacggtgctggacgccgagtcgcggttccatgtcctggcggtggacgacagcatcatcgacaggaagctcatcgagatgctgctcaagagctcgtcttaccaagtgaccacggtggagtccgggaacaaggcgctggagctgctggggctgagggacaacggcgcggaggacgcgtcgccgccgtcatcctcctcctcatcttcgtcgtcgtcctcccctgaccatcaggagatcgacgtgagtctcatcatcactgactactgcatgcccggcatgacaggatacgatctgctcaagcgagtgaaggggtcctcatcgctcaaggacattccggtggtgatcatgtcgtctgagaacgtgcctgcccggatcagcaggtgcttgcaggatggcgcggaggagttcttcctgaagcccgtgaagccggccgacatgaagaagctcaagtcacacctgctgaagcggaagcagcccaagcagaagaacaagcctcaggcgcaggcggtggagtctcctgagcagcagctggacccgcatccgcagccggtgcacgagctggagctggaggaagccgcggcagatcgcaacggcgtgaacaagaggaaggcagcggccatggaggaggggctgaccgtggtggtgacggcgccggagagcaccaagccgaggaggctgtctacgagcagcctgactgtggagacctgatcaaccgtggctacggctacgcacattaatctagcagtggatgcaagccccagtcccagcctcgccgccaagaaacacaaagtcgtgcctgctgcttttggttctgggagctaacggagggaagtgacaaacaattaaattatatgtagcggctgctgcttcggcctgcaaattttgttgcgctaacggtcatggacatggacatggacaccatcccttgtgttcgttaatcgttcggaaggggaaaagaagaagaagctgtagatataaaaaaaaggacaggcggctaattgttaatttccgcatggcttaattctggcaacgacatgctggctcaatcaaaaacctgtgacggacagacggatggatcaactgatgatgatgttgttttggctcggttcttcttccttgtacactgagtattcagatgaacatgttgtaatctg

SEQ ID NO: 15863 - protein, 259 aa, Zea mays subsp. mays
  peptide (1)..(259): Ceres Seq. ID no. 12407533
  misc_feature (34)..(182): Pfam Name: Response regulator receiver domain Pfam Description: Response regulator receiver domain
  misc_feature (35)..(207): Homolog of NCBI NO: 15218550 NR Description: putative response regulator 3
  misc_feature (28)..(75): Homolog of NCBI NO: 11358972 NR Description: repsonse regulator ZmRR2 [imported] - maize
  misc_feature (104)..(177): Homolog of NCBI NO: 11358972 NR Description: repsonse regulator ZmRR2 [imported] - maize
  misc_feature (24)..(173): Homolog of NCBI NO: 33330868 NR Description: type-A response regulator [Catharanthus roseus]
  misc_feature (7)..(233): Homolog of NCBI NO: 12060388 NR Description: response regulator 6 [Zea mays]
  misc_feature (30)..(214): Homolog of NCBI NO: 15230202 NR Description: responce reactor 4
  misc_feature (27)..(253): Homolog of NCBI NO: 15227325 NR Description: putative two-component response regulator 3
  misc_feature (25)..(259): Homolog of NCBI NO: 34906626 NR Description: putative response regulator
  misc_feature (25)..(259): Homolog of NCBI NO: 12060386 NR Description: response regulator 5 [Zea mays]
  misc_feature (25)..(259): Homolog of NCBI NO: 12060384 NR Description: response regulator 4 [Zea mays]
LYPPPHSSVETTYPACSTYLRSPAMTVLDAESRFHVLAVDDSIIDRKLIEMLLKSSSYQVTTVESGNKALELLGLRDNGAEDASPPSSSSSSSSSSSPDHQEIDVSLIITDYCMPGMTGYDLLKRVKGSSSLKDIPVVIMSSENVPARISRCLQDGAEEFFLKPVKPADMKKLKSHLLKRKQPKQKNKPQAQAVESPEQQLDPHPQPVHELELEEAAADRNGVNKRKAAAMEEGLTVVVTAPESTKPRRLSTSSLTVET

SEQ ID NO: 15864 - protein, 235 aa, Zea mays subsp. mays
  peptide (1)..(235): Ceres Seq. ID no. 12407534
  misc_feature (10)..(158): Pfam Name: Response regulator receiver domain Pfam Description: Response regulator receiver domain
  misc_feature (1)..(235): Homolog of NCBI NO: 34906626 NR Description: putative response regulator
  misc_feature (1)..(235): Homolog of NCBI NO: 12060386 NR Description: response regulator 5 [Zea mays]
  misc_feature (4)..(51): Homolog of NCBI NO: 11358972 NR Description: repsonse regulator ZmRR2 [imported] - maize
  misc_feature (1)..(149): Homolog of NCBI NO: 33330868 NR Description: type-A response regulator [Catharanthus roseus]
  misc_feature (6)..(190): Homolog of NCBI NO: 15230202 NR Description: responce reactor 4
  misc_feature (3)..(229): Homolog of NCBI NO: 15227325 NR Description: putative two-component response regulator 3
  misc_feature (1)..(209): Homolog of NCBI NO: 12060388 NR Description: response regulator 6 [Zea mays]
  misc_feature (80)..(153): Homolog of NCBI NO: 11358972 NR Description: repsonse regulator ZmRR2 [imported] - maize
  misc_feature (11)..(183): Homolog of NCBI NO: 15218550 NR Description: putative response regulator 3
  misc_feature (1)..(235): Homolog of NCBI NO: 12060384 NR Description: response regulator 4 [Zea mays]
MTVLDAESRFHVLAVDDSIIDRKLIEMLLKSSSYQVTTVESGNKALELLGLRDNGAEDASPPSSSSSSSSSSSPDHQEIDVSLIITDYCMPGMTGYDLLKRVKGSSSLKDIPVVIMSSENVPARISRCLQDGAEEFFLKPVKPADMKKLKSHLLKRKQPKQKNKPQAQAVESPEQQLDPHPQPVHELELEEAAADRNGVNKRKAAAMEEGLTVVVTAPESTKPRRLSTSSLTVET

SEQ ID NO: 15865 - protein, 209 aa, Zea mays subsp. mays
  peptide (1)..(209): Ceres Seq. ID no. 12407535
  misc_feature (1)..(132): Pfam Name: Response regulator receiver domain Pfam Description: Response regulator receiver domain
  misc_feature (1)..(157): Homolog of NCBI NO: 15218550 NR Description: putative response regulator 3
  misc_feature (1)..(25): Homolog of NCBI NO: 11358972 NR Description: repsonse regulator ZmRR2 [imported] - maize
  misc_feature (54)..(127): Homolog of NCBI NO: 11358972 NR Description: repsonse regulator ZmRR2 [imported] - maize
  misc_feature (1)..(123): Homolog of NCBI NO: 33330868 NR Description: type-A response regulator [Catharanthus roseus]
  misc_feature (1)..(183): Homolog of NCBI NO: 12060388 NR Description: response regulator 6 [Zea mays]
  misc_feature (1)..(164): Homolog of NCBI NO: 15230202 NR Description: responce reactor 4
  misc_feature (1)..(203): Homolog of NCBI NO: 15227325 NR Description: putative two-component response regulator 3
  misc_feature (1)..(209): Homolog of NCBI NO: 34906626 NR Description: putative response regulator
  misc_feature (1)..(209): Homolog of NCBI NO: 12060386 NR Description: response regulator 5 [Zea mays]
  misc_feature (1)..(209): Homolog of NCBI NO: 12060384 NR Description: response regulator 4 [Zea mays]
MLLKSSSYQVTTVESGNKALELLGLRDNGAEDASPPSSSSSSSSSSSPDHQEIDVSLIITDYCMPGMTGYDLLKRVKGSSSLKDIPVVIMSSENVPARISRCLQDGAEEFFLKPVKPADMKKLKSHLLKRKQPKQKNKPQAQAVESPEQQLDPHPQPVHELELEEAAADRNGVNKRKAAAMEEGLTVVVTAPESTKPRRLSTSSLTVET

SEQ ID NO: 15866 - DNA, 1178 bp, Zea mays subsp. mays
  misc_feature (1)..(1178): Ceres Seq. ID no. 12391353
  misc_feature: MA Experiment ID: 108504 Result: Up-regulated in Transcription
  misc_feature: MA Experiment 108504 PARAMETER Experiment Name: Zm_Drought_P Parameter: Age (day) Value: 8
  misc_feature: MA Experiment 108504 PARAMETER Experiment Name: Zm_Drought_P Parameter: Organism Value: Zea mays
  misc_feature: MA Experiment 108504 PARAMETER Experiment Name: Zm_Drought_P Parameter: Plant Line Value: 35A19
  misc_feature: MA Experiment 108504 PARAMETER Experiment Name: Zm_Drought_P Parameter: Timepoint (hr) Value: 12
  misc_feature: MA Experiment 108504 PARAMETER Experiment Name: Zm_Drought_P Parameter: Tissue Value: Aerial
  misc_feature: MA Experiment 108504 PARAMETER Experiment Name: Zm_Drought_P Parameter: Treatment Value: Drought vs. No Drought
  misc_feature: MA Experiment ID: 108515 Result: Up-regulated in Transcription
  misc_feature: MA Experiment 108515 PARAMETER Experiment Name: Zm_2mM_SA_P Parameter: Age (day) Value: 8
  misc_feature: MA Experiment 108515 PARAMETER Experiment Name: Zm_2mM_SA_P Parameter: Organism Value: Zea mays
  misc_feature: MA Experiment 108515 PARAMETER Experiment Name: Zm_2mM_SA_P Parameter: Plant Line Value: 35A19
  misc_feature: MA Experiment 108515 PARAMETER Experiment Name: Zm_2mM_SA_P Parameter: Timepoint (hr) Value: 12
  misc_feature: MA Experiment 108515 PARAMETER Experiment Name: Zm_2mM_SA_P Parameter: Tissue Value: Aerial
  misc_feature: MA Experiment 108515 PARAMETER Experiment Name: Zm_2mM_SA_P Parameter: Treatment Value: 2mM SA vs. No Treatment
  misc_feature: MA Experiment ID: 108522 Result: Up-regulated in Transcription
  misc_feature: MA Experiment 108522 PARAMETER Experiment Name: Zm_42deg_Heat_P Parameter: Age (day) Value: 8
  misc_feature: MA Experiment 108522 PARAMETER Experiment Name: Zm_42deg_Heat_P Parameter: Organism Value: Zea mays
  misc_feature: MA Experiment 108522 PARAMETER Experiment Name: Zm_42deg_Heat_P Parameter: Plant Line Value: 35A19
  misc_feature: MA Experiment 108522 PARAMETER Experiment Name: Zm_42deg_Heat_P Parameter: Temperature (deg C) Value: 42 vs. 22
  misc_feature: MA Experiment 108522 PARAMETER Experiment Name: Zm_42deg_Heat_P Parameter: Timepoint (hr) Value: 1
  misc_feature: MA Experiment 108522 PARAMETER Experiment Name: Zm_42deg_Heat_P Parameter: Tissue Value: Aerial
  misc_feature: MA Experiment ID: 108526 Result: Up-regulated in Transcription
  misc_feature: MA Experiment 108526 PARAMETER Experiment Name: Zm_5mM_NO_P Parameter: Age (day) Value: 8
  misc_feature: MA Experiment 108526 PARAMETER Experiment Name: Zm_5mM_NO_P Parameter: Organism Value: Zea mays
  misc_feature: MA Experiment 108526 PARAMETER Experiment Name: Zm_5mM_NO_P Parameter: Plant Line Value: 35A19
  misc_feature: MA Experiment 108526 PARAMETER Experiment Name: Zm_5mM_NO_P Parameter: Timepoint (hr) Value: 1
  misc_feature: MA Experiment 108526 PARAMETER Experiment Name: Zm_5mM_NO_P Parameter: Tissue Value: Aerial
  misc_feature: MA Experiment 108526 PARAMETER Experiment Name: Zm_5mM_NO_P Parameter: Treatment Value: 5mM NO vs. No Treatment
  misc_feature: MA Experiment ID: 108527 Result: Up-regulated in Transcription
  misc_feature: MA Experiment 108527 PARAMETER Experiment Name: Zm_5mM_NO_P Parameter: Age (day) Value: 8
  misc_feature: MA Experiment 108527 PARAMETER Experiment Name: Zm_5mM_NO_P Parameter: Organism Value: Zea mays
  misc_feature: MA Experiment 108527 PARAMETER Experiment Name: Zm_5mM_NO_P Parameter: Plant Line Value: 35A19
  misc_feature: MA Experiment 108527 PARAMETER Experiment Name: Zm_5mM_NO_P Parameter: Timepoint (hr) Value: 6
  misc_feature: MA Experiment 108527 PARAMETER Experiment Name: Zm_5mM_NO_P Parameter: Tissue Value: Aerial
  misc_feature: MA Experiment 108527 PARAMETER Experiment Name: Zm_5mM_NO_P Parameter: Treatment Value: 5mM NO vs. No Treatment
  misc_feature: MA Experiment ID: 108528 Result: Up-regulated in Transcription
  misc_feature: MA Experiment 108528 PARAMETER Experiment Name: Zm_Imbibed_Seeds_P Parameter: Age (day) Value: 5 vs. 2
  misc_feature: MA Experiment 108528 PARAMETER Experiment Name: Zm_Imbibed_Seeds_P Parameter: Organism Value: Zea mays
  misc_feature: MA Experiment 108528 PARAMETER Experiment Name: Zm_Imbibed_Seeds_P Parameter: Plant Line Value: 35A19
  misc_feature: MA Experiment 108528 PARAMETER Experiment Name: Zm_Imbibed_Seeds_P Parameter: Tissue Value: Aerial vs. Embryo
  misc_feature: MA Experiment ID: 108530 Result: Up-regulated in Transcription
  misc_feature: MA Experiment 108530 PARAMETER Experiment Name: Zm_Imbibed_Seeds_P Parameter: Age (day) Value: 6 vs. 2
  misc_feature: MA Experiment 108530 PARAMETER Experiment Name: Zm_Imbibed_Seeds_P Parameter: Organism Value: Zea mays
  misc_feature: MA Experiment 108530 PARAMETER Experiment Name: Zm_Imbibed_Seeds_P Parameter: Plant Line Value: 35A19
  misc_feature: MA Experiment 108530 PARAMETER Experiment Name: Zm_Imbibed_Seeds_P Parameter: Tissue Value: Aerial vs. Embryo
  misc_feature: MA Experiment ID: 108533 Result: Up-regulated in Transcription
  misc_feature: MA Experiment 108533 PARAMETER Experiment Name: Zm_4deg_Cold_P Parameter: Age (hr) Value: 8
  misc_feature: MA Experiment 108533 PARAMETER Experiment Name: Zm_4deg_Cold_P Parameter: Organism Value: Zea mays
  misc_feature: MA Experiment 108533 PARAMETER Experiment Name: Zm_4deg_Cold_P Parameter: Plant Line Value: 35A19
  misc_feature: MA Experiment 108533 PARAMETER Experiment Name: Zm_4deg_Cold_P Parameter: Temperature (deg C) Value: 4 vs. 22
  misc_feature: MA Experiment 108533 PARAMETER Experiment Name: Zm_4deg_Cold_P Parameter: Timepoint (hr) Value: 1
  misc_feature: MA Experiment 108533 PARAMETER Experiment Name: Zm_4deg_Cold_P Parameter: Tissue Value: Aerial
  misc_feature: MA Experiment ID: 108534 Result: Up-regulated in Transcription
  misc_feature: MA Experiment 108534 PARAMETER Experiment Name: Zm_4deg_Cold_P Parameter: Age (hr) Value: 8
  misc_feature: MA Experiment 108534 PARAMETER Experiment Name: Zm_4deg_Cold_P Parameter: Organism Value: Zea mays
  misc_feature: MA Experiment 108534 PARAMETER Experiment Name: Zm_4deg_Cold_P Parameter: Plant Line Value: 35A19
  misc_feature: MA Experiment 108534 PARAMETER Experiment Name: Zm_4deg_Cold_P Parameter: Temperature (deg C) Value: 4 vs. 22
  misc_feature: MA Experiment 108534 PARAMETER Experiment Name: Zm_4deg_Cold_P Parameter: Timepoint (hr) Value: 6
  misc_feature: MA Experiment 108534 PARAMETER Experiment Name: Zm_4deg_Cold_P Parameter: Tissue Value: Aerial
  misc_feature: MA Experiment ID: 108535 Result: Down-regulated in Transcription
  misc_feature: MA Experiment 108535 PARAMETER Experiment Name: Zm_Meristem_P Parameter: Age (day) Value: 8
  misc_feature: MA Experiment 108535 PARAMETER Experiment Name: Zm_Meristem_P Parameter: Organism Value: Zea mays
  misc_feature: MA Experiment 108535 PARAMETER Experiment Name: Zm_Meristem_P Parameter: Plant Line Value: 35A19
  misc_feature: MA Experiment 108535 PARAMETER Experiment Name: Zm_Meristem_P Parameter: Tissue Value: Root Meristem vs. Above Root Meristem
  misc_feature: MA Experiment ID: 108536 Result: Up-regulated in Transcription
  misc_feature: MA Experiment 108536 PARAMETER Experiment Name: Zm_Meristem_P Parameter: Age (day) Value: 8
  misc_feature: MA Experiment 108536 PARAMETER Experiment Name: Zm_Meristem_P Parameter: Organism Value: Zea mays
  misc_feature: MA Experiment 108536 PARAMETER Experiment Name: Zm_Meristem_P Parameter: Plant Line Value: 35A19
  misc_feature: MA Experiment 108536 PARAMETER Experiment Name: Zm_Meristem_P Parameter: Tissue Value: Shoot Meristem vs. Above Shoot Meristem
  misc_feature: MA Experiment ID: 108540 Result: Up-regulated in Transcription
  misc_feature: MA Experiment 108540 PARAMETER Experiment Name: Zm_20percent_PEG_P Parameter: Age (day) Value: 8
  misc_feature: MA Experiment 108540 PARAMETER Experiment Name: Zm_20percent_PEG_P Parameter: Organism Value: Zea mays
  misc_feature: MA Experiment 108540 PARAMETER Experiment Name: Zm_20percent_PEG_P Parameter: Plant Line Value: 35A19
  misc_feature: MA Experiment 108540 PARAMETER Experiment Name: Zm_20percent_PEG_P Parameter: Timepoint (hr) Value: 6
  misc_feature: MA Experiment 108540 PARAMETER Experiment Name: Zm_20percent_PEG_P Parameter: Tissue Value: Aerial
  misc_feature: MA Experiment 108540 PARAMETER Experiment Name: Zm_20percent_PEG_P Parameter: Treatment Value: 20percent PEG vs. No Treatment
  misc_feature: MA Experiment ID: 108542 Result: Up-regulated in Transcription
  misc_feature: MA Experiment 108542 PARAMETER Experiment Name: Zm_150mM_NaCl_P Parameter: Age (day) Value: 8
  misc_feature: MA Experiment 108542 PARAMETER Experiment Name: Zm_150mM_NaCl_P Parameter: Organism Value: Zea mays
  misc_feature: MA Experiment 108542 PARAMETER Experiment Name: Zm_150mM_NaCl_P Parameter: Plant Line Value: 35A19
  misc_feature: MA Experiment 108542 PARAMETER Experiment Name: Zm_150mM_NaCl_P Parameter: Timepoint (hr) Value: 6
  misc_feature: MA Experiment 108542 PARAMETER Experiment Name: Zm_150mM_NaCl_P Parameter: Tissue Value: Aerial
  misc_feature: MA Experiment 108542 PARAMETER Experiment Name: Zm_150mM_NaCl_P Parameter: Treatment Value: 150mM NaCl vs. No Treatment
  misc_feature: MA Experiment ID: 108544 Result: Down-regulated in Transcription
  misc_feature: MA Experiment ID: 108547 Result: Up-regulated in Transcription
  misc_feature: MA Experiment 108547 PARAMETER Experiment Name: Zm_Imbibed_Seeds_P Parameter: Age (day) Value: 4 vs. 2
  misc_feature: MA Experiment 108547 PARAMETER Experiment Name: Zm_Imbibed_Seeds_P Parameter: Organism Value: Zea mays
  misc_feature: MA Experiment 108547 PARAMETER Experiment Name: Zm_Imbibed_Seeds_P Parameter: Plant Line Value: 35A19
  misc_feature: MA Experiment 108547 PARAMETER Experiment Name: Zm_Imbibed_Seeds_P Parameter: Tissue Value: Aerial vs. Embryo
  misc_feature: MA Experiment ID: 108559 Result: Up-regulated in Transcription
  misc_feature: MA Experiment 108559 PARAMETER Experiment Name: Zm_5mM_NO_P Parameter: Age (day) Value: 8
  misc_feature: MA Experiment 108559 PARAMETER Experiment Name: Zm_5mM_NO_P Parameter: Organism Value: Zea mays
  misc_feature: MA Experiment 108559 PARAMETER Experiment Name: Zm_5mM_NO_P Parameter: Plant Line Value: 35A19
  misc_feature: MA Experiment 108559 PARAMETER Experiment Name: Zm_5mM_NO_P Parameter: Timepoint (hr) Value: 12
  misc_feature: MA Experiment 108559 PARAMETER Experiment Name: Zm_5mM_NO_P Parameter: Tissue Value: Aerial
  misc_feature: MA Experiment 108559 PARAMETER Experiment Name: Zm_5mM_NO_P Parameter: Treatment Value: 5mM NO vs. No Treatment
  misc_feature: MA Experiment ID: 108597 Result: Up-regulated in Transcription
  misc_feature: MA Experiment 108597 PARAMETER Experiment Name: Zm_100uM_ABA_P Parameter: Age (day) Value: 9
  misc_feature: MA Experiment 108597 PARAMETER Experiment Name: Zm_100uM_ABA_P Parameter: Organism Value: Zea mays
  misc_feature: MA Experiment 108597 PARAMETER Experiment Name: Zm_100uM_ABA_P Parameter: Plant Line Value: 35A19
  misc_feature: MA Experiment 108597 PARAMETER Experiment Name: Zm_100uM_ABA_P Parameter: Timepoint (hr) Value: 24
  misc_feature: MA Experiment 108597 PARAMETER Experiment Name: Zm_100uM_ABA_P Parameter: Tissue Value: Aerial
  misc_feature: MA Experiment 108597 PARAMETER Experiment Name: Zm_100uM_ABA_P Parameter: Treatment Value: 100uM ABA vs. No Treatment
  misc_feature: MA Experiment ID: 108687 Result: Down-regulated in Transcription
  misc_feature: MA Experiment 108687 PARAMETER Experiment Name: Zm_Embryos-Flowers__P Parameter: Tissue Value: Embryo vs. Aerial+
  misc_feature: MA Experiment ID: 20000478 Result: Up-regulated in Transcription
  misc_feature: MA Experiment 20000478 PARAMETER Experiment Name: Zm_5mM_SA_P Parameter: Age (day) Value: 11
  misc_feature: MA Experiment 20000478 PARAMETER Experiment Name: Zm_5mM_SA_P Parameter: Organism Value: Zea mays
  misc_feature: MA Experiment 20000478 PARAMETER Experiment Name: Zm_5mM_SA_P Parameter: Plant Line Value: 35A19
  misc_feature: MA Experiment 20000478 PARAMETER Experiment Name: Zm_5mM_SA_P Parameter: Timepoint (hr) Value: 72
  misc_feature: MA Experiment 20000478 PARAMETER Experiment Name: Zm_5mM_SA_P Parameter: Tissue Value: Aerial
  misc_feature: MA Experiment 20000478 PARAMETER Experiment Name: Zm_5mM_SA_P Parameter: Treatment Value: 5mM SA vs. No Treatment
  misc_feature: MA Experiment ID: 20000479 Result: Up-regulated in Transcription
  misc_feature: MA Experiment 20000479 PARAMETER Experiment Name: Zm_Drought_P Parameter: Age (day) Value: 10
  misc_feature: MA Experiment 20000479 PARAMETER Experiment Name: Zm_Drought_P Parameter: Organism Value: Zea mays
  misc_feature: MA Experiment 20000479 PARAMETER Experiment Name: Zm_Drought_P Parameter: Plant Line Value: 35A19
  misc_feature: MA Experiment 20000479 PARAMETER Experiment Name: Zm_Drought_P Parameter: Timepoint (hr) Value: 48
  misc_feature: MA Experiment 20000479 PARAMETER Experiment Name: Zm_Drought_P Parameter: Tissue Value: Aerial
  misc_feature: MA Experiment 20000479 PARAMETER Experiment Name: Zm_Drought_P Parameter: Treatment Value: Drought vs. No Drought
  misc_feature: MA Experiment ID: 20000480 Result: Up-regulated in Transcription
  misc_feature: MA Experiment 20000480 PARAMETER Experiment Name: Zm_Drought_P Parameter: Age (day) Value: 11
  misc_feature: MA Experiment 20000480 PARAMETER Experiment Name: Zm_Drought_P Parameter: Organism Value: Zea mays
  misc_feature: MA Experiment 20000480 PARAMETER Experiment Name: Zm_Drought_P Parameter: Plant Line Value: 35A19
  misc_feature: MA Experiment 20000480 PARAMETER Experiment Name: Zm_Drought_P Parameter: Timepoint (hr) Value: 72
  misc_feature: MA Experiment 20000480 PARAMETER Experiment Name: Zm_Drought_P Parameter: Tissue Value: Aerial
  misc_feature: MA Experiment 20000480 PARAMETER Experiment Name: Zm_Drought_P Parameter: Treatment Value: Drought vs. No Drought
  misc_feature: MA Experiment ID: 20000488 Result: Down-regulated in Transcription
  misc_feature: MA Experiment 20000488 PARAMETER Experiment Name: Zm_50mM_NH4NO3_L_to_H_P Parameter: Organism Value: Zea mays
  misc_feature: MA Experiment 20000488 PARAMETER Experiment Name: Zm_50mM_NH4NO3_L_to_H_P Parameter: Timepoint (hr) Value: 8
  misc_feature: MA Experiment 20000488 PARAMETER Experiment Name: Zm_50mM_NH4NO3_L_to_H_P Parameter: Tissue Value: Leaves
  misc_feature: MA Experiment 20000488 PARAMETER Experiment Name: Zm_50mM_NH4NO3_L_to_H_P Parameter: Treatment Value: 50mM NH4NO3 vs. 100mM Mannitol
  misc_feature: MA Experiment ID: 20000532 Result: Up-regulated in Transcription
  misc_feature: MA Experiment 20000532 PARAMETER Experiment Name: Zm_0.001percent_MeJA_P Parameter: Age (day) Value: 10
  misc_feature: MA Experiment 20000532 PARAMETER Experiment Name: Zm_0.001percent_MeJA_P Parameter: Organism Value: Zea mays
  misc_feature: MA Experiment 20000532 PARAMETER Experiment Name: Zm_0.001percent_MeJA_P Parameter: Plant Line Value: 35A19
  misc_feature: MA Experiment 20000532 PARAMETER Experiment Name: Zm_0.001percent_MeJA_P Parameter: Timepoint (hr) Value: 48
  misc_feature: MA Experiment 20000532 PARAMETER Experiment Name: Zm_0.001percent_MeJA_P Parameter: Tissue Value: Aerial
  misc_feature: MA Experiment 20000532 PARAMETER Experiment Name: Zm_0.001percent_MeJA_P Parameter: Treatment Value: 0.001percent MeJA vs. No Treatment
  misc_feature: MA Experiment ID: 20000533 Result: Up-regulated in Transcription
  misc_feature: MA Experiment 20000533 PARAMETER Experiment Name: Zm_0.001percent_MeJA_P Parameter: Age (day) Value: 11
  misc_feature: MA Experiment 20000533 PARAMETER Experiment Name: Zm_0.001percent_MeJA_P Parameter: Organism Value: Zea mays
  misc_feature: MA Experiment 20000533 PARAMETER Experiment Name: Zm_0.001percent_MeJA_P Parameter: Plant Line Value: 35A19
  misc_feature: MA Experiment 20000533 PARAMETER Experiment Name: Zm_0.001percent_MeJA_P Parameter: Timepoint (hr) Value: 72
  misc_feature: MA Experiment 20000533 PARAMETER Experiment Name: Zm_0.001percent_MeJA_P Parameter: Tissue Value: Aerial
  misc_feature: MA Experiment 20000533 PARAMETER Experiment Name: Zm_0.001percent_MeJA_P Parameter: Treatment Value: 0.001percent MeJA vs. No Treatment
  misc_feature: MA Experiment ID: 20000534 Result: Up-regulated in Transcription
  misc_feature: MA Experiment 20000534 PARAMETER Experiment Name: Zm_Hybrid_Pollen_P Parameter: Age (day) Value: 8
  misc_feature: MA Experiment 20000534 PARAMETER Experiment Name: Zm_Hybrid_Pollen_P Parameter: Organism Value: Zea mays
  misc_feature: MA Experiment 20000534 PARAMETER Experiment Name: Zm_Hybrid_Pollen_P Parameter: Plant Line Value: 35A19
  misc_feature: MA Experiment 20000534 PARAMETER Experiment Name: Zm_Hybrid_Pollen_P Parameter: Tissue Value: Pollen vs. Aerial
  misc_feature: MA Experiment ID: 20000535 Result: Down-regulated in Transcription
  misc_feature: MA Experiment 20000535 PARAMETER Experiment Name: Zm_Hybrid_Seed_Dev_P Parameter: DAP Value: 30 vs. 12
  misc_feature: MA Experiment 20000535 PARAMETER Experiment Name: Zm_Hybrid_Seed_Dev_P Parameter: Organism Value: Zea mays
  misc_feature: MA Experiment 20000535 PARAMETER Experiment Name: Zm_Hybrid_Seed_Dev_P Parameter: Plant Line Value: 35A19
  misc_feature: MA Experiment 20000535 PARAMETER Experiment Name: Zm_Hybrid_Seed_Dev_P Parameter: Tissue Value: Embryo vs. Unfert Floret
  misc_feature: MA Experiment ID: 20000633 Result: Up-regulated in Transcription
  misc_feature: MA Experiment 20000633 PARAMETER Experiment Name: Zm_Herbicide-Treatments_P Parameter: Timepoint (hr) Value: 4
  misc_feature: MA Experiment 20000633 PARAMETER Experiment Name: Zm_Herbicide-Treatments_P Parameter: Tissue Value: Aerial
  misc_feature: MA Experiment 20000633 PARAMETER Experiment Name: Zm_Herbicide-Treatments_P Parameter: Treatment Value: Trimec vs. No Treatment
  misc_feature: MA Experiment ID: 20001608 Result: Down-regulated in Transcription
  misc_feature: MA Experiment 20001608 PARAMETER Experiment Name: Zm_50ppm_KNO3_L-to-H_P Parameter: Age (day) Value: 21
  misc_feature: MA Experiment 20001608 PARAMETER Experiment Name: Zm_50ppm_KNO3_L-to-H_P Parameter: Organism Value: Zea mays
  misc_feature: MA Experiment 20001608 PARAMETER Experiment Name: Zm_50ppm_KNO3_L-to-H_P Parameter: Plant Line Value: 35A19
  misc_feature: MA Experiment 20001608 PARAMETER Experiment Name: Zm_50ppm_KNO3_L-to-H_P Parameter: Timepoint (hr) Value: 48
  misc_feature: MA Experiment 20001608 PARAMETER Experiment Name: Zm_50ppm_KNO3_L-to-H_P Parameter: Tissue Value: Shoots
  misc_feature: MA Experiment 20001608 PARAMETER Experiment Name: Zm_50ppm_KNO3_L-to-H_P Parameter: Treatment Value: 50ppm KNO3 vs. 50ppm KCl
  misc_feature: MA Experiment ID: 20001613 Result: Down-regulated in Transcription
  misc_feature: MA Experiment 20001613 PARAMETER Experiment Name: Zm_50ppm_KNO3_L-to-H_P Parameter: Age (day) Value: 20
  misc_feature: MA Experiment 20001613 PARAMETER Experiment Name: Zm_50ppm_KNO3_L-to-H_P Parameter: Organism Value: Zea mays
  misc_feature: MA Experiment 20001613 PARAMETER Experiment Name: Zm_50ppm_KNO3_L-to-H_P Parameter: Plant Line Value: 35A19
  misc_feature: MA Experiment 20001613 PARAMETER Experiment Name: Zm_50ppm_KNO3_L-to-H_P Parameter: Timepoint (hr) Value: 24
  misc_feature: MA Experiment 20001613 PARAMETER Experiment Name: Zm_50ppm_KNO3_L-to-H_P Parameter: Tissue Value: Roots
  misc_feature: MA Experiment 20001613 PARAMETER Experiment Name: Zm_50ppm_KNO3_L-to-H_P Parameter: Treatment Value: 50ppm KNO3 vs. 50ppm KCl
aacctggttcaaacacctcgcttcactagaggaataatctagcagcttctgttgcctccaaattgtccggagaaaggagttgaagcagtgtgagagggccctgagacgatggcgaacctgttcctcaagcaggcaaagcagtacgtggcgacgcggccggtctacccgccggagctcttcgacttcatcgcctccaagacccctcgccgcgacatggcctgggatgtcggcaccggcaacggccaggccgcagcgtcgctggcgaagctgtacaagcacgtggtgggcacggacacgagcgcgcagcagctcgcctacgcgacgcgcctcagcaacacccgctacgtgcacaccccagcggacctgcccctggaggggatccacgccaccgtggccccgccggcctccgtcgacctcgtcaccgtcgcgcaggccttccactggctcgacctcccgcgcttctacgcgcaggcccgctccgtgctgcgccccggccacggcgtgctcgccgccctggtgctacaccgagccacgcgtcgacgccgccgtcgacgccgtgttctggcgcctgtaccacgggtcccagggatactgggcgcccaaccgccggatggtcgacgacgagtaccggagcgccgacttcccgttcgacccggtcgaaggggagaaccacacgggcccgttccagttctccacgcaccgccggatggacctcgatgactacctcatgtatatcacgtcctggtccgcctaccagactgcccaggataacggcgtcgagctgctcgatgcgcccaccgtccaggagttcgcggcggcgtggggcggcgatgccaaggaggtgaagaccgtcacgtaccccatcttcctcaggattggcaaggtcaggtcggagtgagctgcacggaaaaatgaaacttgacaaactatggatacactacggacgcgccgacgattgatgatcgatcatctaggaatcgatgcttataacctttttgaataatgttttattcgattgcagatgtttgttcttcacaattgtatttcaaattctaatgcatgcactattctgttcgactttttttttctctgtgtcttcctgatagtgtaaatttcaatatctatactgtgatgacaaaatatccacaataacccatgtgactgaaatctttggtttt

SEQ ID NO: 15867 - protein, 224 aa, Zea mays subsp. mays
  peptide (1)..(224): Ceres Seq. ID no. 12391354
  misc_feature (1)..(95): Pfam Name: Equine herpesvirus glycoprotein gp2 Pfam Description: Equine herpesvirus glycoprotein gp2
  misc_feature (98)..(220): Homolog of NCBI NO: 34910604 NR Description: putative embryonic abundant protein-like
  misc_feature (98)..(224): Homolog of NCBI NO: 15232436 NR Description: embryonic abundant protein -like
  misc_feature (98)..(224): Homolog of NCBI NO: 21594033 NR Description: embryonic abundant protein-like [Arabidopsis
  misc_feature (98)..(221): Homolog of NCBI NO: 15235684 NR Description: putative protein; protein id: At4g22530.1
  misc_feature (98)..(221): Homolog of NCBI NO: 15233061 NR Description: putative protein; protein id: At3g61210.1
  misc_feature (98)..(222): Homolog of NCBI NO: 15238280 NR Description: embryonic abundant protein -like; protein id:
  misc_feature (129)..(224): Homolog of NCBI NO: 34912212 NR Description: P0415C01.8 [Oryza sativa (japonica
  misc_feature (99)..(221): Homolog of NCBI NO: 7484460 NR Description: embryonic abundant protein EMB34 - white spruce
  misc_feature (98)..(223): Homolog of NCBI NO: 20339366 NR Description: embryo-abundant protein EMB [Pisum sativum]
  misc_feature (98)..(224): Homolog of NCBI NO: 15227331 NR Description: putative embryo-abundant protein
MSAPATARPQRRWRSCTSTWWARTRARSSSPTRRASATPATCTPQRTCPWRGSTPPWPRRPPSTSSPSRRPSTGSTSRASTRRPAPCCAPATACSPPWCYTEPRVDAAVDAVFWRLYHGSQGYWAPNRRMVDDEYRSADFPFDPVEGENHTGPFQFSTHRRMDLDDYLMYITSWSAYQTAQDNGVELLDAPTVQEFAAAWGGDAKEVKTVTYPIFLRIGKVRSE

SEQ ID NO: 15868 - protein, 203 aa, Zea mays subsp. mays
  peptide (1)..(203): Ceres Seq. ID no. 12391355
  misc_feature (1)..(134): Homolog of NCBI NO: 34910604 NR Description: putative embryonic abundant protein-like
  misc_feature (1)..(137): Homolog of NCBI NO: 15232436 NR Description: embryonic abundant protein -like
  misc_feature (1)..(137): Homolog of NCBI NO: 21594033 NR Description: embryonic abundant protein-like [Arabidopsis
  misc_feature (1)..(134): Homolog of NCBI NO: 15235684 NR Description: putative protein; protein id: At4g22530.1
  misc_feature (1)..(137): Homolog of NCBI NO: 15233061 NR Description: putative protein; protein id: At3g61210.1
  misc_feature (1)..(134): Homolog of NCBI NO: 15238280 NR Description: embryonic abundant protein -like; protein id:
  misc_feature (1)..(134): Homolog of NCBI NO: 34912212 NR Description: P0415C01.8 [Oryza sativa (japonica
  misc_feature (7)..(136): Homolog of NCBI NO: 7484460 NR Description: embryonic abundant protein EMB34 - white spruce
  misc_feature (1)..(135): Homolog of NCBI NO: 20339366 NR Description: embryo-abundant protein EMB [Pisum sativum]
  misc_feature (1)..(135): Homolog of NCBI NO: 15227331 NR Description: putative embryo-abundant protein
MANLFLKQAKQYVATRPVYPPELFDFIASKTPRRDMAWDVGTGNGQAAASLAKLYKHVVGTDTSAQQLAYATRLSNTRYVHTPADLPLEGIHATVAPPASVDLVTVAQAFHWLDLPRFYAQARSVLRPGHGVLAALVLHRATRRRRRRRRVLAPVPRVPGILGAQPPDGRRRVPERRLPVRPGRRGEPHGPVPVLHAPPDGPR

SEQ ID NO: 15869 - protein, 168 aa, Zea mays subsp. mays
  peptide (1)..(168): Ceres Seq. ID no. 12391356
  misc_feature (1)..(99): Homolog of NCBI NO: 34910604 NR Description: putative embryonic abundant protein-like
  misc_feature (1)..(102): Homolog of NCBI NO: 15232436 NR Description: embryonic abundant protein -like
  misc_feature (1)..(102): Homolog of NCBI NO: 21594033 NR Description: embryonic abundant protein-like [Arabidopsis
  misc_feature (1)..(99): Homolog of NCBI NO: 15235684 NR Description: putative protein; protein id: At4g22530.1
  misc_feature (1)..(102): Homolog of NCBI NO: 15233061 NR Description: putative protein; protein id: At3g61210.1
  misc_feature (1)..(99): Homolog of NCBI NO: 15238280 NR Description: embryonic abundant protein -like; protein id:
  misc_feature (1)..(99): Homolog of NCBI NO: 34912212 NR Description: P0415C01.8 [Oryza sativa (japonica
  misc_feature (1)..(101): Homolog of NCBI NO: 7484460 NR Description: embryonic abundant protein EMB34 - white spruce
  misc_feature (1)..(100): Homolog of NCBI NO: 20339366 NR Description: embryo-abundant protein EMB [Pisum sativum]
  misc_feature (1)..(100): Homolog of NCBI NO: 15227331 NR Description: putative embryo-abundant protein
MAWDVGTGNGQAAASLAKLYKHVVGTDTSAQQLAYATRLSNTRYVHTPADLPLEGIHATVAPPASVDLVTVAQAFHWLDLPRFYAQARSVLRPGHGVLAALVLHRATRRRRRRRRVLAPVPRVPGILGAQPPDGRRRVPERRLPVRPGRRGEPHGPVPVLHAPPDGPR

SEQ ID NO: 15870 - DNA, 1648 bp, Zea mays subsp. mays
  misc_feature (1)..(1648): Ceres Seq. ID no. 12360034
  misc_feature: MA Experiment ID: 108522 Result: Down-regulated in Transcription
  misc_feature: MA Experiment 108522 PARAMETER Experiment Name: Zm_42deg_Heat_P Parameter: Age (day) Value: 8
  misc_feature: MA Experiment 108522 PARAMETER Experiment Name: Zm_42deg_Heat_P Parameter: Organism Value: Zea mays
  misc_feature: MA Experiment 108522 PARAMETER Experiment Name: Zm_42deg_Heat_P Parameter: Plant Line Value: 35A19
  misc_feature: MA Experiment 108522 PARAMETER Experiment Name: Zm_42deg_Heat_P Parameter: Temperature (deg C) Value: 42 vs. 22
  misc_feature: MA Experiment 108522 PARAMETER Experiment Name: Zm_42deg_Heat_P Parameter: Timepoint (hr) Value: 1
  misc_feature: MA Experiment 108522 PARAMETER Experiment Name: Zm_42deg_Heat_P Parameter: Tissue Value: Aerial
  misc_feature: MA Experiment ID: 108544 Result: Down-regulated in Transcription
aagactgcagcaggagcggagcgggcggagaggttccgggttttcggggtggggtttgggagatgcctcccgtgaagaagtccaagaaggggaagcgaaatccaaggatggcaagctcaagattgtcagggcgcggggcgcgccgccggcgctgccgccggagctccgcgccctcgacaccgagtggtggtacgctttcctgaacaagcaagtcgagctagagcatgctgtgcctccagatgagggggaagcattcaggcacttcttcaggacttcaaggaagacttttgactacatctgctccattgttagggaagatctgatctcaaggccaccgtctggactgatcaacattgaggggaggctgctcagtgtggagaagcaagtggcaattgccatgaggaggcttgcgtccggtgattcccaggtgtcagtagggactgcttttggtgtgggccagtctactgtttcacaagtgacatggagatttatcgagtcgatggaagatagggctaggtatcatctggcatggccaagtcaagagagacttgagcagatcaaagctgtgctggaggatgcttatggcctgccgaattgttgtggtggtgttgatgccacccacgtaatcatgacacttcctgctgttgagtcatctgcagattggtgtgatcatgcaaagaactacagtatgttcctgcaagggattgttgatgatcagatgaggtttattgatattgttactggttggcctggcagcatgacattctcacgcctgatgaaatgctctgggtttttcaagctctgtgaagctggggaacgtttgaatggctctgtcaaagtttcagcagagggtgcagagatcagggaatacattgctggtgactcatgttatcctctactcccatggcttatgactccattcgaaggaaaacatctgcctgccccattgcaaaactttaatgcccgccaaaaagctgcaaggctgcttggaacaaatgcgttggcgcggctgaagggatcctggaggatcttacacaaagtcatgtggaggcctgacaagaacaagctgccaagtataattcttgtttgctgtctgcttcacaatatactcatagactgccatgatgaattgcttccaagtgttcaacttcccgaacatcatgatactggctataatcgagaaaactgcgagcaggtggatcctaatggcaaagtgatgagagaaaacattacagcacatctccaacactgtgaagcttccaagtttctctgcaactgagctaagttagcttgttgttttgctgggattttgatgatgcatcattattccttttaccttatgcaatttcccttagtttctgttattgtagtgagactttctgattgcaattcagtaaagattctctagaaatggcatggttcagtactatagaaaatagctagttggaaaattacaaggactagccctcatgcttgggtttatgttcttcaggataatgccagtcctcatcatgctgagtgccatgaagttgcataatgtaacaaaattcatgaatgatctggtatcttatttttttgaattatttgatatcttaagttaggttggtttataaggtcccagtttatatgatgtgacctttattgttgg

SEQ ID NO: 15871 - protein, 425 aa, Zea mays subsp. mays
  peptide (1)..(425): Ceres Seq. ID no. 12360035
  misc_feature (78)..(416): Homolog of NCBI NO: 21592524 NR Description: unknown [Arabidopsis thaliana]
  misc_feature (78)..(416): Homolog of NCBI NO: 7452044 NR Description: hypothetical protein F27B13.20 - Arabidopsis
  misc_feature (79)..(416): Homolog of NCBI NO: 21902022 NR Description: B1097D05.23 [Oryza sativa (japonica
  misc_feature (83)..(416): Homolog of NCBI NO: 15239835 NR Description: putative protein
  misc_feature (43)..(420): Homolog of NCBI NO: 34908114 NR Description: P0031D11.14 [Oryza sativa (japonica
  misc_feature (61)..(414): Homolog of NCBI NO: 15233248 NR Description: putative protein
  misc_feature (32)..(159): Homolog of NCBI NO: 11357482 NR Description: hypothetical protein F16M2.120 - Arabidopsis
  misc_feature (158)..(418): Homolog of NCBI NO: 11357482 NR Description: hypothetical protein F16M2.120 - Arabidopsis
  misc_feature (32)..(414): Homolog of NCBI NO: 18412695 NR Description: putative protein
  misc_feature (28)..(415): Homolog of NCBI NO: 25553597 NR Description: OJ1656_E11.28 [Oryza sativa (japonica
RLQQERSGRRGSGFSGWGLGDASREEVQEGEAKSKDGKLKIVRARGAPPALPPELRALDTEWWYAFLNKQVELEHAVPPDEGEAFRHFFRTSRKTFDYICSIVREDLISRPPSGLINIEGRLLSVEKQVAIAMRRLASGDSQVSVGTAFGVGQSTVSQVTWRFIESMEDRARYHLAWPSQERLEQIKAVLEDAYGLPNCCGGVDATHVIMTLPAVESSADWCDHAKNYSMFLQGIVDDQMRFIDIVTGWPGSMTFSRLMKCSGFFKLCEAGERLNGSVKVSAEGAEIREYIAGDSCYPLLPWLMTPFEGKHLPAPLQNFNARQKAARLLGTNALARLKGSWRILHKVMWRPDKNKLPSIILVCCLLHNILIDCHDELLPSVQLPEHHDTGYNRENCEQVDPNGKVMRENITAHLQHCEASKFLCN

SEQ ID NO: 15872 - protein, 293 aa, Zea mays subsp. mays
  peptide (1)..(293): Ceres Seq. ID no. 12360036
  misc_feature (1)..(284): Homolog of NCBI NO: 21592524 NR Description: unknown [Arabidopsis thaliana]
  misc_feature (1)..(284): Homolog of NCBI NO: 7452044 NR Description: hypothetical protein F27B13.20 - Arabidopsis
  misc_feature (1)..(284): Homolog of NCBI NO: 21902022 NR Description: B1097D05.23 [Oryza sativa (japonica
  misc_feature (1)..(284): Homolog of NCBI NO: 15239835 NR Description: putative protein
  misc_feature (1)..(288): Homolog of NCBI NO: 34908114 NR Description: P0031D11.14 [Oryza sativa (japonica
  misc_feature (1)..(282): Homolog of NCBI NO: 15233248 NR Description: putative protein
  misc_feature (1)..(27): Homolog of NCBI NO: 11357482 NR Description: hypothetical protein F16M2.120 - Arabidopsis
  misc_feature (26)..(286): Homolog of NCBI NO: 11357482 NR Description: hypothetical protein F16M2.120 - Arabidopsis
  misc_feature (1)..(282): Homolog of NCBI NO: 18412695 NR Description: putative protein
  misc_feature (1)..(283): Homolog of NCBI NO: 25553597 NR Description: OJ1656_E11.28 [Oryza sativa (japonica
MRRLASGDSQVSVGTAFGVGQSTVSQVTWRFIESMEDRARYHLAWPSQERLEQIKAVLEDAYGLPNCCGGVDATHVIMTLPAVESSADWCDHAKNYSMFLQGIVDDQMRFIDIVTGWPGSMTFSRLMKCSGFFKLCEAGERLNGSVKVSAEGAEIREYIAGDSCYPLLPWLMTPFEGKHLPAPLQNFNARQKAARLLGTNALARLKGSWRILHKVMWRPDKNKLPSIILVCCLLHNILIDCHDELLPSVQLPEHHDTGYNRENCEQVDPNGKVMRENITAHLQHCEASKFLCN

SEQ ID NO: 15873 - protein, 259 aa, Zea mays subsp. mays
  peptide (1)..(259): Ceres Seq. ID no. 12360037
  misc_feature (1)..(250): Homolog of NCBI NO: 21592524 NR Description: unknown [Arabidopsis thaliana]
  misc_feature (1)..(250): Homolog of NCBI NO: 7452044 NR Description: hypothetical protein F27B13.20 - Arabidopsis
  misc_feature (1)..(250): Homolog of NCBI NO: 21902022 NR Description: B1097D05.23 [Oryza sativa (japonica
  misc_feature (1)..(250): Homolog of NCBI NO: 15239835 NR Description: putative protein
  misc_feature (1)..(254): Homolog of NCBI NO: 34908114 NR Description: P0031D11.14 [Oryza sativa (japonica
  misc_feature (1)..(248): Homolog of NCBI NO: 15233248 NR Description: putative protein
  misc_feature (1)..(252): Homolog of NCBI NO: 11357482 NR Description: hypothetical protein F16M2.120 - Arabidopsis
  misc_feature (1)..(248): Homolog of NCBI NO: 18412695 NR Description: putative protein
  misc_feature (1)..(249): Homolog of NCBI NO: 25553597 NR Description: OJ1656_E11.28 [Oryza sativa (japonica
  misc_feature (1)..(250): Homolog of NCBI NO: 30688449 NR Description: expressed protein [Arabidopsis thaliana]
MEDRARYHLAWPSQERLEQIKAVLEDAYGLPNCCGGVDATHVIMTLPAVESSADWCDHAKNYSMFLQGIVDDQMRFIDIVTGWPGSMTFSRLMKCSGFFKLCEAGERLNGSVKVSAEGAEIREYIAGDSCYPLLPWLMTPFEGKHLPAPLQNFNARQKAARLLGTNALARLKGSWRILHKVMWRPDKNKLPSIILVCCLLHNILIDCHDELLPSVQLPEHHDTGYNRENCEQVDPNGKVMRENITAHLQHCEASKFLCN

SEQ ID NO: 15874 - DNA, 1423 bp, Zea mays subsp. mays; identical to SEQ ID NO: 9654
  misc_feature (1)..(1423): Ceres Seq. ID no. 13570861
  misc_feature: MA Experiment ID: 108527 Result: Up-regulated in Transcription
  misc_feature: MA Experiment 108527 PARAMETER Experiment Name: Zm_5mM_NO_P Parameter: Age (day) Value: 8
  misc_feature: MA Experiment 108527 PARAMETER Experiment Name: Zm_5mM_NO_P Parameter: Organism Value: Zea mays
  misc_feature: MA Experiment 108527 PARAMETER Experiment Name: Zm_5mM_NO_P Parameter: Plant Line Value: 35A19
  misc_feature: MA Experiment 108527 PARAMETER Experiment Name: Zm_5mM_NO_P Parameter: Timepoint (hr) Value: 6
  misc_feature: MA Experiment 108527 PARAMETER Experiment Name: Zm_5mM_NO_P Parameter: Tissue Value: Aerial
  misc_feature: MA Experiment 108527 PARAMETER Experiment Name: Zm_5mM_NO_P Parameter: Treatment Value: 5mM NO vs. No Treatment
  misc_feature: MA Experiment ID: 108535 Result: Down-regulated in Transcription
  misc_feature: MA Experiment 108535 PARAMETER Experiment Name: Zm_Meristem_P Parameter: Age (day) Value: 8
  misc_feature: MA Experiment 108535 PARAMETER Experiment Name: Zm_Meristem_P Parameter: Organism Value: Zea mays
  misc_feature: MA Experiment 108535 PARAMETER Experiment Name: Zm_Meristem_P Parameter: Plant Line Value: 35A19
  misc_feature: MA Experiment 108535 PARAMETER Experiment Name: Zm_Meristem_P Parameter: Tissue Value: Root Meristem vs. Above Root Meristem
  misc_feature: MA Experiment ID: 108536 Result: Down-regulated in Transcription
  misc_feature: MA Experiment 108536 PARAMETER Experiment Name: Zm_Meristem_P Parameter: Age (day) Value: 8
  misc_feature: MA Experiment 108536 PARAMETER Experiment Name: Zm_Meristem_P Parameter: Organism Value: Zea mays
  misc_feature: MA Experiment 108536 PARAMETER Experiment Name: Zm_Meristem_P Parameter: Plant Line Value: 35A19
  misc_feature: MA Experiment 108536 PARAMETER Experiment Name: Zm_Meristem_P Parameter: Tissue Value: Shoot Meristem vs. Above Shoot Meristem
  misc_feature: MA Experiment ID: 108543 Result: Up-regulated in Transcription
  misc_feature: MA Experiment ID: 108544 Result: Up-regulated in Transcription
  misc_feature: MA Experiment ID: 108687 Result: Down-regulated in Transcription
  misc_feature: MA Experiment 108687 PARAMETER Experiment Name: Zm_Embryos-Flowers__P Parameter: Tissue Value: Embryo vs. Aerial+
  misc_feature: MA Experiment ID: 108688 Result: Down-regulated in Transcription
  misc_feature: MA Experiment 108688 PARAMETER Experiment Name: Zm_Embryos-Flowers__P Parameter: Tissue Value: Immature Flowers vs. Aerial+
  misc_feature: MA Experiment ID: 20000535 Result: Down-regulated in Transcription
  misc_feature: MA Experiment 20000535 PARAMETER Experiment Name: Zm_Hybrid_Seed_Dev_P Parameter: DAP Value: 30 vs. 12
  misc_feature: MA Experiment 20000535 PARAMETER Experiment Name: Zm_Hybrid_Seed_Dev_P Parameter: Organism Value: Zea mays
  misc_feature: MA Experiment 20000535 PARAMETER Experiment Name: Zm_Hybrid_Seed_Dev_P Parameter: Plant Line Value: 35A19
  misc_feature: MA Experiment 20000535 PARAMETER Experiment Name: Zm_Hybrid_Seed_Dev_P Parameter: Tissue Value: Embryo vs. Unfert Floret
  misc_feature: MA Experiment ID: 20001608 Result: Down-regulated in Transcription
  misc_feature: MA Experiment 20001608 PARAMETER Experiment Name: Zm_50ppm_KNO3_L-to-H_P Parameter: Age (day) Value: 21
  misc_feature: MA Experiment 20001608 PARAMETER Experiment Name: Zm_50ppm_KNO3_L-to-H_P Parameter: Organism Value: Zea mays
  misc_feature: MA Experiment 20001608 PARAMETER Experiment Name: Zm_50ppm_KNO3_L-to-H_P Parameter: Plant Line Value: 35A19
  misc_feature: MA Experiment 20001608 PARAMETER Experiment Name: Zm_50ppm_KNO3_L-to-H_P Parameter: Timepoint (hr) Value: 48
  misc_feature: MA Experiment 20001608 PARAMETER Experiment Name: Zm_50ppm_KNO3_L-to-H_P Parameter: Tissue Value: Shoots
  misc_feature: MA Experiment 20001608 PARAMETER Experiment Name: Zm_50ppm_KNO3_L-to-H_P Parameter: Treatment Value: 50ppm KNO3 vs. 50ppm KCl

SEQ ID NO: 15875 - protein, 371 aa, Zea mays subsp. mays; identical to SEQ ID NO: 9655
  peptide (1)..(371): Ceres Seq. ID no. 13570862
  misc_feature (10)..(345): Pfam Name: NADH:flavin oxidoreductase / NADH oxidase family Pfam Description: NADH:flavin oxidoreductase / NADH oxidase family
  misc_feature (1)..(369): Homolog of NCBI NO: 15223138 NR Description: 12-oxophytodienoate reductase (OPR1) [Arabidopsis
  misc_feature (10)..(369): Homolog of NCBI NO: 7449901 NR Description: probable 12-oxophytodienoate reductase (EC
  misc_feature (1)..(369): Homolog of NCBI NO: 21593388 NR Description: 12-oxophytodienoate reductase (OPR1) [Arabidopsis
  misc_feature (8)..(369): Homolog of NCBI NO: 15223140 NR Description: 12-oxophytodienoate reductase (OPR2) [Arabidopsis
  misc_feature (1)..(369): Homolog of NCBI NO: 4894182 NR Description: 12-oxophytodienoate reductase [Lycopersicon
  misc_feature (8)..(369): Homolog of NCBI NO: 26450549 NR Description: putative 12-oxophytodienoate reductase OPR2
  misc_feature (1)..(369): Homolog of NCBI NO: 2765083 NR Description: 12-oxophytodienoate reductase [Arabidopsis
  misc_feature (1)..(369): Homolog of NCBI NO: 14277800 NR Description: Chain A, Crystal Structure Of 12-Oxophytodienoate
  misc_feature (1)..(370): Homolog of NCBI NO: 13516922 NR Description: 12-oxophytodienoic acid 10, 11-reductase [Pisum
  misc_feature (10)..(370): Homolog of NCBI NO: 7449902 NR Description: probable 12-oxophytodienoate reductase (EC

SEQ ID NO: 15876 - protein, 355 aa, Zea mays subsp. mays; identical to SEQ ID NO: 9656
  peptide (1)..(355): Ceres Seq. ID no. 13570863
  misc_feature (1)..(329): Pfam Name: NADH:flavin oxidoreductase / NADH oxidase family Pfam Description: NADH:flavin oxidoreductase / NADH oxidase family
  misc_feature (1)..(353): Homolog of NCBI NO: 15223138 NR Description: 12-oxophytodienoate reductase (OPR1) [Arabidopsis
  misc_feature (1)..(353): Homolog of NCBI NO: 7449901 NR Description: probable 12-oxophytodienoate reductase (EC
  misc_feature (1)..(353): Homolog of NCBI NO: 21593388 NR Description: 12-oxophytodienoate reductase (OPR1) [Arabidopsis
  misc_feature (1)..(353): Homolog of NCBI NO: 15223140 NR Description: 12-oxophytodienoate reductase (OPR2) [Arabidopsis
  misc_feature (1)..(353): Homolog of NCBI NO: 4894182 NR Description: 12-oxophytodienoate reductase [Lycopersicon
  misc_feature (1)..(353): Homolog of NCBI NO: 26450549 NR Description: putative 12-oxophytodienoate reductase OPR2
  misc_feature (1)..(353): Homolog of NCBI NO: 2765083 NR Description: 12-oxophytodienoate reductase [Arabidopsis
  misc_feature (1)..(353): Homolog of NCBI NO: 14277800 NR Description: Chain A, Crystal Structure Of 12-Oxophytodienoate
  misc_feature (1)..(354): Homolog of NCBI NO: 13516922 NR Description: 12-oxophytodienoic acid 10, 11-reductase [Pisum
  misc_feature (1)..(354): Homolog of NCBI NO: 7449902 NR Description: probable 12-oxophytodienoate reductase (EC

SEQ ID NO: 15877 - DNA, 1444 bp, Zea mays subsp. mays
  misc_feature (1)..(1444): Ceres Seq. ID no. 12390163
  misc_feature: MA Experiment ID: 108528 Result: Down-regulated in Transcription
  misc_feature: MA Experiment 108528 PARAMETER Experiment Name: Zm_Imbibed_Seeds_P Parameter: Age (day) Value: 5 vs. 2
  misc_feature: MA Experiment 108528 PARAMETER Experiment Name: Zm_Imbibed_Seeds_P Parameter: Organism Value: Zea mays
  misc_feature: MA Experiment 108528 PARAMETER Experiment Name: Zm_Imbibed_Seeds_P Parameter: Plant Line Value: 35A19
  misc_feature: MA Experiment 108528 PARAMETER Experiment Name: Zm_Imbibed_Seeds_P Parameter: Tissue Value: Aerial vs. Embryo
  misc_feature: MA Experiment ID: 108530 Result: Down-regulated in Transcription
  misc_feature: MA Experiment 108530 PARAMETER Experiment Name: Zm_Imbibed_Seeds_P Parameter: Age (day) Value: 6 vs. 2
  misc_feature: MA Experiment 108530 PARAMETER Experiment Name: Zm_Imbibed_Seeds_P Parameter: Organism Value: Zea mays
  misc_feature: MA Experiment 108530 PARAMETER Experiment Name: Zm_Imbibed_Seeds_P Parameter: Plant Line Value: 35A19
  misc_feature: MA Experiment 108530 PARAMETER Experiment Name: Zm_Imbibed_Seeds_P Parameter: Tissue Value: Aerial vs. Embryo
  misc_feature: MA Experiment ID: 108535 Result: Up-regulated in Transcription
  misc_feature: MA Experiment 108535 PARAMETER Experiment Name: Zm_Meristem_P Parameter: Age (day) Value: 8
  misc_feature: MA Experiment 108535 PARAMETER Experiment Name: Zm_Meristem_P Parameter: Organism Value: Zea mays
  misc_feature: MA Experiment 108535 PARAMETER Experiment Name: Zm_Meristem_P Parameter: Plant Line Value: 35A19
  misc_feature: MA Experiment 108535 PARAMETER Experiment Name: Zm_Meristem_P Parameter: Tissue Value: Root Meristem vs. Above Root Meristem
  misc_feature: MA Experiment ID: 108544 Result: Down-regulated in Transcription
  misc_feature: MA Experiment ID: 20000487 Result: Up-regulated in Transcription
  misc_feature: MA Experiment 20000487 PARAMETER Experiment Name: Zm_50mM_NH4NO3_L_to_H_P Parameter: Organism Value: Zea mays
  misc_feature: MA Experiment 20000487 PARAMETER Experiment Name: Zm_50mM_NH4NO3_L_to_H_P Parameter: Timepoint (hr) Value: 4
  misc_feature: MA Experiment 20000487 PARAMETER Experiment Name: Zm_50mM_NH4NO3_L_to_H_P Parameter: Tissue Value: Leaves
  misc_feature: MA Experiment 20000487 PARAMETER Experiment Name: Zm_50mM_NH4NO3_L_to_H_P Parameter: Treatment Value: 50mM NH4NO3 vs. 100mM Mannitol
  misc_feature: MA Experiment ID: 20000492 Result: Up-regulated in Transcription
  misc_feature: MA Experiment 20000492 PARAMETER Experiment Name: Zm_Hybrid_Seed_Dev_P Parameter: DAP Value: 12
  misc_feature: MA Experiment 20000492 PARAMETER Experiment Name: Zm_Hybrid_Seed_Dev_P Parameter: Organism Value: Zea mays
  misc_feature: MA Experiment 20000492 PARAMETER Experiment Name: Zm_Hybrid_Seed_Dev_P Parameter: Plant Line Value: 35A19
  misc_feature: MA Experiment 20000492 PARAMETER Experiment Name: Zm_Hybrid_Seed_Dev_P Parameter: Tissue Value: Fert Kernel vs. Unfert Floret
gcaattaaccctcactaaagggaacaaaagctggagctccaccgcggtggcggccgctctagaactagtggatcccccgggctgcaggaattcgcacgagaccattacctagaacatcctaatcgaaaacatatgaatagaaaagaacccctttgcgcaaggcaaacccccacccagctcacctcggcgatggcatcggcggcggccgtggagtgggaggcggcggcgcggaaggtgctggtggcgcgcaagccctggcttcgggctacctacggcctgcccaacctgcctccccgtgctcctctacctccgcatggcgcaggttcccttcgacatccacgtcgacacctccttccccgatgccgatcacataccatatgttgaatttggggattgcgtggctttcaacaacgagaaaggaggcgtaattgagtatctcaaggatgagaaaattgttgacttgaactcaaatcacccaaatatttcatccaccactgtgctagacacgaaggccatggtttcgtcctggcttgctaatgctttgctgtatgaactctgggtggttagtgatggaagcattgcaaatgatatctacttctctgatctcccttggcccattggaaagatactccattggaataaaactagacatgtgaagcagctacttggtataacaaagctcaatgctgcagaaaaagaagaggagatataccagaaggcaagtgctgcatatgagtcattgtctttcagattaggggatcaagtctttctatttgataatagccctacagatgttgatgctcttttccttggacatgttctttttgttctcagtgcgttgcctgatacatctgtgctgaggggcactttgcagaagcatgacaacttggtgagctttgctgagcatcacaaggtccagttgctggaagcctcatcatcatcatcatcagggttaggatcatcacctagcccatcatcatccacccccaggagaagaccatctgctgaccacagttataagccaaaacccagagccaagaaggaaacggacggaggaggaaaagaaattcaggcgaagagcaaagtatttcctggccacacaactcgttgcagttcttgtgttcctttcgctgatgggtggggttgatagttccgagctagacgacgaagatggcttggattatgatgattagatcctccctgtgctgttacacttgattagttccaaggacaaactgcctggttggttcggggtgctgtgagaatttgttccaacactggaaaatgtgttacgcttgattttagctaggaattcactgagttggtcacccatcggcagtttcataagctacttcggctgtaaacatacttgtctctgaaggttttttttttttgggcttcagtgaaccaaacttgtaagcaaattcgaattttggagttttgg

SEQ ID NO: 15878 - protein, 277 aa, Zea mays subsp. mays
  peptide (1)..(277): Ceres Seq. ID no. 12390164
  misc_feature (1)..(198): Homolog of NCBI NO: 18606009 NR Description: metaxin [Mus musculus]
  misc_feature (1)..(198): Homolog of NCBI NO: 7305291 NR Description: metaxin 1; metaxin [Mus musculus]
  misc_feature (1)..(195): Homolog of NCBI NO: 34855231 NR Description: similar to metaxin 2 [Rattus norvegicus]
  misc_feature (1)..(202): Homolog of NCBI NO: 630753 NR Description: ZC97.1 protein - Caenorhabditis elegans
  misc_feature (1)..(195): Homolog of NCBI NO: 5729937 NR Description: metaxin 2 [Homo sapiens]
  misc_feature (1)..(195): Homolog of NCBI NO: 23271051 NR Description: Unknown (protein for MGC:29603) [Homo sapiens]
  misc_feature (1)..(17): Homolog of NCBI NO: 34898420 NR Description: Similar to Arabidopsis thaliana chromosome II BAC
  misc_feature (1)..(202): Homolog of NCBI NO: 17556801 NR Description: Putative cytoplasmic protein of ancient origin
  misc_feature (1)..(202): Homolog of NCBI NO: 39581681 NR Description: Hypothetical protein CBG00033 [Caenorhabditis
  misc_feature (1)..(259): Homolog of NCBI NO: 18398935 NR Description: expressed protein
MAQVPFDIHVDTSFPDADHIPYVEFGDCVAFNNEKGGVIEYLKDEKIVDLNSNHPNISSTTVLDTKAMVSSWLANALLYELWVVSDGSIANDIYFSDLPWPIGKILHWNKTRHVKQLLGITKLNAAEKEEEIYQKASAAYESLSFRLGDQVFLFDNSPTDVDALFLGHVLFVLSALPDTSVLRGTLQKHDNLVSFAEHHKVQLLEASSSSSSGLGSSPSPSSSTPRRRPSADHSYKPKPRAKKETDGGGKEIQAKSKVFPGHTTRCSSCVPFADGWG

SEQ ID NO: 15879 - protein, 210 aa, Zea mays subsp. mays
  peptide (1)..(210): Ceres Seq. ID no. 12390165
  misc_feature (1)..(196): Homolog of NCBI NO: 24308336 NR Description: hypothetical protein MGC2817 [Homo sapiens]
  misc_feature (1)..(131): Homolog of NCBI NO: 18606009 NR Description: metaxin [Mus musculus]
  misc_feature (1)..(131): Homolog of NCBI NO: 7305291 NR Description: metaxin 1; metaxin [Mus musculus]
  misc_feature (1)..(128): Homolog of NCBI NO: 34855231 NR Description: similar to metaxin 2 [Rattus norvegicus]
  misc_feature (1)..(135): Homolog of NCBI NO: 630753 NR Description: ZC97.1 protein - Caenorhabditis elegans
  misc_feature (1)..(128): Homolog of NCBI NO: 5729937 NR Description: metaxin 2 [Homo sapiens]
  misc_feature (1)..(128): Homolog of NCBI NO: 23271051 NR Description: Unknown (protein for MGC:29603) [Homo sapiens]
  misc_feature (1)..(135): Homolog of NCBI NO: 17556801 NR Description: Putative cytoplasmic protein of ancient origin
  misc_feature (1)..(135): Homolog of NCBI NO: 39581681 NR Description: Hypothetical protein CBG00033 [Caenorhabditis
  misc_feature (1)..(192): Homolog of NCBI NO: 18398935 NR Description: expressed protein
MVSSWLANALLYELWVVSDGSIANDIYFSDLPWPIGKILHWNKTRHVKQLLGITKLNAAEKEEEIYQKASAAYESLSFRLGDQVFLFDNSPTDVDALFLGHVLFVLSALPDTSVLRGTLQKHDNLVSFAEHHKVQLLEASSSSSSGLGSSPSPSSSTPRRRPSADHSYKPKPRAKKETDGGGKEIQAKSKVFPGHTTRCSSCVPFADGWG

SEQ ID NO: 15880 - DNA, 1721 bp, Zea mays subsp. mays; identical to SEQ ID NO: 9031
  misc_feature (1)..(1721): Ceres Seq. ID no. 12362091
  misc_feature: MA Experiment ID: 108528 Result: Up-regulated in Transcription
  misc_feature: MA Experiment 108528 PARAMETER Experiment Name: Zm_Imbibed_Seeds_P Parameter: Age (day) Value: 5 vs. 2
  misc_feature: MA Experiment 108528 PARAMETER Experiment Name: Zm_Imbibed_Seeds_P Parameter: Organism Value: Zea mays
  misc_feature: MA Experiment 108528 PARAMETER Experiment Name: Zm_Imbibed_Seeds_P Parameter: Plant Line Value: 35A19
  misc_feature: MA Experiment 108528 PARAMETER Experiment Name: Zm_Imbibed_Seeds_P Parameter: Tissue Value: Aerial vs. Embryo
  misc_feature: MA Experiment ID: 108529 Result: Down-regulated in Transcription
  misc_feature: MA Experiment 108529 PARAMETER Experiment Name: Zm_Imbibed_Seeds_P Parameter: Age (day) Value: 5 vs. 2
  misc_feature: MA Experiment 108529 PARAMETER Experiment Name: Zm_Imbibed_Seeds_P Parameter: Organism Value: Zea mays
  misc_feature: MA Experiment 108529 PARAMETER Experiment Name: Zm_Imbibed_Seeds_P Parameter: Plant Line Value: 35A19
  misc_feature: MA Experiment 108529 PARAMETER Experiment Name: Zm_Imbibed_Seeds_P Parameter: Tissue Value: Roots vs. Embryo
  misc_feature: MA Experiment ID: 108530 Result: Up-regulated in Transcription
  misc_feature: MA Experiment 108530 PARAMETER Experiment Name: Zm_Imbibed_Seeds_P Parameter: Age (day) Value: 6 vs. 2
  misc_feature: MA Experiment 108530 PARAMETER Experiment Name: Zm_Imbibed_Seeds_P Parameter: Organism Value: Zea mays
  misc_feature: MA Experiment 108530 PARAMETER Experiment Name: Zm_Imbibed_Seeds_P Parameter: Plant Line Value: 35A19
  misc_feature: MA Experiment 108530 PARAMETER Experiment Name: Zm_Imbibed_Seeds_P Parameter: Tissue Value: Aerial vs. Embryo
  misc_feature: MA Experiment ID: 108535 Result: Up-regulated in Transcription
  misc_feature: MA Experiment 108535 PARAMETER Experiment Name: Zm_Meristem_P Parameter: Age (day) Value: 8
  misc_feature: MA Experiment 108535 PARAMETER Experiment Name: Zm_Meristem_P Parameter: Organism Value: Zea mays
  misc_feature: MA Experiment 108535 PARAMETER Experiment Name: Zm_Meristem_P Parameter: Plant Line Value: 35A19
  misc_feature: MA Experiment 108535 PARAMETER Experiment Name: Zm_Meristem_P Parameter: Tissue Value: Root Meristem vs. Above Root Meristem
  misc_feature: MA Experiment ID: 108545 Result: Up-regulated in Transcription
  misc_feature: MA Experiment 108545 PARAMETER Experiment Name: Zm_Imbibed_Seeds_P Parameter: Age (day) Value: 3 vs. 2
  misc_feature: MA Experiment 108545 PARAMETER Experiment Name: Zm_Imbibed_Seeds_P Parameter: Organism Value: Zea mays
  misc_feature: MA Experiment 108545 PARAMETER Experiment Name: Zm_Imbibed_Seeds_P Parameter: Plant Line Value: 35A19
  misc_feature: MA Experiment 108545 PARAMETER Experiment Name: Zm_Imbibed_Seeds_P Parameter: Tissue Value: Aerial vs. Embryo
  misc_feature: MA Experiment ID: 108546 Result: Down-regulated in Transcription
  misc_feature: MA Experiment 108546 PARAMETER Experiment Name: Zm_Imbibed_Seeds_P Parameter: Age (day) Value: 3 vs. 2
  misc_feature: MA Experiment 108546 PARAMETER Experiment Name: Zm_Imbibed_Seeds_P Parameter: Organism Value: Zea mays
  misc_feature: MA Experiment 108546 PARAMETER Experiment Name: Zm_Imbibed_Seeds_P Parameter: Plant Line Value: 35A19
  misc_feature: MA Experiment 108546 PARAMETER Experiment Name: Zm_Imbibed_Seeds_P Parameter: Tissue Value: Roots vs. Embryo
  misc_feature: MA Experiment ID: 108547 Result: Up-regulated in Transcription
  misc_feature: MA Experiment 108547 PARAMETER Experiment Name: Zm_Imbibed_Seeds_P Parameter: Age (day) Value: 4 vs. 2
  misc_feature: MA Experiment 108547 PARAMETER Experiment Name: Zm_Imbibed_Seeds_P Parameter: Organism Value: Zea mays
  misc_feature: MA Experiment 108547 PARAMETER Experiment Name: Zm_Imbibed_Seeds_P Parameter: Plant Line Value: 35A19
  misc_feature: MA Experiment 108547 PARAMETER Experiment Name: Zm_Imbibed_Seeds_P Parameter: Tissue Value: Aerial vs. Embryo
  misc_feature: MA Experiment ID: 108597 Result: Down-regulated in Transcription
  misc_feature: MA Experiment 108597 PARAMETER Experiment Name: Zm_100uM_ABA_P Parameter: Age (day) Value: 9
  misc_feature: MA Experiment 108597 PARAMETER Experiment Name: Zm_100uM_ABA_P Parameter: Organism Value: Zea mays
  misc_feature: MA Experiment 108597 PARAMETER Experiment Name: Zm_100uM_ABA_P Parameter: Plant Line Value: 35A19
  misc_feature: MA Experiment 108597 PARAMETER Experiment Name: Zm_100uM_ABA_P Parameter: Timepoint (hr) Value: 24
  misc_feature: MA Experiment 108597 PARAMETER Experiment Name: Zm_100uM_ABA_P Parameter: Tissue Value: Aerial
  misc_feature: MA Experiment 108597 PARAMETER Experiment Name: Zm_100uM_ABA_P Parameter: Treatment Value: 100uM ABA vs. No Treatment
  misc_feature: MA Experiment ID: 20000535 Result: Down-regulated in Transcription
  misc_feature: MA Experiment 20000535 PARAMETER Experiment Name: Zm_Hybrid_Seed_Dev_P Parameter: DAP Value: 30 vs. 12
  misc_feature: MA Experiment 20000535 PARAMETER Experiment Name: Zm_Hybrid_Seed_Dev_P Parameter: Organism Value: Zea mays
  misc_feature: MA Experiment 20000535 PARAMETER Experiment Name: Zm_Hybrid_Seed_Dev_P Parameter: Plant Line Value: 35A19
  misc_feature: MA Experiment 20000535 PARAMETER Experiment Name: Zm_Hybrid_Seed_Dev_P Parameter: Tissue Value: Embryo vs. Unfert Floret

SEQ ID NO: 15881 - protein, 206 aa, Zea mays subsp. mays; identical to SEQ ID NO: 9032
  peptide (1)..(206): Ceres Seq. ID no. 12362092
  misc_feature (1)..(39): Homolog of NCBI NO: 11994159 NR Description: gb|AAD20688.1~gene_id:MQP17.5~similar to unknown
  misc_feature (168)..(196): Homolog of NCBI NO: 11994159 NR Description: gb|AAD20688.1~gene_id:MQP17.5~similar to unknown
  misc_feature (1)..(39): Homolog of NCBI NO: 15231653 NR Description: hypothetical protein; protein id: At3g26932.1
  misc_feature (168)..(196): Homolog of NCBI NO: 15231653 NR Description: hypothetical protein; protein id: At3g26932.1
  misc_feature (1)..(199): Homolog of NCBI NO: 37535422 NR Description: putative extensin [Oryza sativa (japonica
  misc_feature (1)..(186): Homolog of NCBI NO: 30693732 NR Description: expressed protein [Arabidopsis thaliana]
  misc_feature (1)..(169): Homolog of NCBI NO: 18401724 NR Description: expressed protein; protein id: At2g28380.1, by cDNA: gi_14334605, supported by cDNA: gi_17065633 [Arabidopsis >gi|25407980|pir||B84684 hypothetical protein At2g28380
  misc_feature (1)..(43): Homolog of NCBI NO: 40788412 NR Description: hypothetical protein [Oryza sativa (japonica
  misc_feature (1)..(186): Homolog of NCBI NO: 9759153 NR Description: gb|AAD20688.1~gene_id:MEE6.14~similar to unknown
  misc_feature (1)..(12): Homolog of NCBI NO: 9229939 NR Description: dsRNA-binding protein ODB1 [Oryza sativa

SEQ ID NO: 15882 - protein, 197 aa, Zea mays subsp. mays; identical to SEQ ID NO: 9033
  peptide (1)..(197): Ceres Seq. ID no. 12362093
  misc_feature (1)..(30): Homolog of NCBI NO: 11994159 NR Description: gb|AAD20688.1~gene_id:MQP17.5~similar to unknown
  misc_feature (159)..(187): Homolog of NCBI NO: 11994159 NR Description: gb|AAD20688.1~gene_id:MQP17.5~similar to unknown
  misc_feature (1)..(30): Homolog of NCBI NO: 15231653 NR Description: hypothetical protein; protein id: At3g26932.1
  misc_feature (159)..(187): Homolog of NCBI NO: 15231653 NR Description: hypothetical protein; protein id: At3g26932.1
  misc_feature (1)..(190): Homolog of NCBI NO: 37535422 NR Description: putative extensin [Oryza sativa (japonica
  misc_feature (1)..(177): Homolog of NCBI NO: 30693732 NR Description: expressed protein [Arabidopsis thaliana]
  misc_feature (1)..(160): Homolog of NCBI NO: 18401724 NR Description: expressed protein; protein id: At2g28380.1, by cDNA: gi_14334605, supported by cDNA: gi_17065633 [Arabidopsis >gi|25407980|pir||B84684 hypothetical protein At2g28380
  misc_feature (1)..(34): Homolog of NCBI NO: 40788412 NR Description: hypothetical protein [Oryza sativa (japonica
  misc_feature (1)..(177): Homolog of NCBI NO: 9759153 NR Description: gb|AAD20688.1~gene_id:MEE6.14~similar to unknown
  misc_feature (1)..(13): Homolog of NCBI NO: 15231653 NR Description: hypothetical protein; protein id: At3g26932.1

SEQ ID NO: 15883 - protein, 142 aa, Zea mays subsp. mays; identical to SEQ ID NO: 9034
  peptide (1)..(142): Ceres Seq. ID no. 12362094
  misc_feature (1)..(142): Homolog of NCBI NO: 40788412 NR Description: hypothetical protein [Oryza sativa (japonica
  misc_feature (1)..(47): Homolog of NCBI NO: 40788412 NR Description: hypothetical protein [Oryza sativa (japonica

SEQ ID NO: 15884 - DNA, 856 bp, Zea mays subsp. mays
  misc_feature (1)..(856): Ceres Seq. ID no. 12355354
  misc_feature: MA Experiment ID: 108528 Result: Down-regulated in Transcription
  misc_feature: MA Experiment 108528 PARAMETER Experiment Name: Zm_Imbibed_Seeds_P Parameter: Age (day) Value: 5 vs. 2
  misc_feature: MA Experiment 108528 PARAMETER Experiment Name: Zm_Imbibed_Seeds_P Parameter: Organism Value: Zea mays
  misc_feature: MA Experiment 108528 PARAMETER Experiment Name: Zm_Imbibed_Seeds_P Parameter: Plant Line Value: 35A19
  misc_feature: MA Experiment 108528 PARAMETER Experiment Name: Zm_Imbibed_Seeds_P Parameter: Tissue Value: Aerial vs. Embryo
  misc_feature: MA Experiment ID: 108547 Result: Down-regulated in Transcription
  misc_feature: MA Experiment 108547 PARAMETER Experiment Name: Zm_Imbibed_Seeds_P Parameter: Age (day) Value: 4 vs. 2
  misc_feature: MA Experiment 108547 PARAMETER Experiment Name: Zm_Imbibed_Seeds_P Parameter: Organism Value: Zea mays
  misc_feature: MA Experiment 108547 PARAMETER Experiment Name: Zm_Imbibed_Seeds_P Parameter: Plant Line Value: 35A19
  misc_feature: MA Experiment 108547 PARAMETER Experiment Name: Zm_Imbibed_Seeds_P Parameter: Tissue Value: Aerial vs. Embryo
aatggttccatttcttatgtcacgtccaaattggaaattccatcacgcctcgccctcgccctcgccctcgccgtccccgaccagaatcgtcacttcgtccggctccggcgatctcctccaccgccgttgtcagcggtccggccgagatggggagcacttcctctatgctcatccaatacgatatcgaggaggtccaggaccattgtaaccacgcattctcgcagcaggagatcgtgtcgctgtaccaccgcttctgtcagctcgaccgcaacggaggtggcttcgtctccgctgacgagttcatgtcggtacctgagttcgccgtaaatcccctctcccagaggctcctgaggatgctggatggtctcaacttcaaggagtttgtagcatttttgtcggcttttagcccccgcacaagcctacaggaaaagattgaatttattttcagggtttatgatactgactgcaacgggaaggttgcttttgatgacatcttaagcatcttgcgagatctgacaggttcatttatgacagagcaacagagacagaaagtcttgactcatgtgttagaagaagctgggtacacaaaaaattcacatttcacactcccagactttatgaagattattggcaattctgagctcaagatggaggttgaagttcctattgactaaaaaccaaataagtatcatctagttgtatcgtgatgtgttgccgagagccccagacctgtatgttcatttgtgttgaattaagtctatggtgtatttatatccttgtaaatcaaatcatgatcatagatgtaattaaggaaacaaatgtacctgttatttggaggattagttgacttgcgctg

SEQ ID NO: 15885 - protein, 223 aa, Zea mays subsp. mays
  peptide (1)..(223): Ceres Seq. ID no. 12355355
  misc_feature (79)..(107): Pfam Name: EF hand Pfam Description: EF hand
  misc_feature (72)..(218): Homolog of NCBI NO: 3929338 NR Description: Calcineurin B subunit (Protein phosphatase 2B
  misc_feature (49)..(136): Homolog of NCBI NO: 39593284 NR Description: Hypothetical protein CBG09544 [Caenorhabditis
  misc_feature (122)..(220): Homolog of NCBI NO: 39593284 NR Description: Hypothetical protein CBG09544 [Caenorhabditis
  misc_feature (49)..(136): Homolog of NCBI NO: 17566934 NR Description: Calcium binding protein P22 like family member,
  misc_feature (122)..(220): Homolog of NCBI NO: 17566934 NR Description: Calcium binding protein P22 like family member,
  misc_feature (49)..(213): Homolog of NCBI NO: 13445166 NR Description: calcineurin B [Dictyostelium discoideum]
  misc_feature (49)..(220): Homolog of NCBI NO: 1168750 NR Description: Calcineurin B subunit (Protein phosphatase 2B
  misc_feature (49)..(223): Homolog of NCBI NO: 21592761 NR Description: calcineurin-like protein [Arabidopsis thaliana]
  misc_feature (49)..(223): Homolog of NCBI NO: 18401887 NR Description: expressed protein
  misc_feature (49)..(223): Homolog of NCBI NO: 16550928 NR Description: calcineurin-like protein [Eucalyptus grandis]
WFHFLCHVQIGNSITPRPRPRPRRPRPESSLRPAPAISSTAVVSGPAEMGSTSSMLIQYDIEEVQDHCNHAFSQQEIVSLYHRFCQLDRNGGGFVSADEFMSVPEFAVNPLSQRLLRMLDGLNFKEFVAFLSAFSPRTSLQEKIEFIFRVYDTDCNGKVAFDDILSILRDLTGSFMTEQQRQKVLTHVLEEAGYTKNSHFTLPDFMKIIGNSELKMEVEVPID

SEQ ID NO: 15886 - protein, 175 aa, Zea mays subsp. mays
  peptide (1)..(175): Ceres Seq. ID no. 12355356
  misc_feature (31)..(59): Pfam Name: EF hand Pfam Description: EF hand
  misc_feature (24)..(170): Homolog of NCBI NO: 3929338 NR Description: Calcineurin B subunit (Protein phosphatase 2B
  misc_feature (1)..(88): Homolog of NCBI NO: 39593284 NR Description: Hypothetical protein CBG09544 [Caenorhabditis
  misc_feature (74)..(172): Homolog of NCBI NO: 39593284 NR Description: Hypothetical protein CBG09544 [Caenorhabditis
  misc_feature (1)..(88): Homolog of NCBI NO: 17566934 NR Description: Calcium binding protein P22 like family member,
  misc_feature (74)..(172): Homolog of NCBI NO: 17566934 NR Description: Calcium binding protein P22 like family member,
  misc_feature (1)..(165): Homolog of NCBI NO: 13445166 NR Description: calcineurin B [Dictyostelium discoideum]
  misc_feature (1)..(172): Homolog of NCBI NO: 1168750 NR Description: Calcineurin B subunit (Protein phosphatase 2B
  misc_feature (1)..(175): Homolog of NCBI NO: 21592761 NR Description: calcineurin-like protein [Arabidopsis thaliana]
  misc_feature (1)..(175): Homolog of NCBI NO: 18401887 NR Description: expressed protein
  misc_feature (1)..(175): Homolog of NCBI NO: 16550928 NR Description: calcineurin-like protein [Eucalyptus grandis]
MGSTSSMLIQYDIEEVQDHCNHAFSQQEIVSLYHRFCQLDRNGGGFVSADEFMSVPEFAVNPLSQRLLRMLDGLNFKEFVAFLSAFSPRTSLQEKIEFIFRVYDTDCNGKVAFDDILSILRDLTGSFMTEQQRQKVLTHVLEEAGYTKNSHFTLPDFMKIIGNSELKMEVEVPID

SEQ ID NO: 15887 - protein, 169 aa, Zea mays subsp. mays
  peptide (1)..(169): Ceres Seq. ID no. 12355357
  misc_feature (25)..(53): Pfam Name: EF hand Pfam Description: EF hand
  misc_feature (1)..(159): Homolog of NCBI NO: 13445166 NR Description: calcineurin B [Dictyostelium discoideum]
  misc_feature (1)..(166): Homolog of NCBI NO: 1168750 NR Description: Calcineurin B subunit (Protein phosphatase 2B
  misc_feature (1)..(169): Homolog of NCBI NO: 21592761 NR Description: calcineurin-like protein [Arabidopsis thaliana]
  misc_feature (1)..(82): Homolog of NCBI NO: 39593284 NR Description: Hypothetical protein CBG09544 [Caenorhabditis
  misc_feature (1)..(82): Homolog of NCBI NO: 17566934 NR Description: Calcium binding protein P22 like family member,
  misc_feature (68)..(166): Homolog of NCBI NO: 17566934 NR Description: Calcium binding protein P22 like family member,
  misc_feature (68)..(166): Homolog of NCBI NO: 39593284 NR Description: Hypothetical protein CBG09544 [Caenorhabditis
  misc_feature (18)..(164): Homolog of NCBI NO: 3929338 NR Description: Calcineurin B subunit (Protein phosphatase 2B
  misc_feature (1)..(169): Homolog of NCBI NO: 18401887 NR Description: expressed protein
  misc_feature (1)..(169): Homolog of NCBI NO: 16550928 NR Description: calcineurin-like protein [Eucalyptus grandis]
MLIQYDIEEVQDHCNHAFSQQEIVSLYHRFCQLDRNGGGFVSADEFMSVPEFAVNPLSQRLLRMLDGLNFKEFVAFLSAFSPRTSLQEKIEFIFRVYDTDCNGKVAFDDILSILRDLTGSFMTEQQRQKVLTHVLEEAGYTKNSHFTLPDFMKIIGNSELKMEVEVPID

SEQ ID NO: 15888 - DNA, 777 bp, Zea mays subsp. mays
  misc_feature (1)..(777): Ceres Seq. ID no. 12360038
  misc_feature: MA Experiment ID: 108526 Result: Up-regulated in Transcription
  misc_feature: MA Experiment 108526 PARAMETER Experiment Name: Zm_5mM_NO_P Parameter: Age (day) Value: 8
  misc_feature: MA Experiment 108526 PARAMETER Experiment Name: Zm_5mM_NO_P Parameter: Organism Value: Zea mays
  misc_feature: MA Experiment 108526 PARAMETER Experiment Name: Zm_5mM_NO_P Parameter: Plant Line Value: 35A19
  misc_feature: MA Experiment 108526 PARAMETER Experiment Name: Zm_5mM_NO_P Parameter: Timepoint (hr) Value: 1
  misc_feature: MA Experiment 108526 PARAMETER Experiment Name: Zm_5mM_NO_P Parameter: Tissue Value: Aerial
  misc_feature: MA Experiment 108526 PARAMETER Experiment Name: Zm_5mM_NO_P Parameter: Treatment Value: 5mM NO vs. No Treatment
  misc_feature: MA Experiment ID: 108527 Result: Up-regulated in Transcription
  misc_feature: MA Experiment 108527 PARAMETER Experiment Name: Zm_5mM_NO_P Parameter: Age (day) Value: 8
  misc_feature: MA Experiment 108527 PARAMETER Experiment Name: Zm_5mM_NO_P Parameter: Organism Value: Zea mays
  misc_feature: MA Experiment 108527 PARAMETER Experiment Name: Zm_5mM_NO_P Parameter: Plant Line Value: 35A19
  misc_feature: MA Experiment 108527 PARAMETER Experiment Name: Zm_5mM_NO_P Parameter: Timepoint (hr) Value: 6
  misc_feature: MA Experiment 108527 PARAMETER Experiment Name: Zm_5mM_NO_P Parameter: Tissue Value: Aerial
  misc_feature: MA Experiment 108527 PARAMETER Experiment Name: Zm_5mM_NO_P Parameter: Treatment Value: 5mM NO vs. No Treatment
  misc_feature: MA Experiment ID: 108529 Result: Up-regulated in Transcription
  misc_feature: MA Experiment 108529 PARAMETER Experiment Name: Zm_Imbibed_Seeds_P Parameter: Age (day) Value: 5 vs. 2
  misc_feature: MA Experiment 108529 PARAMETER Experiment Name: Zm_Imbibed_Seeds_P Parameter: Organism Value: Zea mays
  misc_feature: MA Experiment 108529 PARAMETER Experiment Name: Zm_Imbibed_Seeds_P Parameter: Plant Line Value: 35A19
  misc_feature: MA Experiment 108529 PARAMETER Experiment Name: Zm_Imbibed_Seeds_P Parameter: Tissue Value: Roots vs. Embryo
  misc_feature: MA Experiment ID: 108535 Result: Down-regulated in Transcription
  misc_feature: MA Experiment 108535 PARAMETER Experiment Name: Zm_Meristem_P Parameter: Age (day) Value: 8
  misc_feature: MA Experiment 108535 PARAMETER Experiment Name: Zm_Meristem_P Parameter: Organism Value: Zea mays
  misc_feature: MA Experiment 108535 PARAMETER Experiment Name: Zm_Meristem_P Parameter: Plant Line Value: 35A19
  misc_feature: MA Experiment 108535 PARAMETER Experiment Name: Zm_Meristem_P Parameter: Tissue Value: Root Meristem vs. Above Root Meristem
  misc_feature: MA Experiment ID: 108543 Result: Up-regulated in Transcription
  misc_feature: MA Experiment ID: 108545 Result: Down-regulated in Transcription
  misc_feature: MA Experiment 108545 PARAMETER Experiment Name: Zm_Imbibed_Seeds_P Parameter: Age (day) Value: 3 vs. 2
  misc_feature: MA Experiment 108545 PARAMETER Experiment Name: Zm_Imbibed_Seeds_P Parameter: Organism Value: Zea mays
  misc_feature: MA Experiment 108545 PARAMETER Experiment Name: Zm_Imbibed_Seeds_P Parameter: Plant Line Value: 35A19
  misc_feature: MA Experiment 108545 PARAMETER Experiment Name: Zm_Imbibed_Seeds_P Parameter: Tissue Value: Aerial vs. Embryo
  misc_feature: MA Experiment ID: 108546 Result: Up-regulated in Transcription
  misc_feature: MA Experiment 108546 PARAMETER Experiment Name: Zm_Imbibed_Seeds_P Parameter: Age (day) Value: 3 vs. 2
  misc_feature: MA Experiment 108546 PARAMETER Experiment Name: Zm_Imbibed_Seeds_P Parameter: Organism Value: Zea mays
  misc_feature: MA Experiment 108546 PARAMETER Experiment Name: Zm_Imbibed_Seeds_P Parameter: Plant Line Value: 35A19
  misc_feature: MA Experiment 108546 PARAMETER Experiment Name: Zm_Imbibed_Seeds_P Parameter: Tissue Value: Roots vs. Embryo
  misc_feature: MA Experiment ID: 108559 Result: Up-regulated in Transcription
  misc_feature: MA Experiment 108559 PARAMETER Experiment Name: Zm_5mM_NO_P Parameter: Age (day) Value: 8
  misc_feature: MA Experiment 108559 PARAMETER Experiment Name: Zm_5mM_NO_P Parameter: Organism Value: Zea mays
  misc_feature: MA Experiment 108559 PARAMETER Experiment Name: Zm_5mM_NO_P Parameter: Plant Line Value: 35A19
  misc_feature: MA Experiment 108559 PARAMETER Experiment Name: Zm_5mM_NO_P Parameter: Timepoint (hr) Value: 12
  misc_feature: MA Experiment 108559 PARAMETER Experiment Name: Zm_5mM_NO_P Parameter: Tissue Value: Aerial
  misc_feature: MA Experiment 108559 PARAMETER Experiment Name: Zm_5mM_NO_P Parameter: Treatment Value: 5mM NO vs. No Treatment
  misc_feature: MA Experiment ID: 108689 Result: Down-regulated in Transcription
  misc_feature: MA Experiment 108689 PARAMETER Experiment Name: Zm_Drought_Roots_P Parameter: Age (day) Value: 9
  misc_feature: MA Experiment 108689 PARAMETER Experiment Name: Zm_Drought_Roots_P Parameter: Organism Value: Zea mays
  misc_feature: MA Experiment 108689 PARAMETER Experiment Name: Zm_Drought_Roots_P Parameter: Plant Line Value: 35A19
  misc_feature: MA Experiment 108689 PARAMETER Experiment Name: Zm_Drought_Roots_P Parameter: Timepoint (hr) Value: 24
  misc_feature: MA Experiment 108689 PARAMETER Experiment Name: Zm_Drought_Roots_P Parameter: Tissue Value: Roots
  misc_feature: MA Experiment 108689 PARAMETER Experiment Name: Zm_Drought_Roots_P Parameter: Treatment Value: Drought vs. No Drought
  misc_feature: MA Experiment ID: 20000488 Result: Down-regulated in Transcription
  misc_feature: MA Experiment 20000488 PARAMETER Experiment Name: Zm_50mM_NH4NO3_L_to_H_P Parameter: Organism Value: Zea mays
  misc_feature: MA Experiment 20000488 PARAMETER Experiment Name: Zm_50mM_NH4NO3_L_to_H_P Parameter: Timepoint (hr) Value: 8
  misc_feature: MA Experiment 20000488 PARAMETER Experiment Name: Zm_50mM_NH4NO3_L_to_H_P Parameter: Tissue Value: Leaves
  misc_feature: MA Experiment 20000488 PARAMETER Experiment Name: Zm_50mM_NH4NO3_L_to_H_P Parameter: Treatment Value: 50mM NH4NO3 vs. 100mM Mannitol
  misc_feature: MA Experiment ID: 20000492 Result: Down-regulated in Transcription
  misc_feature: MA Experiment 20000492 PARAMETER Experiment Name: Zm_Hybrid_Seed_Dev_P Parameter: DAP Value: 12
  misc_feature: MA Experiment 20000492 PARAMETER Experiment Name: Zm_Hybrid_Seed_Dev_P Parameter: Organism Value: Zea mays
  misc_feature: MA Experiment 20000492 PARAMETER Experiment Name: Zm_Hybrid_Seed_Dev_P Parameter: Plant Line Value: 35A19
  misc_feature: MA Experiment 20000492 PARAMETER Experiment Name: Zm_Hybrid_Seed_Dev_P Parameter: Tissue Value: Fert Kernel vs. Unfert Floret
aaaacgcaaccgcagccgcagccacagcacagcacaacacgtcggcatgtatccgcccaaggccagcgatccggccgccggggcggcgccggtgactggcttccccgtcggcgggcctgccgcctcctcccagtggtcatccggcctgttggactgcttcgacgactgcggcctctgctgcctgacgtgctggtgcccgtgcatcacgttcgggcgcgtggcggagatcgtggaccgcggcgcgacgtcgtgcggcacggcgggggcgctgtacgcggtgctggcctacttcacgggctgccagtggatctactcgtgcacgtaccgcgccaagatgcgcgcccagctcggcctccccgagaccccctgctgcgactgcctcgtccacttctgctgcgagccgtgcgcgctctgccagcagtacaaggagctcaaggcccgcggcttcgaccccgacctcggctgggaacgcaacgccactatcactatgctgcctccgtccgcacaggggatggggcgctgaccgctgaccggccggccagcctctgcgtaaataaataattaatgcttatatatgtatgtacgtgtttctttcagccggaacaaaatctctatatatatgtcgtgtcaagatcagcatcgggccgtacgttcgtttttgtactgtgttccttgtgtcctccgttccgaataaacaataatatatatatatatatatatatatatatatgacatgtaatatttatatattgcttgcattggtggtgcaccaccttt

SEQ ID NO: 15889 - protein, 186 aa, Zea mays subsp. mays
  peptide (1)..(186): Ceres Seq. ID no. 12360039
  misc_feature (104)..(186): Homolog of NCBI NO: 31249752 NR Description: hypothetical protein [Oryza sativa (japonica
  misc_feature (104)..(159): Homolog of NCBI NO: 34897272 NR Description: hypothetical protein [Oryza sativa (japonica
KTQPQPQPQHSTTRRHVSAQGQRSGRRGGAGDWLPRRRACRLLPVVIRPVGLLRRLRPLLPDVLVPVHHVRARGGDRGPRRDVVRHGGGAVRGAGLLHGLPVDLLVHVPRQDARPARPPRDPLLRLPRPLLLRAVRALPAVQGAQGPRLRPRPRLGTQRHYHYAASVRTGDGALTADRPASLCVNK

SEQ ID NO: 15890 - protein, 173 aa, Zea mays subsp. mays
  peptide (1)..(173): Ceres Seq. ID no. 12360040
  misc_feature (41)..(145): Pfam Name: Protein of unknown function, DUF614 Pfam Description: Protein of unknown function, DUF614
  misc_feature (16)..(173): Homolog of NCBI NO: 8272626 NR Description: ORFX [Lycopersicon esculentum]
  misc_feature (44)..(171): Homolog of NCBI NO: 15229654 NR Description: hypothetical protein
  misc_feature (16)..(173): Homolog of NCBI NO: 27414005 NR Description: fw2.2 [Lycopersicon pimpinellifolium]
  misc_feature (35)..(168): Homolog of NCBI NO: 15221456 NR Description: hypothetical protein; protein id: At1g68610.1
  misc_feature (16)..(104): Homolog of NCBI NO: 31249752 NR Description: hypothetical protein [Oryza sativa (japonica
  misc_feature (39)..(158): Homolog of NCBI NO: 15223920 NR Description: unknown protein
  misc_feature (24)..(104): Homolog of NCBI NO: 34897272 NR Description: hypothetical protein [Oryza sativa (japonica
  misc_feature (39)..(173): Homolog of NCBI NO: 34897268 NR Description: unknown protein [Oryza sativa (japonica
  misc_feature (28)..(173): Homolog of NCBI NO: 34897270 NR Description: hypothetical protein [Oryza sativa (japonica
  misc_feature (28)..(173): Homolog of NCBI NO: 34897274 NR Description: hypothetical protein [Oryza sativa (japonica
KRNRSRSHSTAQHVGMYPPKASDPAAGAAPVTGFPVGGPAASSQWSSGLLDCFDDCGLCCLTCWCPCITFGRVAEIVDRGATSCGTAGALYAVLAYFTGCQWIYSCTYRAKMRAQLGLPETPCCDCLVHFCCEPCALCQQYKELKARGFDPDLGWERNATITMLPPSAQGMGR

SEQ ID NO: 15891 - protein, 158 aa, Zea mays subsp. mays
  peptide (1)..(158): Ceres Seq. ID no. 12360041
  misc_feature (26)..(130): Pfam Name: Protein of unknown function, DUF614 Pfam Description: Protein of unknown function, DUF614
  misc_feature (1)..(158): Homolog of NCBI NO: 8272626 NR Description: ORFX [Lycopersicon esculentum]
  misc_feature (29)..(156): Homolog of NCBI NO: 15229654 NR Description: hypothetical protein
  misc_feature (1)..(158): Homolog of NCBI NO: 27414005 NR Description: fw2.2 [Lycopersicon pimpinellifolium]
  misc_feature (20)..(153): Homolog of NCBI NO: 15221456 NR Description: hypothetical protein; protein id: At1g68610.1
  misc_feature (1)..(89): Homolog of NCBI NO: 31249752 NR Description: hypothetical protein [Oryza sativa (japonica
  misc_feature (24)..(143): Homolog of NCBI NO: 15223920 NR Description: unknown protein
  misc_feature (9)..(89): Homolog of NCBI NO: 34897272 NR Description: hypothetical protein [Oryza sativa (japonica
  misc_feature (24)..(158): Homolog of NCBI NO: 34897268 NR Description: unknown protein [Oryza sativa (japonica
  misc_feature (13)..(158): Homolog of NCBI NO: 34897270 NR Description: hypothetical protein [Oryza sativa (japonica
  misc_feature (13)..(158): Homolog of NCBI NO: 34897274 NR Description: hypothetical protein [Oryza sativa (japonica
MYPPKASDPAAGAAPVTGFPVGGPAASSQWSSGLLDCFDDCGLCCLTCWCPCITFGRVAEIVDRGATSCGTAGALYAVLAYFTGCQWIYSCTYRAKMRAQLGLPETPCCDCLVHFCCEPCALCQQYKELKARGFDPDLGWERNATITMLPPSAQGMGR

SEQ ID NO: 15892 - DNA, 936 bp, Zea mays subsp. mays
  misc_feature (1)..(936): Ceres Seq. ID no. 12408110
  misc_feature: MA Experiment ID: 108544 Result: Up-regulated in Transcription
  misc_feature: MA Experiment ID: 108545 Result: Down-regulated in Transcription
  misc_feature: MA Experiment 108545 PARAMETER Experiment Name: Zm_Imbibed_Seeds_P Parameter: Age (day) Value: 3 vs. 2
  misc_feature: MA Experiment 108545 PARAMETER Experiment Name: Zm_Imbibed_Seeds_P Parameter: Organism Value: Zea mays
  misc_feature: MA Experiment 108545 PARAMETER Experiment Name: Zm_Imbibed_Seeds_P Parameter: Plant Line Value: 35A19
  misc_feature: MA Experiment 108545 PARAMETER Experiment Name: Zm_Imbibed_Seeds_P Parameter: Tissue Value: Aerial vs. Embryo
atctaaaaaacacctagcggaaaaagaaaaggaaaaaagtcgcccctccgttgggacctaattcacgcgtttcagggctcctcccatttcgtcggcttcgtttgtcgtcgtcgtaagctgcagctagtgtggactggagatccaccactccaccagtccggtccatctgctggacctcgattggtttcttcttacctaggaacatccggggatgtcgactcctgcgaggaagaggctgatgagggatttcaagcggttgatgcaggaccctccggccggcataagtggcgccccgcaggataacaacataatgctgtggaatgctgtcatatttggacctgatgataccccgtgggatggaggtacgtttaagctgactctccagtttaatgaagaatatccaaacaaaccaccaactgtgcgatttgtttctaggatgttccatcctaacatttatgctgatggaagcatatgcttagatatcctgcagaatcagtggagtccgatatatgatgtagctgcgatactcacgtcaatccagtcattgttgtgcgatccaaacccgaattcgcccgctaactctgaagccgcccgcatgttcagcgagaacaagcgagagtacaaccgcaaagttcgggaggtcgtggagcagagctggacggcggactgatgatgccctgtgttgcgtcgcgctgtgctgcgcagctgctcactgcgccccgcgtccgtccattccataccaaaaaaagaaaatggcaaagccgaactcagctgttgctgctttcgttgccctgtgtcaagacgactgcttctctatgaacattttaccttcctgtgctgtatctggaatacaaacttaattatctctagcactgtggcaacatcttatcttatatgaaatttcctccgggaaaacgagaatgatttgcttgggtg

SEQ ID NO: 15893 - protein, 152 aa, Zea mays subsp. mays
  peptide (1)..(152): Ceres Seq. ID no. 12408111
  misc_feature (1)..(149): Homolog of NCBI NO: 18424601 NR Description: E2, ubiquitin-conjugating enzyme 3 (UBC3)
  misc_feature (1)..(152): Homolog of NCBI NO: 18394114 NR Description: E2, ubiquitin-conjugating enzyme 1 (UBC1)
  misc_feature (1)..(152): Homolog of NCBI NO: 18844990 NR Description: Rad6 [Oryza sativa (japonica cultivar-group)]
  misc_feature (1)..(152): Homolog of NCBI NO: 136640 NR Description: Ubiquitin-conjugating enzyme E2-17 kDa
  misc_feature (1)..(152): Homolog of NCBI NO: 13516453 NR Description: ubiquitin-conjugating enzyme (E2) [Nicotiana
  misc_feature (1)..(152): Homolog of NCBI NO: 18395424 NR Description: E2, ubiquitin-conjugating enzyme 2 (UBC2)
  misc_feature (1)..(152): Homolog of NCBI NO: 464980 NR Description: Ubiquitin-conjugating enzyme E2-17 kDa
  misc_feature (1)..(152): Homolog of NCBI NO: 33146810 NR Description: OsRad6 [Oryza sativa (japonica cultivar-group)]
  misc_feature (1)..(152): Homolog of NCBI NO: 13516451 NR Description: ubiquitin-conjugating enzyme (E2) [Nicotiana
  misc_feature (1)..(152): Homolog of NCBI NO: 8118527 NR Description: ubiquitin conjugating protein [Avicennia marina]
MSTPARKRLMRDFKRLMQDPPAGISGAPQDNNIMLWNAVIFGPDDTPWDGGTFKLTLQFNEEYPNKPPTVRFVSRMFHPNIYADGSICLDILQNQWSPIYDVAAILTSIQSLLCDPNPNSPANSEAARMFSENKREYNRKVREVVEQSWTAD

SEQ ID NO: 15894 - protein, 143 aa, Zea mays subsp. mays
  peptide (1)..(143): Ceres Seq. ID no. 12408112
  misc_feature (1)..(140): Homolog of NCBI NO: 18424601 NR Description: E2, ubiquitin-conjugating enzyme 3 (UBC3)
  misc_feature (1)..(143): Homolog of NCBI NO: 18394114 NR Description: E2, ubiquitin-conjugating enzyme 1 (UBC1)
  misc_feature (1)..(143): Homolog of NCBI NO: 18844990 NR Description: Rad6 [Oryza sativa (japonica cultivar-group)]
  misc_feature (1)..(143): Homolog of NCBI NO: 136640 NR Description: Ubiquitin-conjugating enzyme E2-17 kDa
  misc_feature (1)..(143): Homolog of NCBI NO: 18395424 NR Description: E2, ubiquitin-conjugating enzyme 2 (UBC2)
  misc_feature (1)..(143): Homolog of NCBI NO: 13516453 NR Description: ubiquitin-conjugating enzyme (E2) [Nicotiana
  misc_feature (1)..(143): Homolog of NCBI NO: 464980 NR Description: Ubiquitin-conjugating enzyme E2-17 kDa
  misc_feature (1)..(143): Homolog of NCBI NO: 33146810 NR Description: OsRad6 [Oryza sativa (japonica cultivar-group)]
  misc_feature (1)..(143): Homolog of NCBI NO: 13516451 NR Description: ubiquitin-conjugating enzyme (E2) [Nicotiana
  misc_feature (1)..(143): Homolog of NCBI NO: 8118527 NR Description: ubiquitin conjugating protein [Avicennia marina]
MRDFKRLMQDPPAGISGAPQDNNIMLWNAVIFGPDDTPWDGGTFKLTLQFNEEYPNKPPTVRFVSRMFHPNIYADGSICLDILQNQWSPIYDVAAILTSIQSLLCDPNPNSPANSEAARMFSENKREYNRKVREVVEQSWTAD

SEQ ID NO: 15895 - protein, 136 aa, Zea mays subsp. mays
  peptide (1)..(136): Ceres Seq. ID no. 12408113
  misc_feature (1)..(133): Homolog of NCBI NO: 18424601 NR Description: E2, ubiquitin-conjugating enzyme 3 (UBC3)
  misc_feature (1)..(136): Homolog of NCBI NO: 18394114 NR Description: E2, ubiquitin-conjugating enzyme 1 (UBC1)
  misc_feature (1)..(136): Homolog of NCBI NO: 18844990 NR Description: Rad6 [Oryza sativa (japonica cultivar-group)]
  misc_feature (1)..(136): Homolog of NCBI NO: 136640 NR Description: Ubiquitin-conjugating enzyme E2-17 kDa
  misc_feature (1)..(136): Homolog of NCBI NO: 18395424 NR Description: E2, ubiquitin-conjugating enzyme 2 (UBC2)
  misc_feature (1)..(136): Homolog of NCBI NO: 13516453 NR Description: ubiquitin-conjugating enzyme (E2) [Nicotiana
  misc_feature (1)..(136): Homolog of NCBI NO: 464980 NR Description: Ubiquitin-conjugating enzyme E2-17 kDa
  misc_feature (1)..(136): Homolog of NCBI NO: 33146810 NR Description: OsRad6 [Oryza sativa (japonica cultivar-group)]
  misc_feature (1)..(136): Homolog of NCBI NO: 13516451 NR Description: ubiquitin-conjugating enzyme (E2) [Nicotiana
  misc_feature (1)..(136): Homolog of NCBI NO: 8118527 NR Description: ubiquitin conjugating protein [Avicennia marina]
MQDPPAGISGAPQDNNIMLWNAVIFGPDDTPWDGGTFKLTLQFNEEYPNKPPTVRFVSRMFHPNIYADGSICLDILQNQWSPIYDVAAILTSIQSLLCDPNPNSPANSEAARMFSENKREYNRKVREVVEQSWTAD

SEQ ID NO: 15896 - DNA, 1129 bp, Zea mays subsp. mays
  misc_feature (1)..(1129): Ceres Seq. ID no. 12366033
  misc_feature: MA Experiment ID: 108515 Result: Down-regulated in Transcription
  misc_feature: MA Experiment 108515 PARAMETER Experiment Name: Zm_2mM_SA_P Parameter: Age (day) Value: 8
  misc_feature: MA Experiment 108515 PARAMETER Experiment Name: Zm_2mM_SA_P Parameter: Organism Value: Zea mays
  misc_feature: MA Experiment 108515 PARAMETER Experiment Name: Zm_2mM_SA_P Parameter: Plant Line Value: 35A19
  misc_feature: MA Experiment 108515 PARAMETER Experiment Name: Zm_2mM_SA_P Parameter: Timepoint (hr) Value: 12
  misc_feature: MA Experiment 108515 PARAMETER Experiment Name: Zm_2mM_SA_P Parameter: Tissue Value: Aerial
  misc_feature: MA Experiment 108515 PARAMETER Experiment Name: Zm_2mM_SA_P Parameter: Treatment Value: 2mM SA vs. No Treatment
  misc_feature: MA Experiment ID: 108523 Result: Down-regulated in Transcription
  misc_feature: MA Experiment 108523 PARAMETER Experiment Name: Zm_42deg_Heat_P Parameter: Age (day) Value: 8
  misc_feature: MA Experiment 108523 PARAMETER Experiment Name: Zm_42deg_Heat_P Parameter: Organism Value: Zea mays
  misc_feature: MA Experiment 108523 PARAMETER Experiment Name: Zm_42deg_Heat_P Parameter: Plant Line Value: 35A19
  misc_feature: MA Experiment 108523 PARAMETER Experiment Name: Zm_42deg_Heat_P Parameter: Temperature (deg C) Value: 42 vs. 22
  misc_feature: MA Experiment 108523 PARAMETER Experiment Name: Zm_42deg_Heat_P Parameter: Timepoint (hr) Value: 6
  misc_feature: MA Experiment 108523 PARAMETER Experiment Name: Zm_42deg_Heat_P Parameter: Tissue Value: Aerial
  misc_feature: MA Experiment ID: 108527 Result: Down-regulated in Transcription
  misc_feature: MA Experiment 108527 PARAMETER Experiment Name: Zm_5mM_NO_P Parameter: Age (day) Value: 8
  misc_feature: MA Experiment 108527 PARAMETER Experiment Name: Zm_5mM_NO_P Parameter: Organism Value: Zea mays
  misc_feature: MA Experiment 108527 PARAMETER Experiment Name: Zm_5mM_NO_P Parameter: Plant Line Value: 35A19
  misc_feature: MA Experiment 108527 PARAMETER Experiment Name: Zm_5mM_NO_P Parameter: Timepoint (hr) Value: 6
  misc_feature: MA Experiment 108527 PARAMETER Experiment Name: Zm_5mM_NO_P Parameter: Tissue Value: Aerial
  misc_feature: MA Experiment 108527 PARAMETER Experiment Name: Zm_5mM_NO_P Parameter: Treatment Value: 5mM NO vs. No Treatment
  misc_feature: MA Experiment ID: 108529 Result: Up-regulated in Transcription
  misc_feature: MA Experiment 108529 PARAMETER Experiment Name: Zm_Imbibed_Seeds_P Parameter: Age (day) Value: 5 vs. 2
  misc_feature: MA Experiment 108529 PARAMETER Experiment Name: Zm_Imbibed_Seeds_P Parameter: Organism Value: Zea mays
  misc_feature: MA Experiment 108529 PARAMETER Experiment Name: Zm_Imbibed_Seeds_P Parameter: Plant Line Value: 35A19
  misc_feature: MA Experiment 108529 PARAMETER Experiment Name: Zm_Imbibed_Seeds_P Parameter: Tissue Value: Roots vs. Embryo
  misc_feature: MA Experiment ID: 108535 Result: Down-regulated in Transcription
  misc_feature: MA Experiment 108535 PARAMETER Experiment Name: Zm_Meristem_P Parameter: Age (day) Value: 8
  misc_feature: MA Experiment 108535 PARAMETER Experiment Name: Zm_Meristem_P Parameter: Organism Value: Zea mays
  misc_feature: MA Experiment 108535 PARAMETER Experiment Name: Zm_Meristem_P Parameter: Plant Line Value: 35A19
  misc_feature: MA Experiment 108535 PARAMETER Experiment Name: Zm_Meristem_P Parameter: Tissue Value: Root Meristem vs. Above Root Meristem
  misc_feature: MA Experiment ID: 108536 Result: Down-regulated in Transcription
  misc_feature: MA Experiment 108536 PARAMETER Experiment Name: Zm_Meristem_P Parameter: Age (day) Value: 8
  misc_feature: MA Experiment 108536 PARAMETER Experiment Name: Zm_Meristem_P Parameter: Organism Value: Zea mays
  misc_feature: MA Experiment 108536 PARAMETER Experiment Name: Zm_Meristem_P Parameter: Plant Line Value: 35A19
  misc_feature: MA Experiment 108536 PARAMETER Experiment Name: Zm_Meristem_P Parameter: Tissue Value: Shoot Meristem vs. Above Shoot Meristem
  misc_feature: MA Experiment ID: 108540 Result: Down-regulated in Transcription
  misc_feature: MA Experiment 108540 PARAMETER Experiment Name: Zm_20percent_PEG_P Parameter: Age (day) Value: 8
  misc_feature: MA Experiment 108540 PARAMETER Experiment Name: Zm_20percent_PEG_P Parameter: Organism Value: Zea mays
  misc_feature: MA Experiment 108540 PARAMETER Experiment Name: Zm_20percent_PEG_P Parameter: Plant Line Value: 35A19
  misc_feature: MA Experiment 108540 PARAMETER Experiment Name: Zm_20percent_PEG_P Parameter: Timepoint (hr) Value: 6
  misc_feature: MA Experiment 108540 PARAMETER Experiment Name: Zm_20percent_PEG_P Parameter: Tissue Value: Aerial
  misc_feature: MA Experiment 108540 PARAMETER Experiment Name: Zm_20percent_PEG_P Parameter: Treatment Value: 20percent PEG vs. No Treatment
  misc_feature: MA Experiment ID: 108543 Result: Up-regulated in Transcription
  misc_feature: MA Experiment ID: 108544 Result: Down-regulated in Transcription
  misc_feature: MA Experiment ID: 108545 Result: Down-regulated in Transcription
  misc_feature: MA Experiment 108545 PARAMETER Experiment Name: Zm_Imbibed_Seeds_P Parameter: Age (day) Value: 3 vs. 2
  misc_feature: MA Experiment 108545 PARAMETER Experiment Name: Zm_Imbibed_Seeds_P Parameter: Organism Value: Zea mays
  misc_feature: MA Experiment 108545 PARAMETER Experiment Name: Zm_Imbibed_Seeds_P Parameter: Plant Line Value: 35A19
  misc_feature: MA Experiment 108545 PARAMETER Experiment Name: Zm_Imbibed_Seeds_P Parameter: Tissue Value: Aerial vs. Embryo
  misc_feature: MA Experiment ID: 108556 Result: Down-regulated in Transcription
  misc_feature: MA Experiment 108556 PARAMETER Experiment Name: Zm_Drought_P Parameter: Age (day) Value: 9
  misc_feature: MA Experiment 108556 PARAMETER Experiment Name: Zm_Drought_P Parameter: Organism Value: Zea mays
  misc_feature: MA Experiment 108556 PARAMETER Experiment Name: Zm_Drought_P Parameter: Plant Line Value: 35A19
  misc_feature: MA Experiment 108556 PARAMETER Experiment Name: Zm_Drought_P Parameter: Timepoint (hr) Value: 24
  misc_feature: MA Experiment 108556 PARAMETER Experiment Name: Zm_Drought_P Parameter: Tissue Value: Aerial
  misc_feature: MA Experiment 108556 PARAMETER Experiment Name: Zm_Drought_P Parameter: Treatment Value: Drought vs. No Drought
  misc_feature: MA Experiment ID: 108597 Result: Down-regulated in Transcription
  misc_feature: MA Experiment 108597 PARAMETER Experiment Name: Zm_100uM_ABA_P Parameter: Age (day) Value: 9
  misc_feature: MA Experiment 108597 PARAMETER Experiment Name: Zm_100uM_ABA_P Parameter: Organism Value: Zea mays
  misc_feature: MA Experiment 108597 PARAMETER Experiment Name: Zm_100uM_ABA_P Parameter: Plant Line Value: 35A19
  misc_feature: MA Experiment 108597 PARAMETER Experiment Name: Zm_100uM_ABA_P Parameter: Timepoint (hr) Value: 24
  misc_feature: MA Experiment 108597 PARAMETER Experiment Name: Zm_100uM_ABA_P Parameter: Tissue Value: Aerial
  misc_feature: MA Experiment 108597 PARAMETER Experiment Name: Zm_100uM_ABA_P Parameter: Treatment Value: 100uM ABA vs. No Treatment
  misc_feature: MA Experiment ID: 108687 Result: Down-regulated in Transcription
  misc_feature: MA Experiment 108687 PARAMETER Experiment Name: Zm_Embryos-Flowers__P Parameter: Tissue Value: Embryo vs. Aerial+
  misc_feature: MA Experiment ID: 108688 Result: Down-regulated in Transcription
  misc_feature: MA Experiment 108688 PARAMETER Experiment Name: Zm_Embryos-Flowers__P Parameter: Tissue Value: Immature Flowers vs. Aerial+
  misc_feature: MA Experiment ID: 20000480 Result: Down-regulated in Transcription
  misc_feature: MA Experiment 20000480 PARAMETER Experiment Name: Zm_Drought_P Parameter: Age (day) Value: 11
  misc_feature: MA Experiment 20000480 PARAMETER Experiment Name: Zm_Drought_P Parameter: Organism Value: Zea mays
  misc_feature: MA Experiment 20000480 PARAMETER Experiment Name: Zm_Drought_P Parameter: Plant Line Value: 35A19
  misc_feature: MA Experiment 20000480 PARAMETER Experiment Name: Zm_Drought_P Parameter: Timepoint (hr) Value: 72
  misc_feature: MA Experiment 20000480 PARAMETER Experiment Name: Zm_Drought_P Parameter: Tissue Value: Aerial
  misc_feature: MA Experiment 20000480 PARAMETER Experiment Name: Zm_Drought_P Parameter: Treatment Value: Drought vs. No Drought
  misc_feature: MA Experiment ID: 20000535 Result: Down-regulated in Transcription
  misc_feature: MA Experiment 20000535 PARAMETER Experiment Name: Zm_Hybrid_Seed_Dev_P Parameter: DAP Value: 30 vs. 12
  misc_feature: MA Experiment 20000535 PARAMETER Experiment Name: Zm_Hybrid_Seed_Dev_P Parameter: Organism Value: Zea mays
  misc_feature: MA Experiment 20000535 PARAMETER Experiment Name: Zm_Hybrid_Seed_Dev_P Parameter: Plant Line Value: 35A19
  misc_feature: MA Experiment 20000535 PARAMETER Experiment Name: Zm_Hybrid_Seed_Dev_P Parameter: Tissue Value: Embryo vs. Unfert Floret
  misc_feature: MA Experiment ID: 20000626 Result: Down-regulated in Transcription
  misc_feature: MA Experiment 20000626 PARAMETER Experiment Name: Zm_Herbicide-Treatments_P Parameter: Timepoint (hr) Value: 12
  misc_feature: MA Experiment 20000626 PARAMETER Experiment Name: Zm_Herbicide-Treatments_P Parameter: Tissue Value: Aerial
  misc_feature: MA Experiment 20000626 PARAMETER Experiment Name: Zm_Herbicide-Treatments_P Parameter: Treatment Value: Roundup vs. No Treatment
gcacgagaccattacctagaacatcctaatcgaaaaacaccgatcctcccagctgcatctgcattgcattgcatgcacaggtcgcgcccaccatcagtagcggtcgccgccatgcagagactcgtgcgcgtcctcgtggtgctgggcgtggccgccgcggcgtcggcgcaaggcccgacggcggcgccaacgacgcccacgcccacgccggcaacccccgcggcgcccgcgcccacgacggcgtccagcaacatcacgggcgtgctggccaaggccgggcagttcaacaccttcatccggctgctcaagtccacgggcgtggcgtcgcagatcgacaaccaggtcgccaacggcgggaacggggtcacggtgttcgcgcccacggacaacgcgttccagtcgctgccctcgggcacgctcaactcgctgtcggaccaggacaagaacgcgctggtgcagtaccacgtggtgtccgccgccatccccatgtcgcagttcgacaccgtcagcaacccgctccgcacgcaggccggcagcgcctcgccgggggagttcccactcaacgtcacctcctccgagggccagcaggtcaacgtcaccacgggcgtcgtcaccgccaccgtcgacaactccctctactcgggcgacagcctcgtcgtctaccaggtcaacaaggtgctgctccccatgaagctcttcggcgccgcggatgcgcccgcgcccgcgccgctcgcgccggccaagaagaagggcaagacgccggcggccgtcgctcgactcgcccgacgcggcggaggcgtccccggacgccacgaccacgtcgctcgcgcccgcgaggctgacggcggggtggcctcgccacggctcttgcgctcgccgtcgtgtggtgggggctgtagtcacggcgaggagtgtctcgtgaggtctctccggtggccgtgacatctatacattttttttttcgttcgcgggtcttgtttgtcttttcgtttttactttattgcccatttttggatgaattgttcttccctgtcattcaaattgctaggagtatgtcatgtcatgtaacgtccttgtcccatttttatgtaattttaactaaataaatatgagttgtgtatatttcagt

SEQ ID NO: 15897 - protein, 313 aa, Zea mays subsp. mays
  peptide (1)..(313): Ceres Seq. ID no. 12366034
  misc_feature (82)..(229): Pfam Name: Fasciclin domain Pfam Description: Fasciclin domain
  misc_feature (63)..(267): Homolog of NCBI NO: 5919185 NR Description: arabinogalactan protein Pop14A9 [Populus x
  misc_feature (38)..(285): Homolog of NCBI NO: 34910950 NR Description: putative arabinogalactan-like protein
  misc_feature (47)..(258): Homolog of NCBI NO: 2129473 NR Description: arabinogalactan-like protein - loblolly pine
  misc_feature (64)..(252): Homolog of NCBI NO: 15294288 NR Description: AT5g60490/muf9_140 [Arabidopsis thaliana]
  misc_feature (64)..(252): Homolog of NCBI NO: 15239344 NR Description: fasciclin-like arabinogalactan-protein (FLA12)
  misc_feature (60)..(252): Homolog of NCBI NO: 21553590 NR Description: arabinogalactan protein-like [Arabidopsis
  misc_feature (64)..(258): Homolog of NCBI NO: 30841338 NR Description: arabinogalactan protein [Gossypium hirsutum]
  misc_feature (75)..(243): Homolog of NCBI NO: 21553523 NR Description: arabinogalactan protein-like [Arabidopsis
  misc_feature (75)..(243): Homolog of NCBI NO: 15242651 NR Description: fasciclin-like arabinogalactan-protein (FLA11)
  misc_feature (50)..(284): Homolog of NCBI NO: 34896012 NR Description: EST D25138(R3286) corresponds to a region of the gene.~Similar to Pinus taeda arabinogalactan-like protein
ARDHYLEHPNRKTPILPAASALHCMHRSRPPSVAVAAMQRLVRVLVVLGVAAAASAQGPTAAPTTPTPTPATPAAPAPTTASSNITGVLAKAGQFNTFIRLLKSTGVASQIDNQVANGGNGVTVFAPTDNAFQSLPSGTLNSLSDQDKNALVQYHVVSAAIPMSQFDTVSNPLRTQAGSASPGEFPLNVTSSEGQQVNVTTGVVTATVDNSLYSGDSLVVYQVNKVLLPMKLFGAADAPAPAPLAPAKKKGKTPAAVARLARRGGGVPGRHDHVARAREADGGVASPRLLRSPSCGGGCSHGEECLVRSLRWP

SEQ ID NO: 15898 - protein, 289 aa, Zea mays subsp. mays
  peptide (1)..(289): Ceres Seq. ID no. 12366035
  misc_feature (58)..(205): Pfam Name: Fasciclin domain Pfam Description: Fasciclin domain
  misc_feature (36)..(228): Homolog of NCBI NO: 21553590 NR Description: arabinogalactan protein-like [Arabidopsis
  misc_feature (40)..(234): Homolog of NCBI NO: 30841338 NR Description: arabinogalactan protein [Gossypium hirsutum]
  misc_feature (51)..(219): Homolog of NCBI NO: 21553523 NR Description: arabinogalactan protein-like [Arabidopsis
  misc_feature (14)..(261): Homolog of NCBI NO: 34910950 NR Description: putative arabinogalactan-like protein
  misc_feature (40)..(228): Homolog of NCBI NO: 15294288 NR Description: AT5g60490/muf9_140 [Arabidopsis thaliana]
  misc_feature (40)..(228): Homolog of NCBI NO: 15239344 NR Description: fasciclin-like arabinogalactan-protein (FLA12)
  misc_feature (23)..(234): Homolog of NCBI NO: 2129473 NR Description: arabinogalactan-like protein - loblolly pine
  misc_feature (39)..(243): Homolog of NCBI NO: 5919185 NR Description: arabinogalactan protein Pop14A9 [Populus x
  misc_feature (51)..(219): Homolog of NCBI NO: 15242651 NR Description: fasciclin-like arabinogalactan-protein (FLA11)
  misc_feature (26)..(260): Homolog of NCBI NO: 34896012 NR Description: EST D25138(R3286) corresponds to a region of the gene.~Similar to Pinus taeda arabinogalactan-like protein
MHRSRPPSVAVAAMQRLVRVLVVLGVAAAASAQGPTAAPTTPTPTPATPAAPAPTTASSNITGVLAKAGQFNTFIRLLKSTGVASQIDNQVANGGNGVTVFAPTDNAFQSLPSGTLNSLSDQDKNALVQYHVVSAAIPMSQFDTVSNPLRTQAGSASPGEFPLNVTSSEGQQVNVTTGVVTATVDNSLYSGDSLVVYQVNKVLLPMKLFGAADAPAPAPLAPAKKKGKTPAAVARLARRGGGVPGRHDHVARAREADGGVASPRLLRSPSCGGGCSHGEECLVRSLRWP

SEQ ID NO: 15899 - protein, 276 aa, Zea mays subsp. mays
  peptide (1)..(276): Ceres Seq. ID no. 12366036
  misc_feature (45)..(192): Pfam Name: Fasciclin domain Pfam Description: Fasciclin domain
  misc_feature (26)..(230): Homolog of NCBI NO: 5919185 NR Description: arabinogalactan protein Pop14A9 [Populus x
  misc_feature (1)..(248): Homolog of NCBI NO: 34910950 NR Description: putative arabinogalactan-like protein
  misc_feature (10)..(221): Homolog of NCBI NO: 2129473 NR Description: arabinogalactan-like protein - loblolly pine
  misc_feature (27)..(215): Homolog of NCBI NO: 15294288 NR Description: AT5g60490/muf9_140 [Arabidopsis thaliana]
  misc_feature (27)..(215): Homolog of NCBI NO: 15239344 NR Description: fasciclin-like arabinogalactan-protein (FLA12)
  misc_feature (23)..(215): Homolog of NCBI NO: 21553590 NR Description: arabinogalactan protein-like [Arabidopsis
  misc_feature (27)..(221): Homolog of NCBI NO: 30841338 NR Description: arabinogalactan protein [Gossypium hirsutum]
  misc_feature (38)..(206): Homolog of NCBI NO: 21553523 NR Description: arabinogalactan protein-like [Arabidopsis
  misc_feature (38)..(206): Homolog of NCBI NO: 15242651 NR Description: fasciclin-like arabinogalactan-protein (FLA11)
  misc_feature (13)..(247): Homolog of NCBI NO: 34896012 NR Description: EST D25138(R3286) corresponds to a region of the gene.~Similar to Pinus taeda arabinogalactan-like protein
MQRLVRVLVVLGVAAAASAQGPTAAPTTPTPTPATPAAPAPTTASSNITGVLAKAGQFNTFIRLLKSTGVASQIDNQVANGGNGVTVFAPTDNAFQSLPSGTLNSLSDQDKNALVQYHVVSAAIPMSQFDTVSNPLRTQAGSASPGEFPLNVTSSEGQQVNVTTGVVTATVDNSLYSGDSLVVYQVNKVLLPMKLFGAADAPAPAPLAPAKKKGKTPAAVARLARRGGGVPGRHDHVARAREADGGVASPRLLRSPSCGGGCSHGEECLVRSLRWP

SEQ ID NO: 15900 - DNA, 1452 bp, Zea mays subsp. mays
  misc_feature (1)..(1452): Ceres Seq. ID no. 12406744
  misc_feature: MA Experiment ID: 108535 Result: Up-regulated in Transcription
  misc_feature: MA Experiment 108535 PARAMETER Experiment Name: Zm_Meristem_P Parameter: Age (day) Value: 8
  misc_feature: MA Experiment 108535 PARAMETER Experiment Name: Zm_Meristem_P Parameter: Organism Value: Zea mays
  misc_feature: MA Experiment 108535 PARAMETER Experiment Name: Zm_Meristem_P Parameter: Plant Line Value: 35A19
  misc_feature: MA Experiment 108535 PARAMETER Experiment Name: Zm_Meristem_P Parameter: Tissue Value: Root Meristem vs. Above Root Meristem
  misc_feature: MA Experiment ID: 108545 Result: Down-regulated in Transcription
  misc_feature: MA Experiment 108545 PARAMETER Experiment Name: Zm_Imbibed_Seeds_P Parameter: Age (day) Value: 3 vs. 2
  misc_feature: MA Experiment 108545 PARAMETER Experiment Name: Zm_Imbibed_Seeds_P Parameter: Organism Value: Zea mays
  misc_feature: MA Experiment 108545 PARAMETER Experiment Name: Zm_Imbibed_Seeds_P Parameter: Plant Line Value: 35A19
  misc_feature: MA Experiment 108545 PARAMETER Experiment Name: Zm_Imbibed_Seeds_P Parameter: Tissue Value: Aerial vs. Embryo
  misc_feature: MA Experiment ID: 108547 Result: Down-regulated in Transcription
  misc_feature: MA Experiment 108547 PARAMETER Experiment Name: Zm_Imbibed_Seeds_P Parameter: Age (day) Value: 4 vs. 2
  misc_feature: MA Experiment 108547 PARAMETER Experiment Name: Zm_Imbibed_Seeds_P Parameter: Organism Value: Zea mays
  misc_feature: MA Experiment 108547 PARAMETER Experiment Name: Zm_Imbibed_Seeds_P Parameter: Plant Line Value: 35A19
  misc_feature: MA Experiment 108547 PARAMETER Experiment Name: Zm_Imbibed_Seeds_P Parameter: Tissue Value: Aerial vs. Embryo
tccccgcgcgcccgcgcgcgagctcgttcgtgcgcggccgccggcgttggcgacgacgaccgaggagccatggcggccaagggcggcgccacgccgtcccccggcggcacggggcccgcggcggggaacggccgcctcttcacggtggggctagtcacggcctggtactcctccaacatcggcgtgctcctgctcaacaagtacctcctcagcaactacggcttcaagtaccccatcttcctcaccatgtgccacatgtccgcctgcgccctgctctcctacgccgccatcgcctggctgcgcgtcgtgcccatgcagctcgtgcgctcccgcgtccagctcgccaagatcgccgcgctcagcctcgtcttctgcggctccgtcgtctccgggaacgtctcgctgcgctacctccccgtgtccttcaaccaggccgtcggcgccaccacgcccttctttaccgccgtcttcgcgtacatcatgaccgtcaagcgcgagtcgtggatcacctacctcaccctcgtgcccgtcgttactggagtcatcatcgccagcggcggcgagcctagctttcatctgtttggattcatcatgtgcataggagcaactgcagcaagggcgttgaagacagtactgcaaggaattcttctgtcttctgatggggagaagcttaattctatgaatctgttattgtacatggctccaattgctgttattttcttgcttcctgcaactatctttatggaggataatgttgttggcatcacaattcagcttgcaaagaaggatttcacgattgtttggttgctactgttcaattcttgcttgtcatattttgtcaatttgaccaatttcttggtgaccaaacatactagcgcactgactctacaggttctcggaaatgcaaagggtgccgtggcagtcgtcatctcaatcatgatattcaggaatcctgtgtccataacaggaatgctcggttacactctcacagtttttggcgtcattctttacagtgaatccaaaaagcgcagcaacaagccgtgaccaccctagaagacagtaaatacggccatcatttctttgtcctgccagcgcctagagctaatatatgatgagaaactacaccggtggcgatcacaacaaacccaatgccgtaccgcctcagcaattggacatcaagggtagaagtccaataatacctgtagtattaaattggcatgtacgaggcattttttttaatggcattgatggatagaatacatatattttttgtgttagagaagtgtggctcagactgccagcattggttagtacgtttagctcttgggatattgcctcttctattcatcggctactgtaacttctattttcttttgttctgaagactacctgtaccagactttgatccaggttccagggcctaattaatatattgacactgaatttaagctt

SEQ ID NO: 15901 - protein, 347 aa, Zea mays subsp. mays
  peptide (1)..(347): Ceres Seq. ID no. 12406745
  misc_feature (62)..(185): Pfam Name: Integral membrane protein DUF6 Pfam Description: Integral membrane protein DUF6
  misc_feature (35)..(337): Homolog of NCBI NO: 38567832 NR Description: OSJNBb0020J19.10 [Oryza sativa (japonica
  misc_feature (41)..(296): Homolog of NCBI NO: 15229717 NR Description: integral membrane protein, putative; protein id:
  misc_feature (188)..(344): Homolog of NCBI NO: 15229717 NR Description: integral membrane protein, putative; protein id:
  misc_feature (46)..(344): Homolog of NCBI NO: 15221371 NR Description: hypothetical protein; protein id: At1g12500.1
  misc_feature (46)..(343): Homolog of NCBI NO: 15228248 NR Description: unknown protein; protein id: At3g10290.1
  misc_feature (46)..(343): Homolog of NCBI NO: 17064798 NR Description: phosphate/phosphoenolpyruvate translocator-like
  misc_feature (46)..(343): Homolog of NCBI NO: 15237644 NR Description: phosphate/phosphoenolpyruvate translocator - like
  misc_feature (41)..(346): Homolog of NCBI NO: 30681126 NR Description: phosphate translocator-related [Arabidopsis
  misc_feature (41)..(346): Homolog of NCBI NO: 9759107 NR Description: phosphate/phosphoenolpyruvate translocator
  misc_feature (24)..(347): Homolog of NCBI NO: 27476065 NR Description: Putative phosphate/phosphoenolpyruvate
SPRARARARSCAAAGVGDDDRGAMAAKGGATPSPGGTGPAAGNGRLFTVGLVTAWYSSNIGVLLLNKYLLSNYGFKYPIFLTMCHMSACALLSYAAIAWLRVVPMQLVRSRVQLAKIAALSLVFCGSVVSGNVSLRYLPVSFNQAVGATTPFFTAVFAYIMTVKRESWITYLTLVPVVTGVIIASGGEPSFHLFGFIMCIGATAARALKTVLQGILLSSDGEKLNSMNLLLYMAPIAVIFLLPATIFMEDNVVGITIQLAKKDFTIVWLLLFNSCLSYFVNLTNFLVTKHTSALTLQVLGNAKGAVAVVISIMIFRNPVSITGMLGYTLTVFGVILYSESKKRSNKP

SEQ ID NO: 15902 - protein, 324 aa, Zea mays subsp. mays
  peptide (1)..(324): Ceres Seq. ID no. 12406746
  misc_feature (39)..(162): Pfam Name: Integral membrane protein DUF6 Pfam Description: Integral membrane protein DUF6
  misc_feature (12)..(314): Homolog of NCBI NO: 38567832 NR Description: OSJNBb0020J19.10 [Oryza sativa (japonica
  misc_feature (18)..(273): Homolog of NCBI NO: 15229717 NR Description: integral membrane protein, putative; protein id:
  misc_feature (165)..(321): Homolog of NCBI NO: 15229717 NR Description: integral membrane protein, putative; protein id:
  misc_feature (23)..(321): Homolog of NCBI NO: 15221371 NR Description: hypothetical protein; protein id: At1g12500.1
  misc_feature (23)..(320): Homolog of NCBI NO: 15228248 NR Description: unknown protein; protein id: At3g10290.1
  misc_feature (23)..(320): Homolog of NCBI NO: 17064798 NR Description: phosphate/phosphoenolpyruvate translocator-like
  misc_feature (23)..(320): Homolog of NCBI NO: 15237644 NR Description: phosphate/phosphoenolpyruvate translocator - like
  misc_feature (18)..(323): Homolog of NCBI NO: 30681126 NR Description: phosphate translocator-related [Arabidopsis
  misc_feature (18)..(323): Homolog of NCBI NO: 9759107 NR Description: phosphate/phosphoenolpyruvate translocator
  misc_feature (1)..(324): Homolog of NCBI NO: 27476065 NR Description: Putative phosphate/phosphoenolpyruvate
MAAKGGATPSPGGTGPAAGNGRLFTVGLVTAWYSSNIGVLLLNKYLLSNYGFKYPIFLTMCHMSACALLSYAAIAWLRVVPMQLVRSRVQLAKIAALSLVFCGSVVSGNVSLRYLPVSFNQAVGATTPFFTAVFAYIMTVKRESWITYLTLVPVVTGVIIASGGEPSFHLFGFIMCIGATAARALKTVLQGILLSSDGEKLNSMNLLLYMAPIAVIFLLPATIFMEDNVVGITIQLAKKDFTIVWLLLFNSCLSYFVNLTNFLVTKHTSALTLQVLGNAKGAVAVVISIMIFRNPVSITGMLGYTLTVFGVILYSESKKRSNKP

SEQ ID NO: 15903 - protein, 265 aa, Zea mays subsp. mays
  peptide (1)..(265): Ceres Seq. ID no. 12406747
  misc_feature (1)..(103): Pfam Name: Integral membrane protein DUF6 Pfam Description: Integral membrane protein DUF6
  misc_feature (1)..(255): Homolog of NCBI NO: 38567832 NR Description: OSJNBb0020J19.10 [Oryza sativa (japonica
  misc_feature (1)..(214): Homolog of NCBI NO: 15229717 NR Description: integral membrane protein, putative; protein id:
  misc_feature (106)..(262): Homolog of NCBI NO: 15229717 NR Description: integral membrane protein, putative; protein id:
  misc_feature (1)..(262): Homolog of NCBI NO: 15221371 NR Description: hypothetical protein; protein id: At1g12500.1
  misc_feature (1)..(261): Homolog of NCBI NO: 15228248 NR Description: unknown protein; protein id: At3g10290.1
  misc_feature (1)..(261): Homolog of NCBI NO: 17064798 NR Description: phosphate/phosphoenolpyruvate translocator-like
  misc_feature (1)..(261): Homolog of NCBI NO: 15237644 NR Description: phosphate/phosphoenolpyruvate translocator - like
  misc_feature (1)..(264): Homolog of NCBI NO: 30681126 NR Description: phosphate translocator-related [Arabidopsis
  misc_feature (1)..(264): Homolog of NCBI NO: 9759107 NR Description: phosphate/phosphoenolpyruvate translocator
  misc_feature (1)..(265): Homolog of NCBI NO: 27476065 NR Description: Putative phosphate/phosphoenolpyruvate
MCHMSACALLSYAAIAWLRVVPMQLVRSRVQLAKIAALSLVFCGSVVSGNVSLRYLPVSFNQAVGATTPFFTAVFAYIMTVKRESWITYLTLVPVVTGVIIASGGEPSFHLFGFIMCIGATAARALKTVLQGILLSSDGEKLNSMNLLLYMAPIAVIFLLPATIFMEDNVVGITIQLAKKDFTIVWLLLFNSCLSYFVNLTNFLVTKHTSALTLQVLGNAKGAVAVVISIMIFRNPVSITGMLGYTLTVFGVILYSESKKRSNKP

SEQ ID NO: 15904 - DNA, 1745 bp, Zea mays subsp. mays
  misc_feature (1)..(1745): Ceres Seq. ID no. 12369474
  misc_feature: MA Experiment ID: 108535 Result: Up-regulated in Transcription
  misc_feature: MA Experiment 108535 PARAMETER Experiment Name: Zm_Meristem_P Parameter: Age (day) Value: 8
  misc_feature: MA Experiment 108535 PARAMETER Experiment Name: Zm_Meristem_P Parameter: Organism Value: Zea mays
  misc_feature: MA Experiment 108535 PARAMETER Experiment Name: Zm_Meristem_P Parameter: Plant Line Value: 35A19
  misc_feature: MA Experiment 108535 PARAMETER Experiment Name: Zm_Meristem_P Parameter: Tissue Value: Root Meristem vs. Above Root Meristem
  misc_feature: MA Experiment ID: 108536 Result: Up-regulated in Transcription
  misc_feature: MA Experiment 108536 PARAMETER Experiment Name: Zm_Meristem_P Parameter: Age (day) Value: 8
  misc_feature: MA Experiment 108536 PARAMETER Experiment Name: Zm_Meristem_P Parameter: Organism Value: Zea mays
  misc_feature: MA Experiment 108536 PARAMETER Experiment Name: Zm_Meristem_P Parameter: Plant Line Value: 35A19
  misc_feature: MA Experiment 108536 PARAMETER Experiment Name: Zm_Meristem_P Parameter: Tissue Value: Shoot Meristem vs. Above Shoot Meristem
  misc_feature: MA Experiment ID: 108543 Result: Up-regulated in Transcription
  misc_feature: MA Experiment ID: 108544 Result: Down-regulated in Transcription
  misc_feature: MA Experiment ID: 108687 Result: Down-regulated in Transcription
  misc_feature: MA Experiment 108687 PARAMETER Experiment Name: Zm_Embryos-Flowers__P Parameter: Tissue Value: Embryo vs. Aerial+
  misc_feature: MA Experiment ID: 20000478 Result: Down-regulated in Transcription
  misc_feature: MA Experiment 20000478 PARAMETER Experiment Name: Zm_5mM_SA_P Parameter: Age (day) Value: 11
  misc_feature: MA Experiment 20000478 PARAMETER Experiment Name: Zm_5mM_SA_P Parameter: Organism Value: Zea mays
  misc_feature: MA Experiment 20000478 PARAMETER Experiment Name: Zm_5mM_SA_P Parameter: Plant Line Value: 35A19
  misc_feature: MA Experiment 20000478 PARAMETER Experiment Name: Zm_5mM_SA_P Parameter: Timepoint (hr) Value: 72
  misc_feature: MA Experiment 20000478 PARAMETER Experiment Name: Zm_5mM_SA_P Parameter: Tissue Value: Aerial
  misc_feature: MA Experiment 20000478 PARAMETER Experiment Name: Zm_5mM_SA_P Parameter: Treatment Value: 5mM SA vs. No Treatment
  misc_feature: MA Experiment ID: 20000492 Result: Down-regulated in Transcription
  misc_feature: MA Experiment 20000492 PARAMETER Experiment Name: Zm_Hybrid_Seed_Dev_P Parameter: DAP Value: 12
  misc_feature: MA Experiment 20000492 PARAMETER Experiment Name: Zm_Hybrid_Seed_Dev_P Parameter: Organism Value: Zea mays
  misc_feature: MA Experiment 20000492 PARAMETER Experiment Name: Zm_Hybrid_Seed_Dev_P Parameter: Plant Line Value: 35A19
  misc_feature: MA Experiment 20000492 PARAMETER Experiment Name: Zm_Hybrid_Seed_Dev_P Parameter: Tissue Value: Fert Kernel vs. Unfert Floret
  misc_feature: MA Experiment ID: 20000626 Result: Down-regulated in Transcription
  misc_feature: MA Experiment 20000626 PARAMETER Experiment Name: Zm_Herbicide-Treatments_P Parameter: Timepoint (hr) Value: 12
  misc_feature: MA Experiment 20000626 PARAMETER Experiment Name: Zm_Herbicide-Treatments_P Parameter: Tissue Value: Aerial
  misc_feature: MA Experiment 20000626 PARAMETER Experiment Name: Zm_Herbicide-Treatments_P Parameter: Treatment Value: Roundup vs. No Treatment
gcacgagaccattacctagaacatcctaatcgaaaaattccattccctgcgctagcccggcgcccgctcgccctgcctgccactcccgccgcgtgctgcctaccagcaggccaggccaggcacccctgccctgtccgccaccagcacaaccgcgtgcgccggtccggtcggtgcatgccaggatggagaccccttcgtcgacgtgcgacgagggctccgagctcgacgcgcgctcgcactccgactacgccgacttcgacgacctggacctcccgccgcggggccgccaccgccgggaaccgtcctccgacgcgtcctccgagtgcagcggggagcccgggagcccgtacgcctcctcgccgtacccgcgctggccggtgtgcacgcttcctgcgagggtgccgccgccggccgcgccgctgctcaagaggctcggcacgacgcggcgcggcgcccgtgtcggcgcgtgtgacgggaaggccggcgacggcgagctgcagctgatcaaggagaggttctccaagcttctcttgggcgaggacatgtcggggagcggcaagggggtctcgacctccgtggccatctccaacgccatcaccaacctctacgcgactgtctttgggagctgccacaggctgaagcccctgccgccggagaagaagtccatgtggcggcgggagatggactgcctcctctccgtctgcgactacatcgttgagttcttcccttccaaggagatcttgcccgacggcagcatacgagaggtgatggcgacccgaccgcgatccgacatctacgtcaacctccccgccctcgagaagctggacgacatgttgctcgagattctgtacagctttcagaagactgaattctggtacgtcaatgacaaagggcagaaagacgattccgtcgcgacgccgtgccgtccggtgagccaccgcggcgaggagaagtggtggctgcccgtgccgtgcgtcgccaagcccgggctgacggagacggcgcggcgagacctgcagcagaagcgcgactgcgcgagccagatccacaaggcggccatggccatcaacaatgccgttcttgcggagatacggatccccgacctgtacaaggaagcactacccaagtgcgggcgtgccagcgtgggggatctgatctatcggcacatgtcgttcccgggcaagttctcgccggagtacctgctggactgcctggagatctcgtcggagcacgaggccctggaggcggcggaccgcgtggaggccgcgatgcacgtgtggcggctgaaggcgagccagaggtcaccctggatcgcggtcaaggacctgatggagtccgacaagaacgtgatgctggcgagacgcgccgaggacgtgctgctctgcctcaagcagcggttccccggcctctcgcagaccacgctcgacgccagcaagatccagtacaacaaggatgttgggcaagcaatactagagagctattcgagggtgctggagagcctagcgtacaacatcgtaacatgtgtagatgacgttctcttcgcagatgaagccgccagaaagatagcatgagtgatcatttgttcatccttcctgcctgatccgggaaaccaaaaaataaggggtccatgtccatgatccatccacagaatgtacattatgccataacttgtagcagtagtaccatctaccaatggatgatagcacgagcagttaactcatctaggcagccatgtcttggttttc

SEQ ID NO: 15905 - protein, 462 aa, Zea mays subsp. mays
  peptide (1)..(462): Ceres Seq. ID no. 12369475
  misc_feature (6)..(460): Pfam Name: Domain of unknown function (DUF315) Pfam Description: Domain of unknown function (DUF315)
  misc_feature (104)..(459): Homolog of NCBI NO: 15241663 NR Description: putative protein; protein id: At5g02010.1
  misc_feature (34)..(459): Homolog of NCBI NO: 34908302 NR Description: P0005H10.23 [Oryza sativa (japonica
  misc_feature (104)..(221): Homolog of NCBI NO: 25349309 NR Description: hypothetical protein T1N6.8 - Arabidopsis
  misc_feature (206)..(459): Homolog of NCBI NO: 25349309 NR Description: hypothetical protein T1N6.8 - Arabidopsis
  misc_feature (104)..(459): Homolog of NCBI NO: 15223455 NR Description: hypothetical protein; protein id: At1g01700.1
  misc_feature (104)..(459): Homolog of NCBI NO: 15236138 NR Description: putative protein; protein id: At4g00460.1
  misc_feature (42)..(460): Homolog of NCBI NO: 34901740 NR Description: P0434A03.36 [Oryza sativa (japonica
  misc_feature (42)..(460): Homolog of NCBI NO: 33146611 NR Description: hypothetical protein [Oryza sativa (japonica
  misc_feature (1)..(460): Homolog of NCBI NO: 37536670 NR Description: hypothetical protein [Oryza sativa (japonica
  misc_feature (1)..(461): Homolog of NCBI NO: 38345761 NR Description: OSJNBa0065O17.14 [Oryza sativa (japonica
METPSSTCDEGSELDARSHSDYADFDDLDLPPRGRHRREPSSDASSECSGEPGSPYASSPYPRWPVCTLPARVPPPAAPLLKRLGTTRRGARVGACDGKAGDGELQLIKERFSKLLLGEDMSGSGKGVSTSVAISNAITNLYATVFGSCHRLKPLPPEKKSMWRREMDCLLSVCDYIVEFFPSKEILPDGSIREVMATRPRSDIYVNLPALEKLDDMLLEILYSFQKTEFWYVNDKGQKDDSVATPCRPVSHRGEEKWWLPVPCVAKPGLTETARRDLQQKRDCASQIHKAAMAINNAVLAEIRIPDLYKEALPKCGRASVGDLIYRHMSFPGKFSPEYLLDCLEISSEHEALEAADRVEAAMHVWRLKASQRSPWIAVKDLMESDKNVMLARRAEDVLLCLKQRFPGLSQTTLDASKIQYNKDVGQAILESYSRVLESLAYNIVTCVDDVLFADEAARKIA

SEQ ID NO: 15906 - protein, 342 aa, Zea mays subsp. mays
  peptide (1)..(342): Ceres Seq. ID no. 12369476
  misc_feature (1)..(340): Pfam Name: Domain of unknown function (DUF315) Pfam Description: Domain of unknown function (DUF315)
  misc_feature (1)..(339): Homolog of NCBI NO: 15241663 NR Description: putative protein; protein id: At5g02010.1
  misc_feature (1)..(339): Homolog of NCBI NO: 34908302 NR Description: P0005H10.23 [Oryza sativa (japonica
  misc_feature (1)..(101): Homolog of NCBI NO: 25349309 NR Description: hypothetical protein T1N6.8 - Arabidopsis
  misc_feature (86)..(339): Homolog of NCBI NO: 25349309 NR Description: hypothetical protein T1N6.8 - Arabidopsis
  misc_feature (1)..(339): Homolog of NCBI NO: 15223455 NR Description: hypothetical protein; protein id: At1g01700.1
  misc_feature (1)..(339): Homolog of NCBI NO: 15236138 NR Description: putative protein; protein id: At4g00460.1
  misc_feature (1)..(340): Homolog of NCBI NO: 34901740 NR Description: P0434A03.36 [Oryza sativa (japonica
  misc_feature (1)..(340): Homolog of NCBI NO: 33146611 NR Description: hypothetical protein [Oryza sativa (japonica
  misc_feature (1)..(340): Homolog of NCBI NO: 37536670 NR Description: hypothetical protein [Oryza sativa (japonica
  misc_feature (1)..(341): Homolog of NCBI NO: 38345761 NR Description: OSJNBa0065O17.14 [Oryza sativa (japonica
MSGSGKGVSTSVAISNAITNLYATVFGSCHRLKPLPPEKKSMWRREMDCLLSVCDYIVEFFPSKEILPDGSIREVMATRPRSDIYVNLPALEKLDDMLLEILYSFQKTEFWYVNDKGQKDDSVATPCRPVSHRGEEKWWLPVPCVAKPGLTETARRDLQQKRDCASQIHKAAMAINNAVLAEIRIPDLYKEALPKCGRASVGDLIYRHMSFPGKFSPEYLLDCLEISSEHEALEAADRVEAAMHVWRLKASQRSPWIAVKDLMESDKNVMLARRAEDVLLCLKQRFPGLSQTTLDASKIQYNKDVGQAILESYSRVLESLAYNIVTCVDDVLFADEAARKIA

SEQ ID NO: 15907 - protein, 301 aa, Zea mays subsp. mays
  peptide (1)..(301): Ceres Seq. ID no. 12369477
  misc_feature (1)..(299): Pfam Name: Domain of unknown function (DUF315) Pfam Description: Domain of unknown function (DUF315)
  misc_feature (1)..(298): Homolog of NCBI NO: 15241663 NR Description: putative protein; protein id: At5g02010.1
  misc_feature (1)..(298): Homolog of NCBI NO: 34908302 NR Description: P0005H10.23 [Oryza sativa (japonica
  misc_feature (1)..(60): Homolog of NCBI NO: 25349309 NR Description: hypothetical protein T1N6.8 - Arabidopsis
  misc_feature (45)..(298): Homolog of NCBI NO: 25349309 NR Description: hypothetical protein T1N6.8 - Arabidopsis
  misc_feature (1)..(298): Homolog of NCBI NO: 15223455 NR Description: hypothetical protein; protein id: At1g01700.1
  misc_feature (1)..(298): Homolog of NCBI NO: 15236138 NR Description: putative protein; protein id: At4g00460.1
  misc_feature (1)..(299): Homolog of NCBI NO: 34901740 NR Description: P0434A03.36 [Oryza sativa (japonica
  misc_feature (1)..(299): Homolog of NCBI NO: 33146611 NR Description: hypothetical protein [Oryza sativa (japonica
  misc_feature (1)..(299): Homolog of NCBI NO: 37536670 NR Description: hypothetical protein [Oryza sativa (japonica
  misc_feature (1)..(300): Homolog of NCBI NO: 38345761 NR Description: OSJNBa0065O17.14 [Oryza sativa (japonica
MWRREMDCLLSVCDYIVEFFPSKEILPDGSIREVMATRPRSDIYVNLPALEKLDDMLLEILYSFQKTEFWYVNDKGQKDDSVATPCRPVSHRGEEKWWLPVPCVAKPGLTETARRDLQQKRDCASQIHKAAMAINNAVLAEIRIPDLYKEALPKCGRASVGDLIYRHMSFPGKFSPEYLLDCLEISSEHEALEAADRVEAAMHVWRLKASQRSPWIAVKDLMESDKNVMLARRAEDVLLCLKQRFPGLSQTTLDASKIQYNKDVGQAILESYSRVLESLAYNIVTCVDDVLFADEAARKIA

SEQ ID NO: 15908 - DNA, 1623 bp, Zea mays subsp. mays
  misc_feature (1)..(1623): Ceres Seq. ID no. 12362233
  misc_feature: MA Experiment ID: 108504 Result: Up-regulated in Transcription
  misc_feature: MA Experiment 108504 PARAMETER Experiment Name: Zm_Drought_P Parameter: Age (day) Value: 8
  misc_feature: MA Experiment 108504 PARAMETER Experiment Name: Zm_Drought_P Parameter: Organism Value: Zea mays
  misc_feature: MA Experiment 108504 PARAMETER Experiment Name: Zm_Drought_P Parameter: Plant Line Value: 35A19
  misc_feature: MA Experiment 108504 PARAMETER Experiment Name: Zm_Drought_P Parameter: Timepoint (hr) Value: 12
  misc_feature: MA Experiment 108504 PARAMETER Experiment Name: Zm_Drought_P Parameter: Tissue Value: Aerial
  misc_feature: MA Experiment 108504 PARAMETER Experiment Name: Zm_Drought_P Parameter: Treatment Value: Drought vs. No Drought
  misc_feature: MA Experiment ID: 108522 Result: Up-regulated in Transcription
  misc_feature: MA Experiment 108522 PARAMETER Experiment Name: Zm_42deg_Heat_P Parameter: Age (day) Value: 8
  misc_feature: MA Experiment 108522 PARAMETER Experiment Name: Zm_42deg_Heat_P Parameter: Organism Value: Zea mays
  misc_feature: MA Experiment 108522 PARAMETER Experiment Name: Zm_42deg_Heat_P Parameter: Plant Line Value: 35A19
  misc_feature: MA Experiment 108522 PARAMETER Experiment Name: Zm_42deg_Heat_P Parameter: Temperature (deg C) Value: 42 vs. 22
  misc_feature: MA Experiment 108522 PARAMETER Experiment Name: Zm_42deg_Heat_P Parameter: Timepoint (hr) Value: 1
  misc_feature: MA Experiment 108522 PARAMETER Experiment Name: Zm_42deg_Heat_P Parameter: Tissue Value: Aerial
  misc_feature: MA Experiment ID: 108527 Result: Up-regulated in Transcription
  misc_feature: MA Experiment 108527 PARAMETER Experiment Name: Zm_5mM_NO_P Parameter: Age (day) Value: 8
  misc_feature: MA Experiment 108527 PARAMETER Experiment Name: Zm_5mM_NO_P Parameter: Organism Value: Zea mays
  misc_feature: MA Experiment 108527 PARAMETER Experiment Name: Zm_5mM_NO_P Parameter: Plant Line Value: 35A19
  misc_feature: MA Experiment 108527 PARAMETER Experiment Name: Zm_5mM_NO_P Parameter: Timepoint (hr) Value: 6
  misc_feature: MA Experiment 108527 PARAMETER Experiment Name: Zm_5mM_NO_P Parameter: Tissue Value: Aerial
  misc_feature: MA Experiment 108527 PARAMETER Experiment Name: Zm_5mM_NO_P Parameter: Treatment Value: 5mM NO vs. No Treatment
  misc_feature: MA Experiment ID: 108534 Result: Down-regulated in Transcription
  misc_feature: MA Experiment 108534 PARAMETER Experiment Name: Zm_4deg_Cold_P Parameter: Age (hr) Value: 8
  misc_feature: MA Experiment 108534 PARAMETER Experiment Name: Zm_4deg_Cold_P Parameter: Organism Value: Zea mays
  misc_feature: MA Experiment 108534 PARAMETER Experiment Name: Zm_4deg_Cold_P Parameter: Plant Line Value: 35A19
  misc_feature: MA Experiment 108534 PARAMETER Experiment Name: Zm_4deg_Cold_P Parameter: Temperature (deg C) Value: 4 vs. 22
  misc_feature: MA Experiment 108534 PARAMETER Experiment Name: Zm_4deg_Cold_P Parameter: Timepoint (hr) Value: 6
  misc_feature: MA Experiment 108534 PARAMETER Experiment Name: Zm_4deg_Cold_P Parameter: Tissue Value: Aerial
  misc_feature: MA Experiment ID: 108540 Result: Up-regulated in Transcription
  misc_feature: MA Experiment 108540 PARAMETER Experiment Name: Zm_20percent_PEG_P Parameter: Age (day) Value: 8
  misc_feature: MA Experiment 108540 PARAMETER Experiment Name: Zm_20percent_PEG_P Parameter: Organism Value: Zea mays
  misc_feature: MA Experiment 108540 PARAMETER Experiment Name: Zm_20percent_PEG_P Parameter: Plant Line Value: 35A19
  misc_feature: MA Experiment 108540 PARAMETER Experiment Name: Zm_20percent_PEG_P Parameter: Timepoint (hr) Value: 6
  misc_feature: MA Experiment 108540 PARAMETER Experiment Name: Zm_20percent_PEG_P Parameter: Tissue Value: Aerial
  misc_feature: MA Experiment 108540 PARAMETER Experiment Name: Zm_20percent_PEG_P Parameter: Treatment Value: 20percent PEG vs. No Treatment
  misc_feature: MA Experiment ID: 108542 Result: Up-regulated in Transcription
  misc_feature: MA Experiment 108542 PARAMETER Experiment Name: Zm_150mM_NaCl_P Parameter: Age (day) Value: 8
  misc_feature: MA Experiment 108542 PARAMETER Experiment Name: Zm_150mM_NaCl_P Parameter: Organism Value: Zea mays
  misc_feature: MA Experiment 108542 PARAMETER Experiment Name: Zm_150mM_NaCl_P Parameter: Plant Line Value: 35A19
  misc_feature: MA Experiment 108542 PARAMETER Experiment Name: Zm_150mM_NaCl_P Parameter: Timepoint (hr) Value: 6
  misc_feature: MA Experiment 108542 PARAMETER Experiment Name: Zm_150mM_NaCl_P Parameter: Tissue Value: Aerial
  misc_feature: MA Experiment 108542 PARAMETER Experiment Name: Zm_150mM_NaCl_P Parameter: Treatment Value: 150mM NaCl vs. No Treatment
  misc_feature: MA Experiment ID: 108543 Result: Down-regulated in Transcription
  misc_feature: MA Experiment ID: 108544 Result: Up-regulated in Transcription
  misc_feature: MA Experiment ID: 108556 Result: Up-regulated in Transcription
  misc_feature: MA Experiment 108556 PARAMETER Experiment Name: Zm_Drought_P Parameter: Age (day) Value: 9
  misc_feature: MA Experiment 108556 PARAMETER Experiment Name: Zm_Drought_P Parameter: Organism Value: Zea mays
  misc_feature: MA Experiment 108556 PARAMETER Experiment Name: Zm_Drought_P Parameter: Plant Line Value: 35A19
  misc_feature: MA Experiment 108556 PARAMETER Experiment Name: Zm_Drought_P Parameter: Timepoint (hr) Value: 24
  misc_feature: MA Experiment 108556 PARAMETER Experiment Name: Zm_Drought_P Parameter: Tissue Value: Aerial
  misc_feature: MA Experiment 108556 PARAMETER Experiment Name: Zm_Drought_P Parameter: Treatment Value: Drought vs. No Drought
  misc_feature: MA Experiment ID: 108689 Result: Up-regulated in Transcription
  misc_feature: MA Experiment 108689 PARAMETER Experiment Name: Zm_Drought_Roots_P Parameter: Age (day) Value: 9
  misc_feature: MA Experiment 108689 PARAMETER Experiment Name: Zm_Drought_Roots_P Parameter: Organism Value: Zea mays
  misc_feature: MA Experiment 108689 PARAMETER Experiment Name: Zm_Drought_Roots_P Parameter: Plant Line Value: 35A19
  misc_feature: MA Experiment 108689 PARAMETER Experiment Name: Zm_Drought_Roots_P Parameter: Timepoint (hr) Value: 24
  misc_feature: MA Experiment 108689 PARAMETER Experiment Name: Zm_Drought_Roots_P Parameter: Tissue Value: Roots
  misc_feature: MA Experiment 108689 PARAMETER Experiment Name: Zm_Drought_Roots_P Parameter: Treatment Value: Drought vs. No Drought
  misc_feature: MA Experiment ID: 20000478 Result: Up-regulated in Transcription
  misc_feature: MA Experiment 20000478 PARAMETER Experiment Name: Zm_5mM_SA_P Parameter: Age (day) Value: 11
  misc_feature: MA Experiment 20000478 PARAMETER Experiment Name: Zm_5mM_SA_P Parameter: Organism Value: Zea mays
  misc_feature: MA Experiment 20000478 PARAMETER Experiment Name: Zm_5mM_SA_P Parameter: Plant Line Value: 35A19
  misc_feature: MA Experiment 20000478 PARAMETER Experiment Name: Zm_5mM_SA_P Parameter: Timepoint (hr) Value: 72
  misc_feature: MA Experiment 20000478 PARAMETER Experiment Name: Zm_5mM_SA_P Parameter: Tissue Value: Aerial
  misc_feature: MA Experiment 20000478 PARAMETER Experiment Name: Zm_5mM_SA_P Parameter: Treatment Value: 5mM SA vs. No Treatment
  misc_feature: MA Experiment ID: 20000480 Result: Up-regulated in Transcription
  misc_feature: MA Experiment 20000480 PARAMETER Experiment Name: Zm_Drought_P Parameter: Age (day) Value: 11
  misc_feature: MA Experiment 20000480 PARAMETER Experiment Name: Zm_Drought_P Parameter: Organism Value: Zea mays
  misc_feature: MA Experiment 20000480 PARAMETER Experiment Name: Zm_Drought_P Parameter: Plant Line Value: 35A19
  misc_feature: MA Experiment 20000480 PARAMETER Experiment Name: Zm_Drought_P Parameter: Timepoint (hr) Value: 72
  misc_feature: MA Experiment 20000480 PARAMETER Experiment Name: Zm_Drought_P Parameter: Tissue Value: Aerial
  misc_feature: MA Experiment 20000480 PARAMETER Experiment Name: Zm_Drought_P Parameter: Treatment Value: Drought vs. No Drought
aagctcaccgctcactcacaagcacgctgcgaaacacagacgcagagacccgcgcacagatcgaagcggaggatgaaggtggaggtggtggagacgacgctggtgccgccgagcgaggcgacgccgcggcacgcgctgtggctgtccaacctggacctggcggtgcccaagacccacaccccgctcgtctactactacccgaggcccgccggcgccggcgccggggaggagggaaagggagagggagaagggtcgttcttcgacccggcgcgcctgcgggaggcgctgtccagggcgctggtgcccttctacccgctggcggggcggctggcggccggcccgggcggccggctcgagatcgactgcaccggcgagggcgcgctgttctgcgtcgcgcgggccgacttcaccggcgacgagatgttcgccgacttcgagccctcccccgaggcgcgccgcctgctcgtgccattcgccgcgtccggcgacccgccctgcgtgctcgccatggtccaggtgaccttcctcaagtgcggcggcgtggccgtgggcacgggcatgcaccacgtgacgatggacggcgccggcgcgatccagttcatccgggcgtggacggcgctggcgcgcggggaggcccccgcgtggacgccgtcgcacgaccggacgctcctgcgcgcgcgctccccgccgcacgtccccgcctgcgagcacccggtctactccccggcctacctcaacggggcgccgcggcccttcgtgacgcgcgtctacgccgtgccgcccaagctgctggcgggcatccggtcgcgctgcgcgccgggcgcgtccacgtactgcgcggtgacggcgcacctgtggcgcgccatgtgcgtcgcccggggcctcccggcgggcagcgacacgcggctgcgcgtcccggccaacgtccggcagcgcctgcgcccgccgctcccggcgtcctacttcggcaacgccatcgtgcgggacctggtcaccgtgcgggtggccgacgtgctgtcgcagccgctgggcttcgtggcggagcggatcaagcgcgcggtggcccgcgtcgacgacgcccgcgtgcgctccgtcgtcgactacctggagcttgagtcggacaagggcaaccaggcggcgcgcggccagttcatgcccgagtccgacctgtgggtcgtcagcttgctcggcatgcccatccacgacgccgacttcggctggggccgccccgggttcgtggcccccgcgcagatgttcggcagcggcacggcgtacgtcacgcagggacgcgacaaggacgaccccatcaacgtgctcttcgcgctcgagccagagtacctgaacaccttcgagaaggccttctacggggagtgaccgtgacgcgaccacgaccagccatggcgaggagtccgatgacgatggaatgggactgtgatgccattgtgatgccatgccgttgtggcatctcccgtggtgtgcactgtaataccatatcatattgcatgtttcggaatgcaagtcaatgcttactgggtgtgtgataaggtgcttcattccagctttgtactagtgtcaccaagcacgtaaataattgaatgagaaactggaacgtgcacggctggg

SEQ ID NO: 15909 - protein, 457 aa, Zea mays subsp. mays
  peptide (1)..(457): Ceres Seq. ID no. 12362234
  misc_feature (26)..(455): Pfam Name: Transferase family Pfam Description: Transferase family
  misc_feature (21)..(455): Homolog of NCBI NO: 40644084 NR Description: hydroxycinnamoyl CoA quinate transferase
  misc_feature (21)..(455): Homolog of NCBI NO: 40644899 NR Description: hydroxycinnamoyl CoA quinate transferase
  misc_feature (25)..(455): Homolog of NCBI NO: 27475616 NR Description: hydroxycinnamoyl transferase [Nicotiana tabacum]
  misc_feature (25)..(455): Homolog of NCBI NO: 32400291 NR Description: hydroxyanthranilate hydroxycinnamoyltransferase 1
  misc_feature (25)..(455): Homolog of NCBI NO: 21536883 NR Description: anthranilate N-benzoyltransferase [Arabidopsis
  misc_feature (25)..(455): Homolog of NCBI NO: 15239747 NR Description: anthranilate N-benzoyltransferase
  misc_feature (25)..(455): Homolog of NCBI NO: 32400293 NR Description: hydroxyanthranilate hydroxycinnamoyltransferase 2
  misc_feature (25)..(455): Homolog of NCBI NO: 32400295 NR Description: hydroxyanthranilate hydroxycinnamoyltransferase 3
  misc_feature (21)..(455): Homolog of NCBI NO: 6469032 NR Description: N-hydroxycinnamoyl/benzoyltransferase [Ipomoea
  misc_feature (25)..(455): Homolog of NCBI NO: 38345030 NR Description: OSJNBa0029H02.14 [Oryza sativa (japonica
KLTAHSQARCETQTQRPAHRSKRRMKVEVVETTLVPPSEATPRHALWLSNLDLAVPKTHTPLVYYYPRPAGAGAGEEGKGEGEGSFFDPARLREALSRALVPFYPLAGRLAAGPGGRLEIDCTGEGALFCVARADFTGDEMFADFEPSPEARRLLVPFAASGDPPCVLAMVQVTFLKCGGVAVGTGMHHVTMDGAGAIQFIRAWTALARGEAPAWTPSHDRTLLRARSPPHVPACEHPVYSPAYLNGAPRPFVTRVYAVPPKLLAGIRSRCAPGASTYCAVTAHLWRAMCVARGLPAGSDTRLRVPANVRQRLRPPLPASYFGNAIVRDLVTVRVADVLSQPLGFVAERIKRAVARVDDARVRSVVDYLELESDKGNQAARGQFMPESDLWVVSLLGMPIHDADFGWGRPGFVAPAQMFGSGTAYVTQGRDKDDPINVLFALEPEYLNTFEKAFYGE

SEQ ID NO: 15910 - protein, 433 aa, Zea mays subsp. mays
  peptide (1)..(433): Ceres Seq. ID no. 12362235
  misc_feature (2)..(431): Pfam Name: Transferase family Pfam Description: Transferase family
  misc_feature (1)..(431): Homolog of NCBI NO: 32400295 NR Description: hydroxyanthranilate hydroxycinnamoyltransferase 3
  misc_feature (1)..(431): Homolog of NCBI NO: 32400291 NR Description: hydroxyanthranilate hydroxycinnamoyltransferase 1
  misc_feature (1)..(431): Homolog of NCBI NO: 32400293 NR Description: hydroxyanthranilate hydroxycinnamoyltransferase 2
  misc_feature (1)..(431): Homolog of NCBI NO: 21536883 NR Description: anthranilate N-benzoyltransferase [Arabidopsis
  misc_feature (1)..(431): Homolog of NCBI NO: 15239747 NR Description: anthranilate N-benzoyltransferase
  misc_feature (1)..(431): Homolog of NCBI NO: 40644084 NR Description: hydroxycinnamoyl CoA quinate transferase
  misc_feature (1)..(431): Homolog of NCBI NO: 40644899 NR Description: hydroxycinnamoyl CoA quinate transferase
  misc_feature (1)..(431): Homolog of NCBI NO: 27475616 NR Description: hydroxycinnamoyl transferase [Nicotiana tabacum]
  misc_feature (1)..(431): Homolog of NCBI NO: 6469032 NR Description: N-hydroxycinnamoyl/benzoyltransferase [Ipomoea
  misc_feature (1)..(431): Homolog of NCBI NO: 38345030 NR Description: OSJNBa0029H02.14 [Oryza sativa (japonica
MKVEVVETTLVPPSEATPRHALWLSNLDLAVPKTHTPLVYYYPRPAGAGAGEEGKGEGEGSFFDPARLREALSRALVPFYPLAGRLAAGPGGRLEIDCTGEGALFCVARADFTGDEMFADFEPSPEARRLLVPFAASGDPPCVLAMVQVTFLKCGGVAVGTGMHHVTMDGAGAIQFIRAWTALARGEAPAWTPSHDRTLLRARSPPHVPACEHPVYSPAYLNGAPRPFVTRVYAVPPKLLAGIRSRCAPGASTYCAVTAHLWRAMCVARGLPAGSDTRLRVPANVRQRLRPPLPASYFGNAIVRDLVTVRVADVLSQPLGFVAERIKRAVARVDDARVRSVVDYLELESDKGNQAARGQFMPESDLWVVSLLGMPIHDADFGWGRPGFVAPAQMFGSGTAYVTQGRDKDDPINVLFALEPEYLNTFEKAFYGE

SEQ ID NO: 15911 - protein, 370 aa, Zea mays subsp. mays
  peptide (1)..(370): Ceres Seq. ID no. 12362236
  misc_feature (310)..(370): Pfam Name: Cupin Pfam Description: Cupin
  misc_feature (27)..(370): Homolog of NCBI NO: 79833 NR Description: hypothetical 119.5K protein (uvrA region) -
  misc_feature (30)..(370): Homolog of NCBI NO: 79833 NR Description: hypothetical 119.5K protein (uvrA region) -
  misc_feature (46)..(370): Homolog of NCBI NO: 23018055 NR Description: hypothetical protein [Thermobifida fusca]
AHRSLTSTLRNTDAETRAQIEAEDEGGGGGDDAGAAERGDAAARAVAVQPGPGGAQDPHPARLLLPEARRRRRRGGGKGRGRRVVLRPGAPAGGAVQGAGALLPAGGAAGGRPGRPARDRLHRRGRAVLRRAGRLHRRRDVRRLRALPRGAPPARAIRRVRRPALRARHGPGDLPQVRRRGRGHGHAPRDDGRRRRDPVHPGVDGAGARGGPRVDAVARPDAPARALPAARPRLRAPGLLPGLPQRGAAALRDARLRRAAQAAGGHPVALRAGRVHVLRGDGAPVARHVRRPGPPGGQRHAAARPGQRPAAPAPAAPGVLLRQRHRAGPGHRAGGRRAVAAAGLRGGADQARGGPRRRRPRALRRRLPGA

SEQ ID NO: 15912 - DNA, 1140 bp, Zea mays subsp. mays; identical to SEQ ID NO: 4797
  misc_feature (1)..(1140): Ceres Seq. ID no. 12386869
  misc_feature: MA Experiment ID: 108528 Result: Up-regulated in Transcription
  misc_feature: MA Experiment 108528 PARAMETER Experiment Name: Zm_Imbibed_Seeds_P Parameter: Age (day) Value: 5 vs. 2
  misc_feature: MA Experiment 108528 PARAMETER Experiment Name: Zm_Imbibed_Seeds_P Parameter: Organism Value: Zea mays
  misc_feature: MA Experiment 108528 PARAMETER Experiment Name: Zm_Imbibed_Seeds_P Parameter: Plant Line Value: 35A19
  misc_feature: MA Experiment 108528 PARAMETER Experiment Name: Zm_Imbibed_Seeds_P Parameter: Tissue Value: Aerial vs. Embryo
  misc_feature: MA Experiment ID: 108530 Result: Up-regulated in Transcription
  misc_feature: MA Experiment 108530 PARAMETER Experiment Name: Zm_Imbibed_Seeds_P Parameter: Age (day) Value: 6 vs. 2
  misc_feature: MA Experiment 108530 PARAMETER Experiment Name: Zm_Imbibed_Seeds_P Parameter: Organism Value: Zea mays
  misc_feature: MA Experiment 108530 PARAMETER Experiment Name: Zm_Imbibed_Seeds_P Parameter: Plant Line Value: 35A19
  misc_feature: MA Experiment 108530 PARAMETER Experiment Name: Zm_Imbibed_Seeds_P Parameter: Tissue Value: Aerial vs. Embryo
  misc_feature: MA Experiment ID: 108543 Result: Up-regulated in Transcription
  misc_feature: MA Experiment ID: 108544 Result: Up-regulated in Transcription
  misc_feature: MA Experiment ID: 108688 Result: Down-regulated in Transcription
  misc_feature: MA Experiment 108688 PARAMETER Experiment Name: Zm_Embryos-Flowers__P Parameter: Tissue Value: Immature Flowers vs. Aerial+
  misc_feature: MA Experiment ID: 20000535 Result: Down-regulated in Transcription
  misc_feature: MA Experiment 20000535 PARAMETER Experiment Name: Zm_Hybrid_Seed_Dev_P Parameter: DAP Value: 30 vs. 12
  misc_feature: MA Experiment 20000535 PARAMETER Experiment Name: Zm_Hybrid_Seed_Dev_P Parameter: Organism Value: Zea mays
  misc_feature: MA Experiment 20000535 PARAMETER Experiment Name: Zm_Hybrid_Seed_Dev_P Parameter: Plant Line Value: 35A19
  misc_feature: MA Experiment 20000535 PARAMETER Experiment Name: Zm_Hybrid_Seed_Dev_P Parameter: Tissue Value: Embryo vs. Unfert Floret

SEQ ID NO: 15913 - protein, 274 aa, Zea mays subsp. mays; identical to SEQ ID NO: 4798
  peptide (1)..(274): Ceres Seq. ID no. 12386870
  misc_feature (92)..(270): Pfam Name: Ribose 5-phosphate isomerase A (phosphoriboisomerase A) Pfam Description: Ribose 5-phosphate isomerase A
  misc_feature (92)..(270): Pfam Name: Ribose 5-phosphate isomerase A (phosphoriboisomerase A) Pfam Description: Ribose 5-phosphate isomerase A
  misc_feature (92)..(270): Pfam Name: Ribose 5-phosphate isomerase A (phosphoriboisomerase A) Pfam Description: Ribose 5-phosphate isomerase A
  misc_feature (1)..(274): Homolog of NCBI NO: 34393835 NR Description: putative ribose-5-phosphate isomerase [Oryza
  misc_feature (31)..(274): Homolog of NCBI NO: 34393836 NR Description: putative ribose-5-phosphate isomerase [Oryza
  misc_feature (29)..(274): Homolog of NCBI NO: 18654317 NR Description: ribose-5-phosphate isomerase [Spinacia oleracea]
  misc_feature (1)..(274): Homolog of NCBI NO: 21594002 NR Description: putative ribose 5-phosphate isomerase
  misc_feature (1)..(274): Homolog of NCBI NO: 15229349 NR Description: putative ribose 5-phosphate isomerase; protein At3g04790.1, supported by cDNA: 6349., supported by cDNA:
  misc_feature (31)..(274): Homolog of NCBI NO: 34393836 NR Description: putative ribose-5-phosphate isomerase [Oryza
  misc_feature (1)..(274): Homolog of NCBI NO: 21594002 NR Description: putative ribose 5-phosphate isomerase
  misc_feature (26)..(274): Homolog of NCBI NO: 21592672 NR Description: putative ribose 5-phosphate isomerase
  misc_feature (26)..(274): Homolog of NCBI NO: 15226223 NR Description: putative ribose 5-phosphate isomerase; protein At2g01290.1, supported by cDNA: gi_15809809, supported by cDNA:
  misc_feature (1)..(274): Homolog of NCBI NO: 15229349 NR Description: putative ribose 5-phosphate isomerase; protein At3g04790.1, supported by cDNA: 6349., supported by cDNA:
  misc_feature (34)..(268): Homolog of NCBI NO: 38347196 NR Description: OSJNBa0023J03.8 [Oryza sativa (japonica
  misc_feature (26)..(274): Homolog of NCBI NO: 13430836 NR Description: putative ribose 5-phosphate isomerase
  misc_feature (26)..(274): Homolog of NCBI NO: 15223936 NR Description: putative ribose 5-phosphate isomerase; protein At1g71100.1, supported by cDNA: 3116., supported by cDNA: [Arabidopsis thaliana] >gi|25329397|pir||E96735 hypothetical
  misc_feature (26)..(274): Homolog of NCBI NO: 21592672 NR Description: putative ribose 5-phosphate isomerase
  misc_feature (26)..(274): Homolog of NCBI NO: 15226223 NR Description: putative ribose 5-phosphate isomerase; protein At2g01290.1, supported by cDNA: gi_15809809, supported by cDNA:
  misc_feature (1)..(274): Homolog of NCBI NO: 15229349 NR Description: putative ribose 5-phosphate isomerase; protein At3g04790.1, supported by cDNA: 6349., supported by cDNA:
  misc_feature (1)..(274): Homolog of NCBI NO: 21594002 NR Description: putative ribose 5-phosphate isomerase
  misc_feature (29)..(274): Homolog of NCBI NO: 18654317 NR Description: ribose-5-phosphate isomerase [Spinacia oleracea]
  misc_feature (31)..(274): Homolog of NCBI NO: 34393836 NR Description: putative ribose-5-phosphate isomerase [Oryza
  misc_feature (1)..(274): Homolog of NCBI NO: 34393835 NR Description: putative ribose-5-phosphate isomerase [Oryza
  misc_feature (34)..(268): Homolog of NCBI NO: 38347196 NR Description: OSJNBa0023J03.8 [Oryza sativa (japonica
  misc_feature (26)..(274): Homolog of NCBI NO: 13430836 NR Description: putative ribose 5-phosphate isomerase
  misc_feature (26)..(274): Homolog of NCBI NO: 15223936 NR Description: putative ribose 5-phosphate isomerase; protein At1g71100.1, supported by cDNA: 3116., supported by cDNA: [Arabidopsis thaliana] >gi|25329397|pir||E96735 hypothetical
  misc_feature (29)..(274): Homolog of NCBI NO: 18654317 NR Description: ribose-5-phosphate isomerase [Spinacia oleracea]
  misc_feature (1)..(274): Homolog of NCBI NO: 34393835 NR Description: putative ribose-5-phosphate isomerase [Oryza
  misc_feature (26)..(274): Homolog of NCBI NO: 15226223 NR Description: putative ribose 5-phosphate isomerase; protein At2g01290.1, supported by cDNA: gi_15809809, supported by cDNA:
  misc_feature (26)..(274): Homolog of NCBI NO: 21592672 NR Description: putative ribose 5-phosphate isomerase
  misc_feature (26)..(274): Homolog of NCBI NO: 15223936 NR Description: putative ribose 5-phosphate isomerase; protein At1g71100.1, supported by cDNA: 3116., supported by cDNA: [Arabidopsis thaliana] >gi|25329397|pir||E96735 hypothetical
  misc_feature (26)..(274): Homolog of NCBI NO: 13430836 NR Description: putative ribose 5-phosphate isomerase
  misc_feature (34)..(268): Homolog of NCBI NO: 38347196 NR Description: OSJNBa0023J03.8 [Oryza sativa (japonica

SEQ ID NO: 15914 - protein, 212 aa, Zea mays subsp. mays; identical to SEQ ID NO: 4799
  peptide (1)..(212): Ceres Seq. ID no. 12386871
  misc_feature (30)..(208): Pfam Name: Ribose 5-phosphate isomerase A (phosphoriboisomerase A) Pfam Description: Ribose 5-phosphate isomerase A
  misc_feature (30)..(208): Pfam Name: Ribose 5-phosphate isomerase A (phosphoriboisomerase A) Pfam Description: Ribose 5-phosphate isomerase A
  misc_feature (30)..(208): Pfam Name: Ribose 5-phosphate isomerase A (phosphoriboisomerase A) Pfam Description: Ribose 5-phosphate isomerase A
  misc_feature (1)..(212): Homolog of NCBI NO: 21592672 NR Description: putative ribose 5-phosphate isomerase
  misc_feature (1)..(212): Homolog of NCBI NO: 15223936 NR Description: putative ribose 5-phosphate isomerase; protein At1g71100.1, supported by cDNA: 3116., supported by cDNA: [Arabidopsis thaliana] >gi|25329397|pir||E96735 hypothetical
  misc_feature (1)..(212): Homolog of NCBI NO: 34393835 NR Description: putative ribose-5-phosphate isomerase [Oryza
  misc_feature (1)..(212): Homolog of NCBI NO: 18654317 NR Description: ribose-5-phosphate isomerase [Spinacia oleracea]
  misc_feature (1)..(212): Homolog of NCBI NO: 15229349 NR Description: putative ribose 5-phosphate isomerase; protein At3g04790.1, supported by cDNA: 6349., supported by cDNA:
  misc_feature (1)..(212): Homolog of NCBI NO: 34393836 NR Description: putative ribose-5-phosphate isomerase [Oryza
  misc_feature (1)..(212): Homolog of NCBI NO: 21594002 NR Description: putative ribose 5-phosphate isomerase
  misc_feature (1)..(212): Homolog of NCBI NO: 18654317 NR Description: ribose-5-phosphate isomerase [Spinacia oleracea]
  misc_feature (1)..(212): Homolog of NCBI NO: 34393836 NR Description: putative ribose-5-phosphate isomerase [Oryza
  misc_feature (1)..(212): Homolog of NCBI NO: 34393835 NR Description: putative ribose-5-phosphate isomerase [Oryza
  misc_feature (1)..(206): Homolog of NCBI NO: 38347196 NR Description: OSJNBa0023J03.8 [Oryza sativa (japonica
  misc_feature (1)..(212): Homolog of NCBI NO: 13430836 NR Description: putative ribose 5-phosphate isomerase
  misc_feature (1)..(212): Homolog of NCBI NO: 15223936 NR Description: putative ribose 5-phosphate isomerase; protein At1g71100.1, supported by cDNA: 3116., supported by cDNA: [Arabidopsis thaliana] >gi|25329397|pir||E96735 hypothetical
  misc_feature (1)..(212): Homolog of NCBI NO: 21592672 NR Description: putative ribose 5-phosphate isomerase
  misc_feature (1)..(212): Homolog of NCBI NO: 15226223 NR Description: putative ribose 5-phosphate isomerase; protein At2g01290.1, supported by cDNA: gi_15809809, supported by cDNA:
  misc_feature (1)..(212): Homolog of NCBI NO: 15229349 NR Description: putative ribose 5-phosphate isomerase; protein At3g04790.1, supported by cDNA: 6349., supported by cDNA:
  misc_feature (1)..(206): Homolog of NCBI NO: 38347196 NR Description: OSJNBa0023J03.8 [Oryza sativa (japonica
  misc_feature (1)..(212): Homolog of NCBI NO: 13430836 NR Description: putative ribose 5-phosphate isomerase
  misc_feature (1)..(212): Homolog of NCBI NO: 15223936 NR Description: putative ribose 5-phosphate isomerase; protein At1g71100.1, supported by cDNA: 3116., supported by cDNA: [Arabidopsis thaliana] >gi|25329397|pir||E96735 hypothetical
  misc_feature (1)..(212): Homolog of NCBI NO: 21592672 NR Description: putative ribose 5-phosphate isomerase
  misc_feature (1)..(212): Homolog of NCBI NO: 15226223 NR Description: putative ribose 5-phosphate isomerase; protein At2g01290.1, supported by cDNA: gi_15809809, supported by cDNA:
  misc_feature (1)..(212): Homolog of NCBI NO: 15229349 NR Description: putative ribose 5-phosphate isomerase; protein At3g04790.1, supported by cDNA: 6349., supported by cDNA:
  misc_feature (1)..(212): Homolog of NCBI NO: 21594002 NR Description: putative ribose 5-phosphate isomerase
  misc_feature (1)..(212): Homolog of NCBI NO: 18654317 NR Description: ribose-5-phosphate isomerase [Spinacia oleracea]
  misc_feature (1)..(212): Homolog of NCBI NO: 34393835 NR Description: putative ribose-5-phosphate isomerase [Oryza
  misc_feature (1)..(212): Homolog of NCBI NO: 15226223 NR Description: putative ribose 5-phosphate isomerase; protein At2g01290.1, supported by cDNA: gi_15809809, supported by cDNA:
  misc_feature (1)..(212): Homolog of NCBI NO: 21594002 NR Description: putative ribose 5-phosphate isomerase
  misc_feature (1)..(212): Homolog of NCBI NO: 34393836 NR Description: putative ribose-5-phosphate isomerase [Oryza
  misc_feature (1)..(212): Homolog of NCBI NO: 13430836 NR Description: putative ribose 5-phosphate isomerase
  misc_feature (1)..(206): Homolog of NCBI NO: 38347196 NR Description: OSJNBa0023J03.8 [Oryza sativa (japonica

SEQ ID NO: 15915 - protein, 178 aa, Zea mays subsp. mays; identical to SEQ ID NO: 4800
  peptide (1)..(178): Ceres Seq. ID no. 12386872

SEQ ID NO: 15916 - DNA, 1370 bp, Zea mays subsp. mays
  misc_feature (1)..(1370): Ceres Seq. ID no. 12372818
  misc_feature: MA Experiment ID: 108535 Result: Up-regulated in Transcription
  misc_feature: MA Experiment 108535 PARAMETER Experiment Name: Zm_Meristem_P Parameter: Age (day) Value: 8
  misc_feature: MA Experiment 108535 PARAMETER Experiment Name: Zm_Meristem_P Parameter: Organism Value: Zea mays
  misc_feature: MA Experiment 108535 PARAMETER Experiment Name: Zm_Meristem_P Parameter: Plant Line Value: 35A19
  misc_feature: MA Experiment 108535 PARAMETER Experiment Name: Zm_Meristem_P Parameter: Tissue Value: Root Meristem vs. Above Root Meristem
  misc_feature: MA Experiment ID: 20000535 Result: Up-regulated in Transcription
  misc_feature: MA Experiment 20000535 PARAMETER Experiment Name: Zm_Hybrid_Seed_Dev_P Parameter: DAP Value: 30 vs. 12
  misc_feature: MA Experiment 20000535 PARAMETER Experiment Name: Zm_Hybrid_Seed_Dev_P Parameter: Organism Value: Zea mays
  misc_feature: MA Experiment 20000535 PARAMETER Experiment Name: Zm_Hybrid_Seed_Dev_P Parameter: Plant Line Value: 35A19
  misc_feature: MA Experiment 20000535 PARAMETER Experiment Name: Zm_Hybrid_Seed_Dev_P Parameter: Tissue Value: Embryo vs. Unfert Floret
atattgtaatgaacactcccttacgtgcagtgccgcgagctgacctccacgaggaccgaaacaattatcgccagattggccgcttcacctcgacagccacgccaccaccactgcgggtctgcggcagtcggcacatggagctcctgcgggacagcatctccatggtgtccctggctgtcctggtgaccgcggtgtgcgcgcgcgccgcgtcctcgtggctccgccccggtctccctcgcctggcgtcgttgctcccgatggtcgcctttcttgccgcggctcccctggctttctcctctgcaatcatccggggacttgcaggcttcttcctcgggtggctcggcgtgttcaaggtcgtcctcctggccgtcggccgcggcccgcttgaccccgccctccccgttctcccgttcgtcttcaccacagcgcttcccgttaagctcagatgcagcagcaccggcgctgcagcagcgtgcagggccaaatcggtctccctcgtctcgtgcgcggtcaaggtcgcggtcatagccgccatcctccatgtgtaccagtacacggaccagctgcatctctacactcgcctcgctctgtacagcgtccacatctactgcttcttggacttcctcctcccgtgcatcgcggcggctggcggcgccctcggcatggatatggagccgcagttcgacaagccgtacctggcgtcgtccctacgcgacttctggggccggcggtggaacctcgtggtgtcggacatcctccggccgtctgtctacggccccgtgcgcgcgcgcgccgggaaggcaccggccgtcctggccacgttcctcgtgtccgggctgatgcacgaggtcatgatttactacctcaccctgcgatcacccaccggtgagatgacggccttcttcctgctccatggcgtctgctgtattgccgaggagtcgtgcgcgcggcggtggatgcagtggggttggaggccgccgccgcgacccgtggctacgctgctcgtggtggtgttcgtggccggcaccgcattctggctcttcttcccgcaaatttgcagggaaggaatggaggagttactgctcgaggagtgggcagcggtaggggcgttcttcaacgacgccgcccgaaagctgctccagatgttcacgtgaagacttgaaagtcggcagtcggcaccagcagactcgttccaatcctctagagataattagtagctatggttttagctgtgttcacagagctaacaacaatagcaatagctatttgagaaacatatagtgtgtttggtttgagaaacgaagtggtgtatctctttctcacttttcacttttttatttggtttgtgaattttatttggtttgtgaaat

SEQ ID NO: 15917 - protein, 383 aa, Zea mays subsp. mays
  peptide (1)..(383): Ceres Seq. ID no. 12372819
  misc_feature (94)..(353): Pfam Name: MBOAT family Pfam Description: MBOAT family
  misc_feature (46)..(363): Homolog of NCBI NO: 15240500 NR Description: wax synthase-like protein
  misc_feature (46)..(363): Homolog of NCBI NO: 15240496 NR Description: putative protein
  misc_feature (46)..(363): Homolog of NCBI NO: 15240497 NR Description: wax synthase-like protein; protein id:
  misc_feature (48)..(382): Homolog of NCBI NO: 34911838 NR Description: wax synthase-like protein
  misc_feature (57)..(382): Homolog of NCBI NO: 27728716 NR Description: wax synthase isoform 2 [Vitis vinifera]
  misc_feature (57)..(382): Homolog of NCBI NO: 27728714 NR Description: wax synthase isoform 1 [Vitis vinifera]
  misc_feature (66)..(377): Homolog of NCBI NO: 28812087 NR Description: putative wax synthase protein
  misc_feature (48)..(374): Homolog of NCBI NO: 38345253 NR Description: OSJNBb0011N17.14 [Oryza sativa (japonica
  misc_feature (50)..(373): Homolog of NCBI NO: 38345254 NR Description: OSJNBb0011N17.15 [Oryza sativa (japonica
  misc_feature (45)..(378): Homolog of NCBI NO: 38347115 NR Description: OSJNBa0009K15.12 [Oryza sativa (japonica
IVMNTPLRAVPRADLHEDRNNYRQIGRFTSTATPPPLRVCGSRHMELLRDSISMVSLAVLVTAVCARAASSWLRPGLPRLASLLPMVAFLAAAPLAFSSAIIRGLAGFFLGWLGVFKVVLLAVGRGPLDPALPVLPFVFTTALPVKLRCSSTGAAAACRAKSVSLVSCAVKVAVIAAILHVYQYTDQLHLYTRLALYSVHIYCFLDFLLPCIAAAGGALGMDMEPQFDKPYLASSLRDFWGRRWNLVVSDILRPSVYGPVRARAGKAPAVLATFLVSGLMHEVMIYYLTLRSPTGEMTAFFLLHGVCCIAEESCARRWMQWGWRPPPRPVATLLVVVFVAGTAFWLFFPQICREGMEELLLEEWAAVGAFFNDAARKLLQMFT

SEQ ID NO: 15918 - protein, 381 aa, Zea mays subsp. mays
  peptide (1)..(381): Ceres Seq. ID no. 12372820
  misc_feature (92)..(351): Pfam Name: MBOAT family Pfam Description: MBOAT family
  misc_feature (44)..(361): Homolog of NCBI NO: 15240500 NR Description: wax synthase-like protein
  misc_feature (44)..(361): Homolog of NCBI NO: 15240496 NR Description: putative protein
  misc_feature (44)..(361): Homolog of NCBI NO: 15240497 NR Description: wax synthase-like protein; protein id:
  misc_feature (46)..(380): Homolog of NCBI NO: 34911838 NR Description: wax synthase-like protein
  misc_feature (55)..(380): Homolog of NCBI NO: 27728716 NR Description: wax synthase isoform 2 [Vitis vinifera]
  misc_feature (55)..(380): Homolog of NCBI NO: 27728714 NR Description: wax synthase isoform 1 [Vitis vinifera]
  misc_feature (64)..(375): Homolog of NCBI NO: 28812087 NR Description: putative wax synthase protein
  misc_feature (46)..(372): Homolog of NCBI NO: 38345253 NR Description: OSJNBb0011N17.14 [Oryza sativa (japonica
  misc_feature (48)..(371): Homolog of NCBI NO: 38345254 NR Description: OSJNBb0011N17.15 [Oryza sativa (japonica
  misc_feature (43)..(376): Homolog of NCBI NO: 38347115 NR Description: OSJNBa0009K15.12 [Oryza sativa (japonica
MNTPLRAVPRADLHEDRNNYRQIGRFTSTATPPPLRVCGSRHMELLRDSISMVSLAVLVTAVCARAASSWLRPGLPRLASLLPMVAFLAAAPLAFSSAIIRGLAGFFLGWLGVFKVVLLAVGRGPLDPALPVLPFVFTTALPVKLRCSSTGAAAACRAKSVSLVSCAVKVAVIAAILHVYQYTDQLHLYTRLALYSVHIYCFLDFLLPCIAAAGGALGMDMEPQFDKPYLASSLRDFWGRRWNLVVSDILRPSVYGPVRARAGKAPAVLATFLVSGLMHEVMIYYLTLRSPTGEMTAFFLLHGVCCIAEESCARRWMQWGWRPPPRPVATLLVVVFVAGTAFWLFFPQICREGMEELLLEEWAAVGAFFNDAARKLLQMFT

SEQ ID NO: 15919 - protein, 339 aa, Zea mays subsp. mays
  peptide (1)..(339): Ceres Seq. ID no. 12372821
  misc_feature (50)..(309): Pfam Name: MBOAT family Pfam Description: MBOAT family
  misc_feature (2)..(319): Homolog of NCBI NO: 15240500 NR Description: wax synthase-like protein
  misc_feature (2)..(319): Homolog of NCBI NO: 15240496 NR Description: putative protein
  misc_feature (2)..(319): Homolog of NCBI NO: 15240497 NR Description: wax synthase-like protein; protein id:
  misc_feature (4)..(338): Homolog of NCBI NO: 34911838 NR Description: wax synthase-like protein
  misc_feature (13)..(338): Homolog of NCBI NO: 27728716 NR Description: wax synthase isoform 2 [Vitis vinifera]
  misc_feature (13)..(338): Homolog of NCBI NO: 27728714 NR Description: wax synthase isoform 1 [Vitis vinifera]
  misc_feature (22)..(333): Homolog of NCBI NO: 28812087 NR Description: putative wax synthase protein
  misc_feature (4)..(330): Homolog of NCBI NO: 38345253 NR Description: OSJNBb0011N17.14 [Oryza sativa (japonica
  misc_feature (6)..(329): Homolog of NCBI NO: 38345254 NR Description: OSJNBb0011N17.15 [Oryza sativa (japonica
  misc_feature (1)..(334): Homolog of NCBI NO: 38347115 NR Description: OSJNBa0009K15.12 [Oryza sativa (japonica
MELLRDSISMVSLAVLVTAVCARAASSWLRPGLPRLASLLPMVAFLAAAPLAFSSAIIRGLAGFFLGWLGVFKVVLLAVGRGPLDPALPVLPFVFTTALPVKLRCSSTGAAAACRAKSVSLVSCAVKVAVIAAILHVYQYTDQLHLYTRLALYSVHIYCFLDFLLPCIAAAGGALGMDMEPQFDKPYLASSLRDFWGRRWNLVVSDILRPSVYGPVRARAGKAPAVLATFLVSGLMHEVMIYYLTLRSPTGEMTAFFLLHGVCCIAEESCARRWMQWGWRPPPRPVATLLVVVFVAGTAFWLFFPQICREGMEELLLEEWAAVGAFFNDAARKLLQMFT

SEQ ID NO: 15920 - DNA, 1237 bp, Zea mays subsp. mays
  misc_feature (1)..(1237): Ceres Seq. ID no. 12353106
  misc_feature: MA Experiment ID: 108504 Result: Up-regulated in Transcription
  misc_feature: MA Experiment 108504 PARAMETER Experiment Name: Zm_Drought_P Parameter: Age (day) Value: 8
  misc_feature: MA Experiment 108504 PARAMETER Experiment Name: Zm_Drought_P Parameter: Organism Value: Zea mays
  misc_feature: MA Experiment 108504 PARAMETER Experiment Name: Zm_Drought_P Parameter: Plant Line Value: 35A19
  misc_feature: MA Experiment 108504 PARAMETER Experiment Name: Zm_Drought_P Parameter: Timepoint (hr) Value: 12
  misc_feature: MA Experiment 108504 PARAMETER Experiment Name: Zm_Drought_P Parameter: Tissue Value: Aerial
  misc_feature: MA Experiment 108504 PARAMETER Experiment Name: Zm_Drought_P Parameter: Treatment Value: Drought vs. No Drought
  misc_feature: MA Experiment ID: 108528 Result: Up-regulated in Transcription
  misc_feature: MA Experiment 108528 PARAMETER Experiment Name: Zm_Imbibed_Seeds_P Parameter: Age (day) Value: 5 vs. 2
  misc_feature: MA Experiment 108528 PARAMETER Experiment Name: Zm_Imbibed_Seeds_P Parameter: Organism Value: Zea mays
  misc_feature: MA Experiment 108528 PARAMETER Experiment Name: Zm_Imbibed_Seeds_P Parameter: Plant Line Value: 35A19
  misc_feature: MA Experiment 108528 PARAMETER Experiment Name: Zm_Imbibed_Seeds_P Parameter: Tissue Value: Aerial vs. Embryo
  misc_feature: MA Experiment ID: 108543 Result: Down-regulated in Transcription
  misc_feature: MA Experiment ID: 108556 Result: Up-regulated in Transcription
  misc_feature: MA Experiment 108556 PARAMETER Experiment Name: Zm_Drought_P Parameter: Age (day) Value: 9
  misc_feature: MA Experiment 108556 PARAMETER Experiment Name: Zm_Drought_P Parameter: Organism Value: Zea mays
  misc_feature: MA Experiment 108556 PARAMETER Experiment Name: Zm_Drought_P Parameter: Plant Line Value: 35A19
  misc_feature: MA Experiment 108556 PARAMETER Experiment Name: Zm_Drought_P Parameter: Timepoint (hr) Value: 24
  misc_feature: MA Experiment 108556 PARAMETER Experiment Name: Zm_Drought_P Parameter: Tissue Value: Aerial
  misc_feature: MA Experiment 108556 PARAMETER Experiment Name: Zm_Drought_P Parameter: Treatment Value: Drought vs. No Drought
  misc_feature: MA Experiment ID: 108689 Result: Up-regulated in Transcription
  misc_feature: MA Experiment 108689 PARAMETER Experiment Name: Zm_Drought_Roots_P Parameter: Age (day) Value: 9
  misc_feature: MA Experiment 108689 PARAMETER Experiment Name: Zm_Drought_Roots_P Parameter: Organism Value: Zea mays
  misc_feature: MA Experiment 108689 PARAMETER Experiment Name: Zm_Drought_Roots_P Parameter: Plant Line Value: 35A19
  misc_feature: MA Experiment 108689 PARAMETER Experiment Name: Zm_Drought_Roots_P Parameter: Timepoint (hr) Value: 24
  misc_feature: MA Experiment 108689 PARAMETER Experiment Name: Zm_Drought_Roots_P Parameter: Tissue Value: Roots
  misc_feature: MA Experiment 108689 PARAMETER Experiment Name: Zm_Drought_Roots_P Parameter: Treatment Value: Drought vs. No Drought
accatttcacaccctcttgcctccccgtgactacctcgctgtcccctctcagtgtccaagcgacgacaccacgccgccgagatgtggatctcagattccgcctttgtggagccctcatcttcctccccatccgcctctgcctccccgccgccgagcccgccaccagcacgccttctccgccaacgcaaccgccgccgacgccgcaacagccggaaacagggcagtgccagcgccgtcgacggcgtcgccgaccccgaggcggaggacgtgtggcgtggggcgcagtgggaggcggcgtggccggcgaggcgggactcgaaacccgtcgtgctcgcgggcggagacgacgcggtggggcggtccaggagcctcacggacgacgacctcgaggagctcaagggatgcgccgacctgggcttcggcttcaactacgacgagatccccgagctccggagcaccctgccggcgctcgagctgtgctactccatgagccagcgcctccagctggacgacgagaagccgccgcagcagcacgagggcgccgcaccagatgccgccacgccgtcgccgcctgtcaccaactggaagatctccagccccggtgacagccctgacgaggtgaaggcgcggctcaagtactgggcgcaggcggtggcgtgcaccgtccgcctttgcagctgaacggcgccgatccatgcgcgccattcttcgccgtctggaagcacacaccataccggtatgccggccgccaccacacaagaaaccggatgaccagacctaatcgcgaacacgttgctgctgctgtaaagtgatccaggtgcaccgtttcagctgcgacggcgggcgttggcagctgccatgattgcagctgcagagtttggtggagcatcgttggtagtcgtgtagcagcacacataggggctgggtaaatgggttggttgcccaaccgacatgctgtgctctctgttccagctgagcaacctgcctttgcctgatgaaccaaccatccgagtgtgcagcagccatctccagcggaaataaactattgtaattgtactgctagcagtagtgatcaaaataatgtgcagagtaattagtactgcaagcaaatcggggaatcattgtgaatacataaatctgtggatctcattactatactgttatcttaatcattagctggtgtacctgctacctactgcagctgtttggtaataatggtgcagatgctttccttctc

SEQ ID NO: 15921 - protein, 200 aa, Zea mays subsp. mays
  peptide (1)..(200): Ceres Seq. ID no. 12353107
HFTPSCLPVTTSLSPLSVQATTPRRRDVDLRFRLCGALIFLPIRLCLPAAEPATSTPSPPTQPPPTPQQPETGQCQRRRRRRRPRGGGRVAWGAVGGGVAGEAGLETRRARGRRRRGGAVQEPHGRRPRGAQGMRRPGLRLQLRRDPRAPEHPAGARAVLLHEPAPPAGRREAAAAARGRRTRCRHAVAACHQLEDLQPR

SEQ ID NO: 15922 - protein, 199 aa, Zea mays subsp. mays
  peptide (1)..(199): Ceres Seq. ID no. 12353108
  misc_feature (136)..(199): Homolog of NCBI NO: 26451183 NR Description: unknown protein [Arabidopsis thaliana]
  misc_feature (70)..(195): Homolog of NCBI NO: 15229330 NR Description: hypothetical protein; protein id: At3g04700.1
  misc_feature (97)..(195): Homolog of NCBI NO: 15228829 NR Description: hypothetical protein; protein id: At3g22690.1
  misc_feature (86)..(184): Homolog of NCBI NO: 34907664 NR Description: P0506A10.18 [Oryza sativa (japonica
  misc_feature (89)..(175): Homolog of NCBI NO: 25408168 NR Description: hypothetical protein At2g31560 [imported] -
  misc_feature (89)..(192): Homolog of NCBI NO: 15221309 NR Description: unknown protein; protein id: At1g05870.1
  misc_feature (82)..(196): Homolog of NCBI NO: 25408860 NR Description: hypothetical protein At2g43340 [imported] -
  misc_feature (82)..(199): Homolog of NCBI NO: 30689349 NR Description: expressed protein [Arabidopsis thaliana]
  misc_feature (89)..(199): Homolog of NCBI NO: 25406874 NR Description: hypothetical protein [imported] - Arabidopsis
  misc_feature (89)..(199): Homolog of NCBI NO: 30684991 NR Description: expressed protein [Arabidopsis thaliana]
MWISDSAFVEPSSSSPSASASPPPSPPPARLLRQRNRRRRRNSRKQGSASAVDGVADPEAEDVWRGAQWEAAWPARRDSKPVVLAGGDDAVGRSRSLTDDDLEELKGCADLGFGFNYDEIPELRSTLPALELCYSMSQRLQLDDEKPPQQHEGAAPDAATPSPPVTNWKISSPGDSPDEVKARLKYWAQAVACTVRLCS

SEQ ID NO: 15923 - protein, 162 aa, Zea mays subsp. mays
  peptide (1)..(162): Ceres Seq. ID no. 12353109
  misc_feature (55)..(162): Pfam Name: Herpesvirus alkaline exonuclease Pfam Description: Herpesvirus alkaline exonuclease
PFHTLLPPRDYLAVPSQCPSDDTTPPRCGSQIPPLWSPHLPPHPPLPPRRRARHQHAFSANATAADAATAGNRAVPAPSTASPTPRRRTCGVGRSGRRRGRRGGTRNPSCSRAETTRWGGPGASRTTTSRSSRDAPTWASASTTTRSPSSGAPCRRSSCATP

SEQ ID NO: 15924 - DNA, 1449 bp, Zea mays subsp. mays
  misc_feature (1)..(1449): Ceres Seq. ID no. 12367750
  misc_feature: MA Experiment ID: 108522 Result: Up-regulated in Transcription
  misc_feature: MA Experiment 108522 PARAMETER Experiment Name: Zm_42deg_Heat_P Parameter: Age (day) Value: 8
  misc_feature: MA Experiment 108522 PARAMETER Experiment Name: Zm_42deg_Heat_P Parameter: Organism Value: Zea mays
  misc_feature: MA Experiment 108522 PARAMETER Experiment Name: Zm_42deg_Heat_P Parameter: Plant Line Value: 35A19
  misc_feature: MA Experiment 108522 PARAMETER Experiment Name: Zm_42deg_Heat_P Parameter: Temperature (deg C) Value: 42 vs. 22
  misc_feature: MA Experiment 108522 PARAMETER Experiment Name: Zm_42deg_Heat_P Parameter: Timepoint (hr) Value: 1
  misc_feature: MA Experiment 108522 PARAMETER Experiment Name: Zm_42deg_Heat_P Parameter: Tissue Value: Aerial
  misc_feature: MA Experiment ID: 20000534 Result: Up-regulated in Transcription
  misc_feature: MA Experiment 20000534 PARAMETER Experiment Name: Zm_Hybrid_Pollen_P Parameter: Age (day) Value: 8
  misc_feature: MA Experiment 20000534 PARAMETER Experiment Name: Zm_Hybrid_Pollen_P Parameter: Organism Value: Zea mays
  misc_feature: MA Experiment 20000534 PARAMETER Experiment Name: Zm_Hybrid_Pollen_P Parameter: Plant Line Value: 35A19
  misc_feature: MA Experiment 20000534 PARAMETER Experiment Name: Zm_Hybrid_Pollen_P Parameter: Tissue Value: Pollen vs. Aerial
gcacgagaccattacctagaacatcctaatcgaaaactccacgccgcgcccgcggagctcgacgcccaccggcgctgcccgtcggagccggggggacgcgccggcgccggagctggcgggagcggagctggcggccatcttccgggtgatggcggacctcctcagcgacccagcgtggccgcagctccatccgcggccctgcaccgacacgccgtggccgggcctgcaatgcgagctcgtgcccgacgacgcgcgcgtgctccgcatcacccgcctccacctgggtctcgacgtcgccaccccgccctgcaggcccgaggccagactagaccccgcctcgctgcgcggactaccgcacctccggacgctctccatcttcagctgctttggcgccgcccaagcctccgttgagctgccgcccgcgctgttcacgtcgtcgtcctcgctcgagcagatcgtgctcaagtccaaccccggcctcaccggcctcataccggcgacgttgggcagcctgcggagcctgcgcgtgctcagcctctcgcagaacggcttccgcggcgggatccccagggagctcggcggcctcgccgcgctgcagcagctcgacctcagctacaacaacatcaccggcgagatccccgaggagattggtgcgatgtcgagtctgacgatccttgacctgagctggaacagcatcggcggcggcgtgccggcgacgctgggcaagctccagaggatgcagaaggcggacctgagctacaaccgcctcgccggccgcgtgccgccggaggcggggtcgctgcgggagctggtgttcctggacctgagccacaacagcctcgcgggcccgctgccgagctcgctggccggcctgtccaggctgcagtacctgctgctgcaggacaaccccctcggcacggcggtgccggcggtggtcgggtcgctgcggcggctgcaggtgctgggcctgtccgggtgcaacctgacggggcccatcccgcgcggcgcgttcgcggcgctggccagcctcacggcgctgtcgctggaccggaaccggctggacgggccgatcccggcgagcctggccgcgctgccccaactgggccagctcaacctcagccagaaccggctggccggggagatcgcgctgccgggggagtttgtcgcgcggctcggcaggcgcctcgacgtccggggcaacgacgagctgtgcatcggcaggggcctacagggtagcggctatctgggagcgcccccgtgcgtggacagccacaacggcgacggatcgccggaaatatcaggtgctgctgcggcggccgtcggcctattcgacgggtcggcgtgtcatctttttgtgtcgtgtctggcgttcgtgttccagttgtgatgtgacatgtaactccggtcgctttctccgcccgactgctgcgacgcgagttttttcctgcc

SEQ ID NO: 15925 - protein, 412 aa, Zea mays subsp. mays
  peptide (1)..(412): Ceres Seq. ID no. 12367751
  misc_feature (1)..(355): Homolog of NCBI NO: 15230865 NR Description: leucine rich repeat protein family; protein id:
  misc_feature (1)..(355): Homolog of NCBI NO: 15222215 NR Description: leucine rich repeat protein family; protein id:
  misc_feature (1)..(358): Homolog of NCBI NO: 26452151 NR Description: GPI-anchored protein [Arabidopsis thaliana]
  misc_feature (1)..(358): Homolog of NCBI NO: 15220050 NR Description: leucine rich repeat protein family; protein id:
  misc_feature (1)..(354): Homolog of NCBI NO: 15236148 NR Description: leucine rich repeat protein family (fragment)
  misc_feature (1)..(354): Homolog of NCBI NO: 7487680 NR Description: hypothetical protein T5F17.10 - Arabidopsis
  misc_feature (1)..(403): Homolog of NCBI NO: 34894182 NR Description: P0439B06.12 [Oryza sativa (japonica
  misc_feature (1)..(393): Homolog of NCBI NO: 34912808 NR Description: P0501G01.13 [Oryza sativa (japonica
  misc_feature (1)..(356): Homolog of NCBI NO: 15228004 NR Description: leucine rich repeat protein family; protein id:
  misc_feature (1)..(388): Homolog of NCBI NO: 34910824 NR Description: putative Hcr2-0B [Oryza sativa (japonica
MADLLSDPAWPQLHPRPCTDTPWPGLQCELVPDDARVLRITRLHLGLDVATPPCRPEARLDPASLRGLPHLRTLSIFSCFGAAQASVELPPALFTSSSSLEQIVLKSNPGLTGLIPATLGSLRSLRVLSLSQNGFRGGIPRELGGLAALQQLDLSYNNITGEIPEEIGAMSSLTILDLSWNSIGGGVPATLGKLQRMQKADLSYNRLAGRVPPEAGSLRELVFLDLSHNSLAGPLPSSLAGLSRLQYLLLQDNPLGTAVPAVVGSLRRLQVLGLSGCNLTGPIPRGAFAALASLTALSLDRNRLDGPIPASLAALPQLGQLNLSQNRLAGEIALPGEFVARLGRRLDVRGNDELCIGRGLQGSGYLGAPPCVDSHNGDGSPEISGAAAAAVGLFDGSACHLFVSCLAFVFQL

SEQ ID NO: 15926 - protein, 243 aa, Zea mays subsp. mays
  peptide (1)..(243): Ceres Seq. ID no. 12367752
  misc_feature (1)..(224): Homolog of NCBI NO: 34912808 NR Description: P0501G01.13 [Oryza sativa (japonica
  misc_feature (1)..(187): Homolog of NCBI NO: 15228004 NR Description: leucine rich repeat protein family; protein id:
  misc_feature (1)..(219): Homolog of NCBI NO: 34910824 NR Description: putative Hcr2-0B [Oryza sativa (japonica
  misc_feature (1)..(186): Homolog of NCBI NO: 15230865 NR Description: leucine rich repeat protein family; protein id:
  misc_feature (1)..(186): Homolog of NCBI NO: 15222215 NR Description: leucine rich repeat protein family; protein id:
  misc_feature (1)..(189): Homolog of NCBI NO: 26452151 NR Description: GPI-anchored protein [Arabidopsis thaliana]
  misc_feature (1)..(189): Homolog of NCBI NO: 15220050 NR Description: leucine rich repeat protein family; protein id:
  misc_feature (1)..(185): Homolog of NCBI NO: 15236148 NR Description: leucine rich repeat protein family (fragment)
  misc_feature (1)..(185): Homolog of NCBI NO: 7487680 NR Description: hypothetical protein T5F17.10 - Arabidopsis
  misc_feature (1)..(234): Homolog of NCBI NO: 34894182 NR Description: P0439B06.12 [Oryza sativa (japonica
MSSLTILDLSWNSIGGGVPATLGKLQRMQKADLSYNRLAGRVPPEAGSLRELVFLDLSHNSLAGPLPSSLAGLSRLQYLLLQDNPLGTAVPAVVGSLRRLQVLGLSGCNLTGPIPRGAFAALASLTALSLDRNRLDGPIPASLAALPQLGQLNLSQNRLAGEIALPGEFVARLGRRLDVRGNDELCIGRGLQGSGYLGAPPCVDSHNGDGSPEISGAAAAAVGLFDGSACHLFVSCLAFVFQL

SEQ ID NO: 15927 - protein, 216 aa, Zea mays subsp. mays
  peptide (1)..(216): Ceres Seq. ID no. 12367753
  misc_feature (1)..(159): Homolog of NCBI NO: 15230865 NR Description: leucine rich repeat protein family; protein id:
  misc_feature (1)..(159): Homolog of NCBI NO: 15222215 NR Description: leucine rich repeat protein family; protein id:
  misc_feature (1)..(162): Homolog of NCBI NO: 26452151 NR Description: GPI-anchored protein [Arabidopsis thaliana]
  misc_feature (1)..(162): Homolog of NCBI NO: 15220050 NR Description: leucine rich repeat protein family; protein id:
  misc_feature (1)..(158): Homolog of NCBI NO: 15236148 NR Description: leucine rich repeat protein family (fragment)
  misc_feature (1)..(158): Homolog of NCBI NO: 7487680 NR Description: hypothetical protein T5F17.10 - Arabidopsis
  misc_feature (1)..(207): Homolog of NCBI NO: 34894182 NR Description: P0439B06.12 [Oryza sativa (japonica
  misc_feature (1)..(197): Homolog of NCBI NO: 34912808 NR Description: P0501G01.13 [Oryza sativa (japonica
  misc_feature (1)..(160): Homolog of NCBI NO: 15228004 NR Description: leucine rich repeat protein family; protein id:
  misc_feature (1)..(192): Homolog of NCBI NO: 34910824 NR Description: putative Hcr2-0B [Oryza sativa (japonica
MQKADLSYNRLAGRVPPEAGSLRELVFLDLSHNSLAGPLPSSLAGLSRLQYLLLQDNPLGTAVPAVVGSLRRLQVLGLSGCNLTGPIPRGAFAALASLTALSLDRNRLDGPIPASLAALPQLGQLNLSQNRLAGEIALPGEFVARLGRRLDVRGNDELCIGRGLQGSGYLGAPPCVDSHNGDGSPEISGAAAAAVGLFDGSACHLFVSCLAFVFQL

SEQ ID NO: 15928 - DNA, 1462 bp, Zea mays subsp. mays
  misc_feature (1)..(1462): Ceres Seq. ID no. 12354475
  misc_feature: MA Experiment ID: 108556 Result: Down-regulated in Transcription
  misc_feature: MA Experiment 108556 PARAMETER Experiment Name: Zm_Drought_P Parameter: Age (day) Value: 9
  misc_feature: MA Experiment 108556 PARAMETER Experiment Name: Zm_Drought_P Parameter: Organism Value: Zea mays
  misc_feature: MA Experiment 108556 PARAMETER Experiment Name: Zm_Drought_P Parameter: Plant Line Value: 35A19
  misc_feature: MA Experiment 108556 PARAMETER Experiment Name: Zm_Drought_P Parameter: Timepoint (hr) Value: 24
  misc_feature: MA Experiment 108556 PARAMETER Experiment Name: Zm_Drought_P Parameter: Tissue Value: Aerial
  misc_feature: MA Experiment 108556 PARAMETER Experiment Name: Zm_Drought_P Parameter: Treatment Value: Drought vs. No Drought
gtgggtctccgtcgtcgtctctctcctcccggccgccggcgcgatgaggcggttgctcggccacctacacccccatgcccagagcctcttcgcttccctgcctcgcaaaccgtccatcgccaccaagctccccttcctcctctcccgccgcctcctttccgatgccgcctcgcctcctgccccctcgctgccgcctcctcccccgccctctgccgacgtcacgaacacagagttgaagaagaggttggagacttactatggggtggatgaagaggctgaattaccatctgtcgctaaggctgttcttgagcggaatctcacgggtgcccatagtgagactgatgatgaccttattgaggagctgcgtagtaagccactccctgaagtccatgaccgggactttgagtctgattttgaggagatgcatgatactgatgaggagctgaatgacctgtacaatacaagggagtatgttgagaagaagatcaagagtgatgagttctttaacatggatgacacaaagtgggatgccatgatcaaggaggccacagacaagggtcacttaactaacatgaaggagtgcgaggaaatcctcgaggacatgctctactgggacaagctacttcctgatgagatcaagcaaaaggtggagaccaaatttaatgagttgggagacatgtgtgagaggggagagatggaacctgagcaagcatatgagatgttcaaagaatttgaggataagatggtcgctgagtgcactgaattaattgaatcaaagatgccaactgacgctgatgaactgactgaatcaggaggtaagaaagttgagttagatgatctacctggcgagggacctgttctaaggtgggaatcacggattgtatttgttcctagtggagatgcatatcatcccaaaaacagaaaagtcaagctcagtgtgactgtgaaggaattgggactttcacgacatgctttccgtcggttgcgtgaggttgttggaaagaggtataattctgggaaagatgagctcacaataatcagtgaaaggtttgaacaccgggaagagaacagaaaagactgcttgaggacactgtatactctaataaaagacgcaatgaaagctgacaaacttgttgaggatgccaggaattcttatgttaaaggaagacttaaggctaatccacaatttatggagcgattgaagaggaagacagataagttgatggcagctgcataaggtgttacagagctccttgttttaacagctcctctctttccctcatcaacatggtgattattctgtattttcaattttattgttggctgtcgcacggggagaataatatgttgtatgcacttagctttgccttctttaatgtcttggcttcttttgtagggtcattcttagtcataaatatatgttgagcatctcgaataacaatgtcaacacacatccccagct

SEQ ID NO: 15929 - protein, 411 aa, Zea mays subsp. mays
  peptide (1)..(411): Ceres Seq. ID no. 12354476
  misc_feature (72)..(403): Homolog of NCBI NO: 18415698 NR Description: putative protein
  misc_feature (72)..(403): Homolog of NCBI NO: 7485722 NR Description: hypothetical protein F18E5.80 - Arabidopsis
  misc_feature (40)..(403): Homolog of NCBI NO: 18401816 NR Description: expressed protein
WVSVVVSLLPAAGAMRRLLGHLHPHAQSLFASLPRKPSIATKLPFLLSRRLLSDAASPPAPSLPPPPPPSADVTNTELKKRLETYYGVDEEAELPSVAKAVLERNLTGAHSETDDDLIEELRSKPLPEVHDRDFESDFEEMHDTDEELNDLYNTREYVEKKIKSDEFFNMDDTKWDAMIKEATDKGHLTNMKECEEILEDMLYWDKLLPDEIKQKVETKFNELGDMCERGEMEPEQAYEMFKEFEDKMVAECTELIESKMPTDADELTESGGKKVELDDLPGEGPVLRWESRIVFVPSGDAYHPKNRKVKLSVTVKELGLSRHAFRRLREVVGKRYNSGKDELTIISERFEHREENRKDCLRTLYTLIKDAMKADKLVEDARNSYVKGRLKANPQFMERLKRKTDKLMAAA

SEQ ID NO: 15930 - protein, 397 aa, Zea mays subsp. mays
  peptide (1)..(397): Ceres Seq. ID no. 12354477
  misc_feature (58)..(389): Homolog of NCBI NO: 18415698 NR Description: putative protein
  misc_feature (58)..(389): Homolog of NCBI NO: 7485722 NR Description: hypothetical protein F18E5.80 - Arabidopsis
  misc_feature (26)..(389): Homolog of NCBI NO: 18401816 NR Description: expressed protein
MRRLLGHLHPHAQSLFASLPRKPSIATKLPFLLSRRLLSDAASPPAPSLPPPPPPSADVTNTELKKRLETYYGVDEEAELPSVAKAVLERNLTGAHSETDDDLIEELRSKPLPEVHDRDFESDFEEMHDTDEELNDLYNTREYVEKKIKSDEFFNMDDTKWDAMIKEATDKGHLTNMKECEEILEDMLYWDKLLPDEIKQKVETKFNELGDMCERGEMEPEQAYEMFKEFEDKMVAECTELIESKMPTDADELTESGGKKVELDDLPGEGPVLRWESRIVFVPSGDAYHPKNRKVKLSVTVKELGLSRHAFRRLREVVGKRYNSGKDELTIISERFEHREENRKDCLRTLYTLIKDAMKADKLVEDARNSYVKGRLKANPQFMERLKRKTDKLMAAA

SEQ ID NO: 15931 - protein, 271 aa, Zea mays subsp. mays
  peptide (1)..(271): Ceres Seq. ID no. 12354478
  misc_feature (1)..(263): Homolog of NCBI NO: 18415698 NR Description: putative protein
  misc_feature (1)..(263): Homolog of NCBI NO: 7485722 NR Description: hypothetical protein F18E5.80 - Arabidopsis
  misc_feature (1)..(263): Homolog of NCBI NO: 18401816 NR Description: expressed protein
MHDTDEELNDLYNTREYVEKKIKSDEFFNMDDTKWDAMIKEATDKGHLTNMKECEEILEDMLYWDKLLPDEIKQKVETKFNELGDMCERGEMEPEQAYEMFKEFEDKMVAECTELIESKMPTDADELTESGGKKVELDDLPGEGPVLRWESRIVFVPSGDAYHPKNRKVKLSVTVKELGLSRHAFRRLREVVGKRYNSGKDELTIISERFEHREENRKDCLRTLYTLIKDAMKADKLVEDARNSYVKGRLKANPQFMERLKRKTDKLMAAA

SEQ ID NO: 15932 - DNA, 1738 bp, Zea mays subsp. mays
  misc_feature (1)..(1738): Ceres Seq. ID no. 12412461
  misc_feature: MA Experiment ID: 108529 Result: Down-regulated in Transcription
  misc_feature: MA Experiment 108529 PARAMETER Experiment Name: Zm_Imbibed_Seeds_P Parameter: Age (day) Value: 5 vs. 2
  misc_feature: MA Experiment 108529 PARAMETER Experiment Name: Zm_Imbibed_Seeds_P Parameter: Organism Value: Zea mays
  misc_feature: MA Experiment 108529 PARAMETER Experiment Name: Zm_Imbibed_Seeds_P Parameter: Plant Line Value: 35A19
  misc_feature: MA Experiment 108529 PARAMETER Experiment Name: Zm_Imbibed_Seeds_P Parameter: Tissue Value: Roots vs. Embryo
  misc_feature: MA Experiment ID: 108543 Result: Up-regulated in Transcription
  misc_feature: MA Experiment ID: 108545 Result: Up-regulated in Transcription
  misc_feature: MA Experiment 108545 PARAMETER Experiment Name: Zm_Imbibed_Seeds_P Parameter: Age (day) Value: 3 vs. 2
  misc_feature: MA Experiment 108545 PARAMETER Experiment Name: Zm_Imbibed_Seeds_P Parameter: Organism Value: Zea mays
  misc_feature: MA Experiment 108545 PARAMETER Experiment Name: Zm_Imbibed_Seeds_P Parameter: Plant Line Value: 35A19
  misc_feature: MA Experiment 108545 PARAMETER Experiment Name: Zm_Imbibed_Seeds_P Parameter: Tissue Value: Aerial vs. Embryo
  misc_feature: MA Experiment ID: 108546 Result: Down-regulated in Transcription
  misc_feature: MA Experiment 108546 PARAMETER Experiment Name: Zm_Imbibed_Seeds_P Parameter: Age (day) Value: 3 vs. 2
  misc_feature: MA Experiment 108546 PARAMETER Experiment Name: Zm_Imbibed_Seeds_P Parameter: Organism Value: Zea mays
  misc_feature: MA Experiment 108546 PARAMETER Experiment Name: Zm_Imbibed_Seeds_P Parameter: Plant Line Value: 35A19
  misc_feature: MA Experiment 108546 PARAMETER Experiment Name: Zm_Imbibed_Seeds_P Parameter: Tissue Value: Roots vs. Embryo
  misc_feature: MA Experiment ID: 108687 Result: Down-regulated in Transcription
  misc_feature: MA Experiment 108687 PARAMETER Experiment Name: Zm_Embryos-Flowers__P Parameter: Tissue Value: Embryo vs. Aerial+
  misc_feature: MA Experiment ID: 20000477 Result: Down-regulated in Transcription
  misc_feature: MA Experiment 20000477 PARAMETER Experiment Name: Zm_5mM_SA_P Parameter: Age (day) Value: 10
  misc_feature: MA Experiment 20000477 PARAMETER Experiment Name: Zm_5mM_SA_P Parameter: Organism Value: Zea mays
  misc_feature: MA Experiment 20000477 PARAMETER Experiment Name: Zm_5mM_SA_P Parameter: Plant Line Value: 35A19
  misc_feature: MA Experiment 20000477 PARAMETER Experiment Name: Zm_5mM_SA_P Parameter: Timepoint (hr) Value: 48
  misc_feature: MA Experiment 20000477 PARAMETER Experiment Name: Zm_5mM_SA_P Parameter: Tissue Value: Aerial
  misc_feature: MA Experiment 20000477 PARAMETER Experiment Name: Zm_5mM_SA_P Parameter: Treatment Value: 5mM SA vs. No Treatment
  misc_feature: MA Experiment ID: 20000478 Result: Down-regulated in Transcription
  misc_feature: MA Experiment 20000478 PARAMETER Experiment Name: Zm_5mM_SA_P Parameter: Age (day) Value: 11
  misc_feature: MA Experiment 20000478 PARAMETER Experiment Name: Zm_5mM_SA_P Parameter: Organism Value: Zea mays
  misc_feature: MA Experiment 20000478 PARAMETER Experiment Name: Zm_5mM_SA_P Parameter: Plant Line Value: 35A19
  misc_feature: MA Experiment 20000478 PARAMETER Experiment Name: Zm_5mM_SA_P Parameter: Timepoint (hr) Value: 72
  misc_feature: MA Experiment 20000478 PARAMETER Experiment Name: Zm_5mM_SA_P Parameter: Tissue Value: Aerial
  misc_feature: MA Experiment 20000478 PARAMETER Experiment Name: Zm_5mM_SA_P Parameter: Treatment Value: 5mM SA vs. No Treatment
  misc_feature: MA Experiment ID: 20000479 Result: Down-regulated in Transcription
  misc_feature: MA Experiment 20000479 PARAMETER Experiment Name: Zm_Drought_P Parameter: Age (day) Value: 10
  misc_feature: MA Experiment 20000479 PARAMETER Experiment Name: Zm_Drought_P Parameter: Organism Value: Zea mays
  misc_feature: MA Experiment 20000479 PARAMETER Experiment Name: Zm_Drought_P Parameter: Plant Line Value: 35A19
  misc_feature: MA Experiment 20000479 PARAMETER Experiment Name: Zm_Drought_P Parameter: Timepoint (hr) Value: 48
  misc_feature: MA Experiment 20000479 PARAMETER Experiment Name: Zm_Drought_P Parameter: Tissue Value: Aerial
  misc_feature: MA Experiment 20000479 PARAMETER Experiment Name: Zm_Drought_P Parameter: Treatment Value: Drought vs. No Drought
  misc_feature: MA Experiment ID: 20000487 Result: Down-regulated in Transcription
  misc_feature: MA Experiment 20000487 PARAMETER Experiment Name: Zm_50mM_NH4NO3_L_to_H_P Parameter: Organism Value: Zea mays
  misc_feature: MA Experiment 20000487 PARAMETER Experiment Name: Zm_50mM_NH4NO3_L_to_H_P Parameter: Timepoint (hr) Value: 4
  misc_feature: MA Experiment 20000487 PARAMETER Experiment Name: Zm_50mM_NH4NO3_L_to_H_P Parameter: Tissue Value: Leaves
  misc_feature: MA Experiment 20000487 PARAMETER Experiment Name: Zm_50mM_NH4NO3_L_to_H_P Parameter: Treatment Value: 50mM NH4NO3 vs. 100mM Mannitol
  misc_feature: MA Experiment ID: 20000532 Result: Down-regulated in Transcription
  misc_feature: MA Experiment 20000532 PARAMETER Experiment Name: Zm_0.001percent_MeJA_P Parameter: Age (day) Value: 10
  misc_feature: MA Experiment 20000532 PARAMETER Experiment Name: Zm_0.001percent_MeJA_P Parameter: Organism Value: Zea mays
  misc_feature: MA Experiment 20000532 PARAMETER Experiment Name: Zm_0.001percent_MeJA_P Parameter: Plant Line Value: 35A19
  misc_feature: MA Experiment 20000532 PARAMETER Experiment Name: Zm_0.001percent_MeJA_P Parameter: Timepoint (hr) Value: 48
  misc_feature: MA Experiment 20000532 PARAMETER Experiment Name: Zm_0.001percent_MeJA_P Parameter: Tissue Value: Aerial
  misc_feature: MA Experiment 20000532 PARAMETER Experiment Name: Zm_0.001percent_MeJA_P Parameter: Treatment Value: 0.001percent MeJA vs. No Treatment
  misc_feature: MA Experiment ID: 20000626 Result: Down-regulated in Transcription
  misc_feature: MA Experiment 20000626 PARAMETER Experiment Name: Zm_Herbicide-Treatments_P Parameter: Timepoint (hr) Value: 12
  misc_feature: MA Experiment 20000626 PARAMETER Experiment Name: Zm_Herbicide-Treatments_P Parameter: Tissue Value: Aerial
  misc_feature: MA Experiment 20000626 PARAMETER Experiment Name: Zm_Herbicide-Treatments_P Parameter: Treatment Value: Roundup vs. No Treatment
  misc_feature: MA Experiment ID: 20000632 Result: Down-regulated in Transcription
  misc_feature: MA Experiment 20000632 PARAMETER Experiment Name: Zm_Herbicide-Treatments_P Parameter: Timepoint (hr) Value: 4
  misc_feature: MA Experiment 20000632 PARAMETER Experiment Name: Zm_Herbicide-Treatments_P Parameter: Tissue Value: Aerial
  misc_feature: MA Experiment 20000632 PARAMETER Experiment Name: Zm_Herbicide-Treatments_P Parameter: Treatment Value: Glean vs. No Treatment
taatcgaaaaaggcagcctctcgctgtgtcagttccgctttgtaactgtagaaggagagtgagctcatcatcaagtcgagacgatgggccgcaccgaggcggcggacggcgccgagtccggcgggctgggggtgggggagacggtgcgcgagctgcgggaggcgtacgagggcggcaggacgcggagcctagcgtggcggcaggcgcagctgcggggcctcctccggctcctcgaggagaaggaggtggaggcgttccaggcgctccacaaggacctcggcaagcaccacgccgaggcgtacagggacgaggtcggggtgctcatcaagtccgccaacggcgcgctgcagcagctcggcaaatggatggccccggagaaggtgcgggtcccgctgatcgcttggccggcgaccgcgcaggtggtgccggagccgctcggggtcgtcctcgtcttctcctgctggaacgtccccttgggcctgtcgctggagccgctgatcggggcgatagcggccgggaacgcggtggctctgaagccgtccgagctctcgccgtgcaccgccaggttcctgggcgacaacatcgggaggtacatggactcctcggcggtgaaggtcgtccagggcggccccgacgtcggagtgcagctcatggagcaccgctgggacaaggtcctcttcaccgggagcccccgcatcgcgcgcgccgtgatggccgcggcgtccaggcacctgacgcccgtcgcgctggagctgggcggcaagtgcccctgcatcttcgacgccatgggcagcgcccgggacctgcagatctcggttaaccgcatgatcgcgggcaagtggtcgtcctgcgccggacaggcctgcatcgccatcgactacgtgctcgtcgaggagcgcttcgcgcccatcctgatcaaggtgctcaagtcgacgctgaagaggttcttcccggaagcggaccacatggcacggatcgtgaacgagcgccacttcgagaggctgagtaaccttctcaaagacaggtccgtggcgccgtccgtcctgcacggcggctccatggacagcaagaacttgtacattgagcccacgatactgctgaacccgccgctggactccgcgatcatgaccgaggagatattcgggcccctgctcccgatcatcacggtcaagaacatcgaggacagcatcgccttcgtgaaggccatgccgaagcctctcgccatctacgcgttcacccgggacgccgccctgcggcggcgaatcgtggacgagacgtcgtccgggagcgtcaccttcaacgacgcggtagtgcagtacgcgatagacgggctcccgttcggcggcgtcggccagagcgggttcgggcagtaccatgggaagtactcgttcgagatgttcagccacaagaaggcggtcatgaagcggggctacctcgtggagctgacactcaggtacccgccgtgggacgagagcaaagtcaccctcatgcgctacctctaccgcttcaactacttcgccttcgtcctctctttcctcggggctcaggcgatgaacttcactccagcatcaacgcaaggatcgcacagggattgggcccaatataggcgatgaactggcattgacagtggatggaggaacaagccaatatagacaatatgcagtagatgtcttgtttgtgaggaacatgtgtcatgccgcacttcaaaaccagtaatatgctaacctgcatcctatct

SEQ ID NO: 15933 - protein, 509 aa, Zea mays subsp. mays
  peptide (1)..(509): Ceres Seq. ID no. 12412462
  misc_feature (21)..(476): Homolog of NCBI NO: 26341802 NR Description: unnamed protein product [Mus musculus]
  misc_feature (24)..(486): Homolog of NCBI NO: 17065918 NR Description: aldehyde dehydrogenase [Craterostigma
  misc_feature (13)..(486): Homolog of NCBI NO: 21536879 NR Description: aldehyde dehydrogenase, putative [Arabidopsis
  misc_feature (13)..(486): Homolog of NCBI NO: 15219358 NR Description: aldehyde dehydrogenase, putative
  misc_feature (21)..(486): Homolog of NCBI NO: 17065876 NR Description: aldehyde dehydrogenase [Arabidopsis thaliana]
  misc_feature (1)..(486): Homolog of NCBI NO: 18418408 NR Description: putative aldehyde dehydrogenase
  misc_feature (17)..(231): Homolog of NCBI NO: 15234364 NR Description: aldehyde dehydrogenase like protein; protein id:
  misc_feature (258)..(486): Homolog of NCBI NO: 15234364 NR Description: aldehyde dehydrogenase like protein; protein id:
  misc_feature (17)..(485): Homolog of NCBI NO: 4973431 NR Description: putative aldehyde dehydrogenase OS-ALDH
  misc_feature (1)..(486): Homolog of NCBI NO: 33317836 NR Description: aldehyde dehydrogenase [Oryza sativa (indica
MGRTEAADGAESGGLGVGETVRELREAYEGGRTRSLAWRQAQLRGLLRLLEEKEVEAFQALHKDLGKHHAEAYRDEVGVLIKSANGALQQLGKWMAPEKVRVPLIAWPATAQVVPEPLGVVLVFSCWNVPLGLSLEPLIGAIAAGNAVALKPSELSPCTARFLGDNIGRYMDSSAVKVVQGGPDVGVQLMEHRWDKVLFTGSPRIARAVMAAASRHLTPVALELGGKCPCIFDAMGSARDLQISVNRMIAGKWSSCAGQACIAIDYVLVEERFAPILIKVLKSTLKRFFPEADHMARIVNERHFERLSNLLKDRSVAPSVLHGGSMDSKNLYIEPTILLNPPLDSAIMTEEIFGPLLPIITVKNIEDSIAFVKAMPKPLAIYAFTRDAALRRRIVDETSSGSVTFNDAVVQYAIDGLPFGGVGQSGFGQYHGKYSFEMFSHKKAVMKRGYLVELTLRYPPWDESKVTLMRYLYRFNYFAFVLSFLGAQAMNFTPASTQGSHRDWAQYRR

SEQ ID NO: 15934 - protein, 415 aa, Zea mays subsp. mays
  peptide (1)..(415): Ceres Seq. ID no. 12412463
  misc_feature (1)..(382): Homolog of NCBI NO: 26341802 NR Description: unnamed protein product [Mus musculus]
  misc_feature (1)..(392): Homolog of NCBI NO: 17065918 NR Description: aldehyde dehydrogenase [Craterostigma
  misc_feature (1)..(392): Homolog of NCBI NO: 21536879 NR Description: aldehyde dehydrogenase, putative [Arabidopsis
  misc_feature (1)..(392): Homolog of NCBI NO: 15219358 NR Description: aldehyde dehydrogenase, putative
  misc_feature (1)..(392): Homolog of NCBI NO: 17065876 NR Description: aldehyde dehydrogenase [Arabidopsis thaliana]
  misc_feature (1)..(392): Homolog of NCBI NO: 18418408 NR Description: putative aldehyde dehydrogenase
  misc_feature (1)..(137): Homolog of NCBI NO: 15234364 NR Description: aldehyde dehydrogenase like protein; protein id:
  misc_feature (164)..(392): Homolog of NCBI NO: 15234364 NR Description: aldehyde dehydrogenase like protein; protein id:
  misc_feature (1)..(391): Homolog of NCBI NO: 4973431 NR Description: putative aldehyde dehydrogenase OS-ALDH
  misc_feature (1)..(392): Homolog of NCBI NO: 33317836 NR Description: aldehyde dehydrogenase [Oryza sativa (indica
MAPEKVRVPLIAWPATAQVVPEPLGVVLVFSCWNVPLGLSLEPLIGAIAAGNAVALKPSELSPCTARFLGDNIGRYMDSSAVKVVQGGPDVGVQLMEHRWDKVLFTGSPRIARAVMAAASRHLTPVALELGGKCPCIFDAMGSARDLQISVNRMIAGKWSSCAGQACIAIDYVLVEERFAPILIKVLKSTLKRFFPEADHMARIVNERHFERLSNLLKDRSVAPSVLHGGSMDSKNLYIEPTILLNPPLDSAIMTEEIFGPLLPIITVKNIEDSIAFVKAMPKPLAIYAFTRDAALRRRIVDETSSGSVTFNDAVVQYAIDGLPFGGVGQSGFGQYHGKYSFEMFSHKKAVMKRGYLVELTLRYPPWDESKVTLMRYLYRFNYFAFVLSFLGAQAMNFTPASTQGSHRDWAQYRR

SEQ ID NO: 15935 - protein, 339 aa, Zea mays subsp. mays
  peptide (1)..(339): Ceres Seq. ID no. 12412464
  misc_feature (1)..(306): Homolog of NCBI NO: 26341802 NR Description: unnamed protein product [Mus musculus]
  misc_feature (1)..(316): Homolog of NCBI NO: 17065918 NR Description: aldehyde dehydrogenase [Craterostigma
  misc_feature (1)..(316): Homolog of NCBI NO: 21536879 NR Description: aldehyde dehydrogenase, putative [Arabidopsis
  misc_feature (1)..(316): Homolog of NCBI NO: 15219358 NR Description: aldehyde dehydrogenase, putative
  misc_feature (1)..(316): Homolog of NCBI NO: 17065876 NR Description: aldehyde dehydrogenase [Arabidopsis thaliana]
  misc_feature (1)..(316): Homolog of NCBI NO: 18418408 NR Description: putative aldehyde dehydrogenase
  misc_feature (1)..(61): Homolog of NCBI NO: 15234364 NR Description: aldehyde dehydrogenase like protein; protein id:
  misc_feature (88)..(316): Homolog of NCBI NO: 15234364 NR Description: aldehyde dehydrogenase like protein; protein id:
  misc_feature (1)..(315): Homolog of NCBI NO: 4973431 NR Description: putative aldehyde dehydrogenase OS-ALDH
  misc_feature (1)..(316): Homolog of NCBI NO: 33317836 NR Description: aldehyde dehydrogenase [Oryza sativa (indica
MDSSAVKVVQGGPDVGVQLMEHRWDKVLFTGSPRIARAVMAAASRHLTPVALELGGKCPCIFDAMGSARDLQISVNRMIAGKWSSCAGQACIAIDYVLVEERFAPILIKVLKSTLKRFFPEADHMARIVNERHFERLSNLLKDRSVAPSVLHGGSMDSKNLYIEPTILLNPPLDSAIMTEEIFGPLLPIITVKNIEDSIAFVKAMPKPLAIYAFTRDAALRRRIVDETSSGSVTFNDAVVQYAIDGLPFGGVGQSGFGQYHGKYSFEMFSHKKAVMKRGYLVELTLRYPPWDESKVTLMRYLYRFNYFAFVLSFLGAQAMNFTPASTQGSHRDWAQYRR

SEQ ID NO: 15936 - DNA, 1808 bp, Zea mays subsp. mays
  misc_feature (1)..(1808): Ceres Seq. ID no. 12406575
  misc_feature: MA Experiment ID: 20000492 Result: Up-regulated in Transcription
  misc_feature: MA Experiment 20000492 PARAMETER Experiment Name: Zm_Hybrid_Seed_Dev_P Parameter: DAP Value: 12
  misc_feature: MA Experiment 20000492 PARAMETER Experiment Name: Zm_Hybrid_Seed_Dev_P Parameter: Organism Value: Zea mays
  misc_feature: MA Experiment 20000492 PARAMETER Experiment Name: Zm_Hybrid_Seed_Dev_P Parameter: Plant Line Value: 35A19
  misc_feature: MA Experiment 20000492 PARAMETER Experiment Name: Zm_Hybrid_Seed_Dev_P Parameter: Tissue Value: Fert Kernel vs. Unfert Floret
gcacgagaccattacctagaacatcctaatcgaaaaacgcgcactgtctctctcgtatcactctccattctacctctctcttccccaatccaggccagccaaccctagcgcaccggcgatggcgtcggacccggcccctgacgacgcggccgcggccgtgaatgggcacggcaacgacaacggacacggtaacggcccgtccccgtcgaagcgcccccgggcggtgatctcggaagccgagatccgcgtcgagttcgcacaccacgacgcagccgtggcgcgcgtcaacaacggcagcttcggctgctgcccggcctcggtcctcgccgcgcaggcccactggcagcgcctcttcctcgcgcagcccgacgccttctacttccacgttctccagcagggccttctccgctcgcgcgccgccgtcgccgaggtggtgggcgctggcgacgtctccgaggtctccctcgtcgataacgccaccacggccgccgccatcgtcctgcagcacgcagcctggagcttcgccgagggtcacttcgcgcgcggggatgcggtgctgatgctccactacgcctatggtgcggtcaagaagtccatccacgcgtacgtcgcgcgtgcgggggccaccgtcgtcgaggtgcccctcccattccccgtcgcgtccgccgacgcaatcattgccgagttccgtgctgcgctcgcggtcgccaaggaaggagggcgtagggtcaggctcgcagtcatcgaccacattacctccatgcccagtgtcgtcatcccagtcaaggagctcgtcgccatctgtcgagaagagggcgttgacaaggtatttgttgacgctgcccactctattgggcaggtgcctgtggacgtgcgcgacattggagccgatttctatacaagcaaccttcataagtggttcttttgcccccctgctgtggcctttttgcatactcgcaaggatgacccgatagcctcccaactccatcaccctgttgtttcccatgagtatgggaatgggctgcctatggagagcggatggattggaacacgggattacagtgcccagcttgttgtgtccgaggctatagattttgtgaatcgatttgagggtggaattgaggctatacgaaaccggaatcatgagaaagttattgagatgggtaggatgcttgctgaggcatgggggacttttcttggctcacctccggaactgtgtggtagcatggttatggtggggatgcctggttgccttggtgttgagagtgatgatgatgcaatgagagtgaggacaatgttgagaaaggatttccaggtggaggtgccggtatactacaactcaagaagggtggaaggacaggagatgacaaaggataaaaatggtgatccagtgacagggtatgtgaggatctcacaccaggtttacaatgtcacagaggactatgagagactgagggatgttgtcaataaacttgtttctgaagggttcaccagcagcaagttgcggccttctgagaagcaagaagcttaggtgtaatgaccttccagccaggtagcatccacctgaaggcgctgtggccgactacttaggtgtggaccggatcagcgcagccagtacggcttcgtgatcgtgacgttgaagaatgtagtgtaccgccaggaactgacatgtgttgtatttggcgttcagtgtaagtaacaataatgccctggcatgttgtcttctctcacattttgggagctgctgtaacctcagaataatctggaatataaggatatttacagctgctgtagattgattgctgggc

SEQ ID NO: 15937 - protein, 470 aa, Zea mays subsp. mays
  peptide (1)..(470): Ceres Seq. ID no. 12406576
  misc_feature (64)..(445): Pfam Name: Aminotransferase class-V Pfam Description: Aminotransferase class-V
  misc_feature (99)..(282): Homolog of NCBI NO: 27376391 NR Description: blr1280 [Bradyrhizobium japonicum]
  misc_feature (50)..(455): Homolog of NCBI NO: 116093 NR Description: Isopenicillin N epimerase
  misc_feature (46)..(376): Homolog of NCBI NO: 25463395 NR Description: hypothetical protein [imported] - yeast (Candida
  misc_feature (56)..(278): Homolog of NCBI NO: 40738451 NR Description: hypothetical protein AN6227.2 [Aspergillus
  misc_feature (50)..(451): Homolog of NCBI NO: 17548917 NR Description: PUTATIVE ISOPENICILLIN N EPIMERASE PROTEIN
  misc_feature (37)..(445): Homolog of NCBI NO: 21230669 NR Description: isopenicillin N epimerase
  misc_feature (17)..(462): Homolog of NCBI NO: 15228693 NR Description: putative protein
  misc_feature (31)..(462): Homolog of NCBI NO: 30690360 NR Description: expressed protein [Arabidopsis thaliana]
  misc_feature (1)..(467): Homolog of NCBI NO: 34894322 NR Description: unnamed protein product [Oryza sativa (japonica
  misc_feature (1)..(469): Homolog of NCBI NO: 34894318 NR Description: unnamed protein product [Oryza sativa (japonica
MASDPAPDDAAAAVNGHGNDNGHGNGPSPSKRPRAVISEAEIRVEFAHHDAAVARVNNGSFGCCPASVLAAQAHWQRLFLAQPDAFYFHVLQQGLLRSRAAVAEVVGAGDVSEVSLVDNATTAAAIVLQHAAWSFAEGHFARGDAVLMLHYAYGAVKKSIHAYVARAGATVVEVPLPFPVASADAIIAEFRAALAVAKEGGRRVRLAVIDHITSMPSVVIPVKELVAICREEGVDKVFVDAAHSIGQVPVDVRDIGADFYTSNLHKWFFCPPAVAFLHTRKDDPIASQLHHPVVSHEYGNGLPMESGWIGTRDYSAQLVVSEAIDFVNRFEGGIEAIRNRNHEKVIEMGRMLAEAWGTFLGSPPELCGSMVMVGMPGCLGVESDDDAMRVRTMLRKDFQVEVPVYYNSRRVEGQEMTKDKNGDPVTGYVRISHQVYNVTEDYERLRDVVNKLVSEGFTSSKLRPSEKQEA

SEQ ID NO: 15938 - protein, 323 aa, Zea mays subsp. mays
  peptide (1)..(323): Ceres Seq. ID no. 12406577
  misc_feature (1)..(298): Pfam Name: Aminotransferase class-V Pfam Description: Aminotransferase class-V
  misc_feature (1)..(135): Homolog of NCBI NO: 27376391 NR Description: blr1280 [Bradyrhizobium japonicum]
  misc_feature (1)..(308): Homolog of NCBI NO: 116093 NR Description: Isopenicillin N epimerase
  misc_feature (1)..(229): Homolog of NCBI NO: 25463395 NR Description: hypothetical protein [imported] - yeast (Candida
  misc_feature (1)..(131): Homolog of NCBI NO: 40738451 NR Description: hypothetical protein AN6227.2 [Aspergillus
  misc_feature (1)..(304): Homolog of NCBI NO: 17548917 NR Description: PUTATIVE ISOPENICILLIN N EPIMERASE PROTEIN
  misc_feature (1)..(298): Homolog of NCBI NO: 21230669 NR Description: isopenicillin N epimerase
  misc_feature (1)..(315): Homolog of NCBI NO: 15228693 NR Description: putative protein
  misc_feature (1)..(315): Homolog of NCBI NO: 30690360 NR Description: expressed protein [Arabidopsis thaliana]
  misc_feature (1)..(320): Homolog of NCBI NO: 34894322 NR Description: unnamed protein product [Oryza sativa (japonica
  misc_feature (1)..(322): Homolog of NCBI NO: 34894318 NR Description: unnamed protein product [Oryza sativa (japonica
MLHYAYGAVKKSIHAYVARAGATVVEVPLPFPVASADAIIAEFRAALAVAKEGGRRVRLAVIDHITSMPSVVIPVKELVAICREEGVDKVFVDAAHSIGQVPVDVRDIGADFYTSNLHKWFFCPPAVAFLHTRKDDPIASQLHHPVVSHEYGNGLPMESGWIGTRDYSAQLVVSEAIDFVNRFEGGIEAIRNRNHEKVIEMGRMLAEAWGTFLGSPPELCGSMVMVGMPGCLGVESDDDAMRVRTMLRKDFQVEVPVYYNSRRVEGQEMTKDKNGDPVTGYVRISHQVYNVTEDYERLRDVVNKLVSEGFTSSKLRPSEKQEA

SEQ ID NO: 15939 - protein, 256 aa, Zea mays subsp. mays
  peptide (1)..(256): Ceres Seq. ID no. 12406578
  misc_feature (1)..(231): Pfam Name: Aminotransferase class-V Pfam Description: Aminotransferase class-V
  misc_feature (1)..(68): Homolog of NCBI NO: 27376391 NR Description: blr1280 [Bradyrhizobium japonicum]
  misc_feature (1)..(241): Homolog of NCBI NO: 116093 NR Description: Isopenicillin N epimerase
  misc_feature (1)..(162): Homolog of NCBI NO: 25463395 NR Description: hypothetical protein [imported] - yeast (Candida
  misc_feature (1)..(64): Homolog of NCBI NO: 40738451 NR Description: hypothetical protein AN6227.2 [Aspergillus
  misc_feature (1)..(237): Homolog of NCBI NO: 17548917 NR Description: PUTATIVE ISOPENICILLIN N EPIMERASE PROTEIN
  misc_feature (1)..(231): Homolog of NCBI NO: 21230669 NR Description: isopenicillin N epimerase
  misc_feature (1)..(248): Homolog of NCBI NO: 15228693 NR Description: putative protein
  misc_feature (1)..(248): Homolog of NCBI NO: 30690360 NR Description: expressed protein [Arabidopsis thaliana]
  misc_feature (1)..(253): Homolog of NCBI NO: 34894322 NR Description: unnamed protein product [Oryza sativa (japonica
  misc_feature (1)..(255): Homolog of NCBI NO: 34894318 NR Description: unnamed protein product [Oryza sativa (japonica
MPSVVIPVKELVAICREEGVDKVFVDAAHSIGQVPVDVRDIGADFYTSNLHKWFFCPPAVAFLHTRKDDPIASQLHHPVVSHEYGNGLPMESGWIGTRDYSAQLVVSEAIDFVNRFEGGIEAIRNRNHEKVIEMGRMLAEAWGTFLGSPPELCGSMVMVGMPGCLGVESDDDAMRVRTMLRKDFQVEVPVYYNSRRVEGQEMTKDKNGDPVTGYVRISHQVYNVTEDYERLRDVVNKLVSEGFTSSKLRPSEKQEA

SEQ ID NO: 15940 - DNA, 1550 bp, Zea mays subsp. mays
  misc_feature (1)..(1550): Ceres Seq. ID no. 12386804
  misc_feature: MA Experiment ID: 108522 Result: Down-regulated in Transcription
  misc_feature: MA Experiment 108522 PARAMETER Experiment Name: Zm_42deg_Heat_P Parameter: Age (day) Value: 8
  misc_feature: MA Experiment 108522 PARAMETER Experiment Name: Zm_42deg_Heat_P Parameter: Organism Value: Zea mays
  misc_feature: MA Experiment 108522 PARAMETER Experiment Name: Zm_42deg_Heat_P Parameter: Plant Line Value: 35A19
  misc_feature: MA Experiment 108522 PARAMETER Experiment Name: Zm_42deg_Heat_P Parameter: Temperature (deg C) Value: 42 vs. 22
  misc_feature: MA Experiment 108522 PARAMETER Experiment Name: Zm_42deg_Heat_P Parameter: Timepoint (hr) Value: 1
  misc_feature: MA Experiment 108522 PARAMETER Experiment Name: Zm_42deg_Heat_P Parameter: Tissue Value: Aerial
  misc_feature: MA Experiment ID: 108529 Result: Down-regulated in Transcription
  misc_feature: MA Experiment 108529 PARAMETER Experiment Name: Zm_Imbibed_Seeds_P Parameter: Age (day) Value: 5 vs. 2
  misc_feature: MA Experiment 108529 PARAMETER Experiment Name: Zm_Imbibed_Seeds_P Parameter: Organism Value: Zea mays
  misc_feature: MA Experiment 108529 PARAMETER Experiment Name: Zm_Imbibed_Seeds_P Parameter: Plant Line Value: 35A19
  misc_feature: MA Experiment 108529 PARAMETER Experiment Name: Zm_Imbibed_Seeds_P Parameter: Tissue Value: Roots vs. Embryo
  misc_feature: MA Experiment ID: 108544 Result: Down-regulated in Transcription
  misc_feature: MA Experiment ID: 108546 Result: Down-regulated in Transcription
  misc_feature: MA Experiment 108546 PARAMETER Experiment Name: Zm_Imbibed_Seeds_P Parameter: Age (day) Value: 3 vs. 2
  misc_feature: MA Experiment 108546 PARAMETER Experiment Name: Zm_Imbibed_Seeds_P Parameter: Organism Value: Zea mays
  misc_feature: MA Experiment 108546 PARAMETER Experiment Name: Zm_Imbibed_Seeds_P Parameter: Plant Line Value: 35A19
  misc_feature: MA Experiment 108546 PARAMETER Experiment Name: Zm_Imbibed_Seeds_P Parameter: Tissue Value: Roots vs. Embryo
  misc_feature: MA Experiment ID: 108687 Result: Down-regulated in Transcription
  misc_feature: MA Experiment 108687 PARAMETER Experiment Name: Zm_Embryos-Flowers__P Parameter: Tissue Value: Embryo vs. Aerial+
  misc_feature: MA Experiment ID: 20000477 Result: Down-regulated in Transcription
  misc_feature: MA Experiment 20000477 PARAMETER Experiment Name: Zm_5mM_SA_P Parameter: Age (day) Value: 10
  misc_feature: MA Experiment 20000477 PARAMETER Experiment Name: Zm_5mM_SA_P Parameter: Organism Value: Zea mays
  misc_feature: MA Experiment 20000477 PARAMETER Experiment Name: Zm_5mM_SA_P Parameter: Plant Line Value: 35A19
  misc_feature: MA Experiment 20000477 PARAMETER Experiment Name: Zm_5mM_SA_P Parameter: Timepoint (hr) Value: 48
  misc_feature: MA Experiment 20000477 PARAMETER Experiment Name: Zm_5mM_SA_P Parameter: Tissue Value: Aerial
  misc_feature: MA Experiment 20000477 PARAMETER Experiment Name: Zm_5mM_SA_P Parameter: Treatment Value: 5mM SA vs. No Treatment
  misc_feature: MA Experiment ID: 20000478 Result: Down-regulated in Transcription
  misc_feature: MA Experiment 20000478 PARAMETER Experiment Name: Zm_5mM_SA_P Parameter: Age (day) Value: 11
  misc_feature: MA Experiment 20000478 PARAMETER Experiment Name: Zm_5mM_SA_P Parameter: Organism Value: Zea mays
  misc_feature: MA Experiment 20000478 PARAMETER Experiment Name: Zm_5mM_SA_P Parameter: Plant Line Value: 35A19
  misc_feature: MA Experiment 20000478 PARAMETER Experiment Name: Zm_5mM_SA_P Parameter: Timepoint (hr) Value: 72
  misc_feature: MA Experiment 20000478 PARAMETER Experiment Name: Zm_5mM_SA_P Parameter: Tissue Value: Aerial
  misc_feature: MA Experiment 20000478 PARAMETER Experiment Name: Zm_5mM_SA_P Parameter: Treatment Value: 5mM SA vs. No Treatment
  misc_feature: MA Experiment ID: 20000480 Result: Down-regulated in Transcription
  misc_feature: MA Experiment 20000480 PARAMETER Experiment Name: Zm_Drought_P Parameter: Age (day) Value: 11
  misc_feature: MA Experiment 20000480 PARAMETER Experiment Name: Zm_Drought_P Parameter: Organism Value: Zea mays
  misc_feature: MA Experiment 20000480 PARAMETER Experiment Name: Zm_Drought_P Parameter: Plant Line Value: 35A19
  misc_feature: MA Experiment 20000480 PARAMETER Experiment Name: Zm_Drought_P Parameter: Timepoint (hr) Value: 72
  misc_feature: MA Experiment 20000480 PARAMETER Experiment Name: Zm_Drought_P Parameter: Tissue Value: Aerial
  misc_feature: MA Experiment 20000480 PARAMETER Experiment Name: Zm_Drought_P Parameter: Treatment Value: Drought vs. No Drought
  misc_feature: MA Experiment ID: 20000626 Result: Down-regulated in Transcription
  misc_feature: MA Experiment 20000626 PARAMETER Experiment Name: Zm_Herbicide-Treatments_P Parameter: Timepoint (hr) Value: 12
  misc_feature: MA Experiment 20000626 PARAMETER Experiment Name: Zm_Herbicide-Treatments_P Parameter: Tissue Value: Aerial
  misc_feature: MA Experiment 20000626 PARAMETER Experiment Name: Zm_Herbicide-Treatments_P Parameter: Treatment Value: Roundup vs. No Treatment
ctgaggcctgagctgcctccatatttgcattcttcaccctcgcttcacgtcaccaccattgccatccaagaacaaattaagcgggacactggaaacaaagagagacatgggccttcgcggcggagctcttgccctgcttctgctcctgttcgtccacggaggccagcgagcagcagaggccggcggggacgcgttcgtgagggtccagggcacccgcttcgtgcaggacggcaagccgttcttcgccaacgggttcaacgcctactggctcatgacattcggcgccgaccccgcgcggaggggcaaggtcacctcggcgctcagccaggccgccggcgccggcctctccgtggccaggacgtgggcgttcagcgacggcggcggcggcggcggcagcgcgctgcagtactctcccggccgctacaacgagaacaccttccaggggctggatttcgtgctgtctgaggcaaggaagcatgggattaagatgattctgagcctcgtgaacaattacgacagctttggagggaggaagcagtacgtgcagtgggcgagggagcgggggcagaccattggatctgacgatgagttcttcactaacccctttgtaaagggcatctacaagaaccatatcaaggccgttctgacgagggtgaacacgatcaccggcgtggcatacaaggacgacccgacgatcatggcgtgggagctgatgaacgagccgcgttgccagtccgacgtgtcgggccacgccatccagtcgtggatcacggagatggcggcgcacgtgaagtccatcgacgggaaccacctgctggaggccggcctggagggcttctacggcgcgtcgtcggcccgcaggtccgcgaacccgtcgggggtaccaggtggggcaccgacttcatcgncaacaaccgggcgcccgggatcgacttcgccaccgtgcactcgtacccggaccagtggctgggcggcctggacgcgcaggcgcagctgnggttcctgggcgcctggctcgacgcccacatcgccgacgcgcgggcggtgctgcgcaagccgctgctggtggccgagttcggcgagtcgcgccacgacccgggctacagcggcggccaacgcgacgcggtgttcggcacggtgtacgccagggtctacgactcggcgcgcgccggaggccccgcggcgggcgcgctcttctggcagctcctggcggaggggatggactcctacggggacggctacgaggtcgtcctcccgcaggcgccgtccaccgccggagtcatcgccacgcagagccggaggctgcagggcctcgccagggcgttcgtgcgcgcgcgcaaggcccaccaggggaaggcgggcaagggcgctaagggtggcggcaactgaaagtggggtgaaacgtgtgtggcgagatcaagaagagtgtgtgtgtgtatgcgtcgatgtctcctcgagatgatttgaagattcatccgggagccaagagttacttctacatactatctagcgttgtcctccatgttttattatttagaggacttgcgttt

SEQ ID NO: 15941 - protein, 451 aa, Zea mays subsp. mays
  peptide (1)..(451): Ceres Seq. ID no. 12386805
  misc_feature (35)..(258): Pfam Name: Cellulase (glycosyl hydrolase family 5) Pfam Description: Cellulase (glycosyl hydrolase family 5)
  misc_feature (25)..(256): Homolog of NCBI NO: 37544517 NR Description: mannan endo-1,4-beta-mannosidase precursor
  misc_feature (10)..(256): Homolog of NCBI NO: 10129675 NR Description: (1-4)-beta-mannan endohydrolase [Coffea arabica]
  misc_feature (30)..(256): Homolog of NCBI NO: 23477717 NR Description: endo-beta-mannanase [Daucus carota]
  misc_feature (11)..(257): Homolog of NCBI NO: 22382040 NR Description: inactive endo-beta-mannanase [Lycopersicon
  misc_feature (11)..(257): Homolog of NCBI NO: 21307619 NR Description: mannan endo-1,4-beta-mannosidase [Lycopersicon
  misc_feature (11)..(257): Homolog of NCBI NO: 15529113 NR Description: endo-beta-mannanase [Lycopersicon esculentum]
  misc_feature (28)..(262): Homolog of NCBI NO: 29786430 NR Description: endo-beta-1,4-mannanase [Lactuca sativa]
  misc_feature (7)..(256): Homolog of NCBI NO: 10178872 NR Description: (1-4)-beta-mannan endohydrolase [Coffea arabica]
  misc_feature (19)..(258): Homolog of NCBI NO: 15239973 NR Description: glycosyl hydrolase family 5/cellulase
  misc_feature (8)..(258): Homolog of NCBI NO: 34912090 NR Description: putative mannan endo-1,4-beta-mannosidase
  misc_feature (268)..(268): Xaa is any aa, unknown or other
  misc_feature (297)..(297): Xaa is any aa, unknown or other
MGLRGGALALLLLLFVHGGQRAAEAGGDAFVRVQGTRFVQDGKPFFANGFNAYWLMTFGADPARRGKVTSALSQAAGAGLSVARTWAFSDGGGGGGSALQYSPGRYNENTFQGLDFVLSEARKHGIKMILSLVNNYDSFGGRKQYVQWARERGQTIGSDDEFFTNPFVKGIYKNHIKAVLTRVNTITGVAYKDDPTIMAWELMNEPRCQSDVSGHAIQSWITEMAAHVKSIDGNHLLEAGLEGFYGASSARRSANPSGVPGGAPTSSXTTGRPGSTSPPCTRTRTSGWAAWTRRRSXGSWAPGSTPTSPTRGRCCASRCWWPSSASRATTRATAAANATRCSARCTPGSTTRRAPEAPRRARSSGSSWRRGWTPTGTATRSSSRRRRPPPESSPRRAGGCRASPGRSCARARPTRGRRARALRVAATESGVKRVWRDQEECVCVCVDVSSR

SEQ ID NO: 15942 - protein, 396 aa, Zea mays subsp. mays
  peptide (1)..(396): Ceres Seq. ID no. 12386806
  misc_feature (1)..(203): Pfam Name: Cellulase (glycosyl hydrolase family 5) Pfam Description: Cellulase (glycosyl hydrolase family 5)
  misc_feature (1)..(201): Homolog of NCBI NO: 37544517 NR Description: mannan endo-1,4-beta-mannosidase precursor
  misc_feature (1)..(201): Homolog of NCBI NO: 10129675 NR Description: (1-4)-beta-mannan endohydrolase [Coffea arabica]
  misc_feature (1)..(201): Homolog of NCBI NO: 23477717 NR Description: endo-beta-mannanase [Daucus carota]
  misc_feature (1)..(202): Homolog of NCBI NO: 22382040 NR Description: inactive endo-beta-mannanase [Lycopersicon
  misc_feature (1)..(202): Homolog of NCBI NO: 21307619 NR Description: mannan endo-1,4-beta-mannosidase [Lycopersicon
  misc_feature (1)..(202): Homolog of NCBI NO: 15529113 NR Description: endo-beta-mannanase [Lycopersicon esculentum]
  misc_feature (1)..(207): Homolog of NCBI NO: 29786430 NR Description: endo-beta-1,4-mannanase [Lactuca sativa]
  misc_feature (1)..(201): Homolog of NCBI NO: 10178872 NR Description: (1-4)-beta-mannan endohydrolase [Coffea arabica]
  misc_feature (1)..(203): Homolog of NCBI NO: 15239973 NR Description: glycosyl hydrolase family 5/cellulase
  misc_feature (1)..(203): Homolog of NCBI NO: 34912090 NR Description: putative mannan endo-1,4-beta-mannosidase
  misc_feature (213)..(213): Xaa is any aa, unknown or other
  misc_feature (242)..(242): Xaa is any aa, unknown or other
MTFGADPARRGKVTSALSQAAGAGLSVARTWAFSDGGGGGGSALQYSPGRYNENTFQGLDFVLSEARKHGIKMILSLVNNYDSFGGRKQYVQWARERGQTIGSDDEFFTNPFVKGIYKNHIKAVLTRVNTITGVAYKDDPTIMAWELMNEPRCQSDVSGHAIQSWITEMAAHVKSIDGNHLLEAGLEGFYGASSARRSANPSGVPGGAPTSSXTTGRPGSTSPPCTRTRTSGWAAWTRRRSXGSWAPGSTPTSPTRGRCCASRCWWPSSASRATTRATAAANATRCSARCTPGSTTRRAPEAPRRARSSGSSWRRGWTPTGTATRSSSRRRRPPPESSPRRAGGCRASPGRSCARARPTRGRRARALRVAATESGVKRVWRDQEECVCVCVDVSSR

SEQ ID NO: 15943 - protein, 324 aa, Zea mays subsp. mays
  peptide (1)..(324): Ceres Seq. ID no. 12386807
  misc_feature (1)..(131): Pfam Name: Cellulase (glycosyl hydrolase family 5) Pfam Description: Cellulase (glycosyl hydrolase family 5)
  misc_feature (1)..(129): Homolog of NCBI NO: 37544517 NR Description: mannan endo-1,4-beta-mannosidase precursor
  misc_feature (1)..(129): Homolog of NCBI NO: 10129675 NR Description: (1-4)-beta-mannan endohydrolase [Coffea arabica]
  misc_feature (1)..(129): Homolog of NCBI NO: 23477717 NR Description: endo-beta-mannanase [Daucus carota]
  misc_feature (1)..(130): Homolog of NCBI NO: 22382040 NR Description: inactive endo-beta-mannanase [Lycopersicon
  misc_feature (1)..(130): Homolog of NCBI NO: 21307619 NR Description: mannan endo-1,4-beta-mannosidase [Lycopersicon
  misc_feature (1)..(130): Homolog of NCBI NO: 15529113 NR Description: endo-beta-mannanase [Lycopersicon esculentum]
  misc_feature (1)..(135): Homolog of NCBI NO: 29786430 NR Description: endo-beta-1,4-mannanase [Lactuca sativa]
  misc_feature (1)..(129): Homolog of NCBI NO: 10178872 NR Description: (1-4)-beta-mannan endohydrolase [Coffea arabica]
  misc_feature (1)..(131): Homolog of NCBI NO: 15239973 NR Description: glycosyl hydrolase family 5/cellulase
  misc_feature (1)..(131): Homolog of NCBI NO: 34912090 NR Description: putative mannan endo-1,4-beta-mannosidase
  misc_feature (141)..(141): Xaa is any aa, unknown or other
  misc_feature (170)..(170): Xaa is any aa, unknown or other
MILSLVNNYDSFGGRKQYVQWARERGQTIGSDDEFFTNPFVKGIYKNHIKAVLTRVNTITGVAYKDDPTIMAWELMNEPRCQSDVSGHAIQSWITEMAAHVKSIDGNHLLEAGLEGFYGASSARRSANPSGVPGGAPTSSXTTGRPGSTSPPCTRTRTSGWAAWTRRRSXGSWAPGSTPTSPTRGRCCASRCWWPSSASRATTRATAAANATRCSARCTPGSTTRRAPEAPRRARSSGSSWRRGWTPTGTATRSSSRRRRPPPESSPRRAGGCRASPGRSCARARPTRGRRARALRVAATESGVKRVWRDQEECVCVCVDVSSR

SEQ ID NO: 15944 - DNA, 967 bp, Zea mays subsp. mays
  misc_feature (1)..(967): Ceres Seq. ID no. 12357364
  misc_feature: MA Experiment ID: 108528 Result: Up-regulated in Transcription
  misc_feature: MA Experiment 108528 PARAMETER Experiment Name: Zm_Imbibed_Seeds_P Parameter: Age (day) Value: 5 vs. 2
  misc_feature: MA Experiment 108528 PARAMETER Experiment Name: Zm_Imbibed_Seeds_P Parameter: Organism Value: Zea mays
  misc_feature: MA Experiment 108528 PARAMETER Experiment Name: Zm_Imbibed_Seeds_P Parameter: Plant Line Value: 35A19
  misc_feature: MA Experiment 108528 PARAMETER Experiment Name: Zm_Imbibed_Seeds_P Parameter: Tissue Value: Aerial vs. Embryo
  misc_feature: MA Experiment ID: 108530 Result: Up-regulated in Transcription
  misc_feature: MA Experiment 108530 PARAMETER Experiment Name: Zm_Imbibed_Seeds_P Parameter: Age (day) Value: 6 vs. 2
  misc_feature: MA Experiment 108530 PARAMETER Experiment Name: Zm_Imbibed_Seeds_P Parameter: Organism Value: Zea mays
  misc_feature: MA Experiment 108530 PARAMETER Experiment Name: Zm_Imbibed_Seeds_P Parameter: Plant Line Value: 35A19
  misc_feature: MA Experiment 108530 PARAMETER Experiment Name: Zm_Imbibed_Seeds_P Parameter: Tissue Value: Aerial vs. Embryo
  misc_feature: MA Experiment ID: 108545 Result: Up-regulated in Transcription
  misc_feature: MA Experiment 108545 PARAMETER Experiment Name: Zm_Imbibed_Seeds_P Parameter: Age (day) Value: 3 vs. 2
  misc_feature: MA Experiment 108545 PARAMETER Experiment Name: Zm_Imbibed_Seeds_P Parameter: Organism Value: Zea mays
  misc_feature: MA Experiment 108545 PARAMETER Experiment Name: Zm_Imbibed_Seeds_P Parameter: Plant Line Value: 35A19
  misc_feature: MA Experiment 108545 PARAMETER Experiment Name: Zm_Imbibed_Seeds_P Parameter: Tissue Value: Aerial vs. Embryo
  misc_feature: MA Experiment ID: 108547 Result: Up-regulated in Transcription
  misc_feature: MA Experiment 108547 PARAMETER Experiment Name: Zm_Imbibed_Seeds_P Parameter: Age (day) Value: 4 vs. 2
  misc_feature: MA Experiment 108547 PARAMETER Experiment Name: Zm_Imbibed_Seeds_P Parameter: Organism Value: Zea mays
  misc_feature: MA Experiment 108547 PARAMETER Experiment Name: Zm_Imbibed_Seeds_P Parameter: Plant Line Value: 35A19
  misc_feature: MA Experiment 108547 PARAMETER Experiment Name: Zm_Imbibed_Seeds_P Parameter: Tissue Value: Aerial vs. Embryo
  misc_feature: MA Experiment ID: 20000534 Result: Down-regulated in Transcription
  misc_feature: MA Experiment 20000534 PARAMETER Experiment Name: Zm_Hybrid_Pollen_P Parameter: Age (day) Value: 8
  misc_feature: MA Experiment 20000534 PARAMETER Experiment Name: Zm_Hybrid_Pollen_P Parameter: Organism Value: Zea mays
  misc_feature: MA Experiment 20000534 PARAMETER Experiment Name: Zm_Hybrid_Pollen_P Parameter: Plant Line Value: 35A19
  misc_feature: MA Experiment 20000534 PARAMETER Experiment Name: Zm_Hybrid_Pollen_P Parameter: Tissue Value: Pollen vs. Aerial
ctgacgagctgagcccacggacgagaggggagacgaggaggggcacaccacgcaggagaccggaggagagcgcgcgcgcggatccacctcgatgttggcaagaccatcagcaccgcctttggtgactgctcaaactcctgaagtcggcatcttcattacagctcgcaacgtctcgggtgcactggtcgccaagcttcctggtaacaaaaacaagtgtggaggaagatcgaatgtccggcagcggaacatccaacctgggaaaaggggctgtcgtcgggagtggcgggcgctctcagcagctgaccaagcgcaggcttctaccttggacgtagatgaggagtgcaaacgggtgctcactccattgggtttctccagcgaagacgccgagaagatgctgaagaaagcgtttggctggacccactcgccgtactggagcgaggagagggagaaggaggttccgaccgccgagacggtagctggagtgctggactacatcaggagcctggggctgtcggacgaagaccttggcaggctgctgaagaagttccccgaggttcttgggtgcgacctcgacggcgaggtgaggccgaatgtgggcaagctggacagtgactggggaataaacgggaagaccctgcggagccttctgctgaggaaccccaaggttctgggctacaatgttgactgcagaggggattgcatggcccagtgcacccgctgttgggttaggttctgatgatgattggttttgttcttcgtcgccacatcgttggtcaggaacttgggacttggttttgcttgctggccatttttctgtaagctagcacctgtcgaatgtagcacaatcgctagctgctggatattgggttggccactgttagttcttatgtacgtacaacagattcaagagctaaaccatgctgctgttgtctgtaaaagagttgcaataaatatggccagaattccc

SEQ ID NO: 15945 - protein, 214 aa, Zea mays subsp. mays
  peptide (1)..(214): Ceres Seq. ID no. 12357365
  misc_feature (132)..(198): Pfam Name: mTERF Pfam Description: mTERF
  misc_feature (61)..(214): Homolog of NCBI NO: 30681137 NR Description: expressed protein [Arabidopsis thaliana]
  misc_feature (61)..(214): Homolog of NCBI NO: 25372638 NR Description: hypothetical protein AT4g09620 [imported] -
  misc_feature (61)..(214): Homolog of NCBI NO: 15810253 NR Description: unknown protein [Arabidopsis thaliana]
  misc_feature (1)..(214): Homolog of NCBI NO: 28376711 NR Description: unknown protein [Oryza sativa (japonica
MLARPSAPPLVTAQTPEVGIFITARNVSGALVAKLPGNKNKCGGRSNVRQRNIQPGKRGCRREWRALSAADQAQASTLDVDEECKRVLTPLGFSSEDAEKMLKKAFGWTHSPYWSEEREKEVPTAETVAGVLDYIRSLGLSDEDLGRLLKKFPEVLGCDLDGEVRPNVGKLDSDWGINGKTLRSLLLRNPKVLGYNVDCRGDCMAQCTRCWVRF

SEQ ID NO: 15946 - protein, 114 aa, Zea mays subsp. mays
  peptide (1)..(114): Ceres Seq. ID no. 12357366
  misc_feature (32)..(98): Pfam Name: mTERF Pfam Description: mTERF
  misc_feature (1)..(114): Homolog of NCBI NO: 30681137 NR Description: expressed protein [Arabidopsis thaliana]
  misc_feature (1)..(114): Homolog of NCBI NO: 25372638 NR Description: hypothetical protein AT4g09620 [imported] -
  misc_feature (1)..(114): Homolog of NCBI NO: 15810253 NR Description: unknown protein [Arabidopsis thaliana]
  misc_feature (1)..(114): Homolog of NCBI NO: 28376711 NR Description: unknown protein [Oryza sativa (japonica
MLKKAFGWTHSPYWSEEREKEVPTAETVAGVLDYIRSLGLSDEDLGRLLKKFPEVLGCDLDGEVRPNVGKLDSDWGINGKTLRSLLLRNPKVLGYNVDCRGDCMAQCTRCWVRF

SEQ ID NO: 15947 - DNA, 1971 bp, Zea mays subsp. mays
  misc_feature (1)..(1971): Ceres Seq. ID no. 13501211
  misc_feature: MA Experiment ID: 20001610 Result: Down-regulated in Transcription
  misc_feature: MA Experiment 20001610 PARAMETER Experiment Name: Zm_50ppm_KNO3_L-to-H_P Parameter: Age (day) Value: 19
  misc_feature: MA Experiment 20001610 PARAMETER Experiment Name: Zm_50ppm_KNO3_L-to-H_P Parameter: Organism Value: Zea mays
  misc_feature: MA Experiment 20001610 PARAMETER Experiment Name: Zm_50ppm_KNO3_L-to-H_P Parameter: Plant Line Value: 35A19
  misc_feature: MA Experiment 20001610 PARAMETER Experiment Name: Zm_50ppm_KNO3_L-to-H_P Parameter: Timepoint (hr) Value: 2
  misc_feature: MA Experiment 20001610 PARAMETER Experiment Name: Zm_50ppm_KNO3_L-to-H_P Parameter: Tissue Value: Roots
  misc_feature: MA Experiment 20001610 PARAMETER Experiment Name: Zm_50ppm_KNO3_L-to-H_P Parameter: Treatment Value: 50ppm KNO3 vs. 50ppm KCl
aagagacagagagggggagtggtccgaggtcaataggatataactccaggactcctctccatcagaatcagagacgagtcgagtgagggggcagaggccacaaaacagagagtacccaaacgatcgatctgtgcatctccccgtccgtcccgcaaccatctaattcagaagcagacatcaatggcgagcaacggctgcaacggcaacggcaacggcaacggcaacggcaaggcggctccggcgggtgtggtggtaccggagatcaagttcaccaagctcttcatcaacggcgagttcgtcgacgccgcctccggcaagacattcgataccagggacccacggaccggcgacgtgctggcccacgtagcagaggcagacaaagctgatgtggacctggcggtgaagtccgcccgggacgccttcgagcacggcaagtggccccgcatgtcaggctacgagcgcgggcggatcatgagcaagctggcggacctggtggagcagcacacggaggagctggcggcgctggacggtgccgacgccgggaagctgctgctgctgggcaagatcatcgacatccccgcggccacgcagatgctgcgctactacgccggcgccgccgacaagatccacggcgacgtcctgcgcgtctccggcaggtaccagggctacacgctcaaggagcctatcggcgtcgtgggcgtcatcatcccctggaacttccccaccatgatgttcttcctcaaggtcagcccggcgctcgccgcgggctgcaccgtcgtcgtcaagcccgccgagcagacgccgctttccgcgctctactacgcgcacctcgcaaagatggccggcgtccccgacggagtgatcaacgtcgtccccgggttcggccccaccgccggcgccgcgctcgcctcccacatggacgtcgacagcgtggccttcaccggctccacagaggtgggtcgcctcatcatggagtcggccgcgcggagcaacctcaagacggtctcgctggagctcggcggcaagtcgccgctcatcatcttcgacgacgccgacgtcgacatggccgttaacctgtcgaggcttgccgtcttcttcaacaagggagaggtttgcgtggcgggatcgcgcgtgtacgtgcaggaagggatctatgacgagttcgtcaagaaggccgtggaggccgcgcggagctggaaggttggagacccgttcgatgtcaccagcaacatgggccctcaggttgacaaggaccagtttgagagggtcctaaagtacattgagcatggcaagagcgagggagcgactctgctcaccggcggcaagcctgccgccgacaaagggtactacattgagcccaccatctttgtcgatgtcactgaggacatgaagatcgcgcaggaagagatcttcggccccgtcatgtccctcatgaagttcaagacggttgatgaggtgatcgagaaggccaactgcaccaggtacgggctcgccgccgggatcgtgaccaagagcctggacgtcgccaaccgggtgtcccggtcggtgcgcgccggcaccgtgtgggtgaactgctacttcgccttcgacccggacgcgcccttcggcgggtacaagatgagcggcttcggccgggaccaggggctggcagccatggacaagtacctgcaggtcaagagcgtcatcaccgcgctcccggactcgccatggtactgagttgagccagggaccgatggaaccccatcgatctcttcttgtgcagtgtacatgcgtcatgcgtgcgtgctcacacagctgggttgctgctttgtgcttgtgttcgtctctggtttgtggctcatgtgtgttagtctgcaccctatccttctgtacgtagctgccggacatgcaaatagtatgttaagtacaccatataaactcttgttttataaattcaagtttagcttggagccttcactcccttcagccttg

SEQ ID NO: 15948 - protein, 511 aa, Zea mays subsp. mays
  peptide (1)..(511): Ceres Seq. ID no. 13501212
  misc_feature (1)..(510): Homolog of NCBI NO: 20530127 NR Description: mitochondrial aldehyde dehydrogenase [Secale
  misc_feature (28)..(510): Homolog of NCBI NO: 14276718 NR Description: T-cytoplasm male sterility restorer factor 2 [Zea
  misc_feature (27)..(510): Homolog of NCBI NO: 20530131 NR Description: mitochondrial aldehyde dehydrogenase [Sorghum
  misc_feature (28)..(510): Homolog of NCBI NO: 7431451 NR Description: rf2 nuclear restorer protein - maize
  misc_feature (15)..(510): Homolog of NCBI NO: 18404212 NR Description: aldehyde dehydrogenase (ALDH1a) [Arabidopsis
  misc_feature (13)..(510): Homolog of NCBI NO: 19850243 NR Description: cytosolic aldehyde dehydrogenase RF2C [Zea mays]
  misc_feature (13)..(510): Homolog of NCBI NO: 19850241 NR Description: cytosolic aldehyde dehydrogenase RF2C [Zea mays]
  misc_feature (8)..(511): Homolog of NCBI NO: 34912252 NR Description: putative cytosolic aldehyde dehydrogenase
  misc_feature (46)..(511): Homolog of NCBI NO: 19850245 NR Description: cytosolic aldehyde dehydrogenase RF2D [Zea mays]
  misc_feature (1)..(511): Homolog of NCBI NO: 19850247 NR Description: cytosolic aldehyde dehydrogenase RF2D [Zea mays]
  misc_feature (1)..(510): Homolog of NCBI NO: 20530127 NR Description: mitochondrial aldehyde dehydrogenase [Secale
  misc_feature (28)..(510): Homolog of NCBI NO: 14276718 NR Description: T-cytoplasm male sterility restorer factor 2 [Zea
  misc_feature (27)..(510): Homolog of NCBI NO: 20530131 NR Description: mitochondrial aldehyde dehydrogenase [Sorghum
  misc_feature (28)..(510): Homolog of NCBI NO: 7431451 NR Description: rf2 nuclear restorer protein - maize
  misc_feature (15)..(510): Homolog of NCBI NO: 18404212 NR Description: aldehyde dehydrogenase (ALDH1a) [Arabidopsis
  misc_feature (13)..(510): Homolog of NCBI NO: 19850243 NR Description: cytosolic aldehyde dehydrogenase RF2C [Zea mays]
  misc_feature (13)..(510): Homolog of NCBI NO: 19850241 NR Description: cytosolic aldehyde dehydrogenase RF2C [Zea mays]
  misc_feature (8)..(511): Homolog of NCBI NO: 34912252 NR Description: putative cytosolic aldehyde dehydrogenase
  misc_feature (46)..(511): Homolog of NCBI NO: 19850245 NR Description: cytosolic aldehyde dehydrogenase RF2D [Zea mays]
  misc_feature (1)..(511): Homolog of NCBI NO: 19850247 NR Description: cytosolic aldehyde dehydrogenase RF2D [Zea mays]
MASNGCNGNGNGNGNGKAAPAGVVVPEIKFTKLFINGEFVDAASGKTFDTRDPRTGDVLAHVAEADKADVDLAVKSARDAFEHGKWPRMSGYERGRIMSKLADLVEQHTEELAALDGADAGKLLLLGKIIDIPAATQMLRYYAGAADKIHGDVLRVSGRYQGYTLKEPIGVVGVIIPWNFPTMMFFLKVSPALAAGCTVVVKPAEQTPLSALYYAHLAKMAGVPDGVINVVPGFGPTAGAALASHMDVDSVAFTGSTEVGRLIMESAARSNLKTVSLELGGKSPLIIFDDADVDMAVNLSRLAVFFNKGEVCVAGSRVYVQEGIYDEFVKKAVEAARSWKVGDPFDVTSNMGPQVDKDQFERVLKYIEHGKSEGATLLTGGKPAADKGYYIEPTIFVDVTEDMKIAQEEIFGPVMSLMKFKTVDEVIEKANCTRYGLAAGIVTKSLDVANRVSRSVRAGTVWVNCYFAFDPDAPFGGYKMSGFGRDQGLAAMDKYLQVKSVITALPDSPWY

SEQ ID NO: 15949 - protein, 423 aa, Zea mays subsp. mays
  peptide (1)..(423): Ceres Seq. ID no. 13501213
  misc_feature (1)..(422): Homolog of NCBI NO: 20530127 NR Description: mitochondrial aldehyde dehydrogenase [Secale
  misc_feature (1)..(422): Homolog of NCBI NO: 14276718 NR Description: T-cytoplasm male sterility restorer factor 2 [Zea
  misc_feature (1)..(422): Homolog of NCBI NO: 20530131 NR Description: mitochondrial aldehyde dehydrogenase [Sorghum
  misc_feature (1)..(422): Homolog of NCBI NO: 7431451 NR Description: rf2 nuclear restorer protein - maize
  misc_feature (1)..(422): Homolog of NCBI NO: 18404212 NR Description: aldehyde dehydrogenase (ALDH1a) [Arabidopsis
  misc_feature (1)..(422): Homolog of NCBI NO: 19850243 NR Description: cytosolic aldehyde dehydrogenase RF2C [Zea mays]
  misc_feature (1)..(422): Homolog of NCBI NO: 19850241 NR Description: cytosolic aldehyde dehydrogenase RF2C [Zea mays]
  misc_feature (1)..(423): Homolog of NCBI NO: 34912252 NR Description: putative cytosolic aldehyde dehydrogenase
  misc_feature (1)..(423): Homolog of NCBI NO: 19850245 NR Description: cytosolic aldehyde dehydrogenase RF2D [Zea mays]
  misc_feature (1)..(423): Homolog of NCBI NO: 19850247 NR Description: cytosolic aldehyde dehydrogenase RF2D [Zea mays]
  misc_feature (1)..(422): Homolog of NCBI NO: 20530131 NR Description: mitochondrial aldehyde dehydrogenase [Sorghum
  misc_feature (1)..(422): Homolog of NCBI NO: 7431451 NR Description: rf2 nuclear restorer protein - maize
  misc_feature (1)..(422): Homolog of NCBI NO: 18404212 NR Description: aldehyde dehydrogenase (ALDH1a) [Arabidopsis
  misc_feature (1)..(422): Homolog of NCBI NO: 19850243 NR Description: cytosolic aldehyde dehydrogenase RF2C [Zea mays]
  misc_feature (1)..(422): Homolog of NCBI NO: 19850241 NR Description: cytosolic aldehyde dehydrogenase RF2C [Zea mays]
  misc_feature (1)..(423): Homolog of NCBI NO: 34912252 NR Description: putative cytosolic aldehyde dehydrogenase
  misc_feature (1)..(423): Homolog of NCBI NO: 19850245 NR Description: cytosolic aldehyde dehydrogenase RF2D [Zea mays]
  misc_feature (1)..(423): Homolog of NCBI NO: 19850247 NR Description: cytosolic aldehyde dehydrogenase RF2D [Zea mays]
  misc_feature (1)..(422): Homolog of NCBI NO: 20530127 NR Description: mitochondrial aldehyde dehydrogenase [Secale
  misc_feature (1)..(422): Homolog of NCBI NO: 14276718 NR Description: T-cytoplasm male sterility restorer factor 2 [Zea
MSGYERGRIMSKLADLVEQHTEELAALDGADAGKLLLLGKIIDIPAATQMLRYYAGAADKIHGDVLRVSGRYQGYTLKEPIGVVGVIIPWNFPTMMFFLKVSPALAAGCTVVVKPAEQTPLSALYYAHLAKMAGVPDGVINVVPGFGPTAGAALASHMDVDSVAFTGSTEVGRLIMESAARSNLKTVSLELGGKSPLIIFDDADVDMAVNLSRLAVFFNKGEVCVAGSRVYVQEGIYDEFVKKAVEAARSWKVGDPFDVTSNMGPQVDKDQFERVLKYIEHGKSEGATLLTGGKPAADKGYYIEPTIFVDVTEDMKIAQEEIFGPVMSLMKFKTVDEVIEKANCTRYGLAAGIVTKSLDVANRVSRSVRAGTVWVNCYFAFDPDAPFGGYKMSGFGRDQGLAAMDKYLQVKSVITALPDSPWY

SEQ ID NO: 15950 - protein, 414 aa, Zea mays subsp. mays
  peptide (1)..(414): Ceres Seq. ID no. 13501214
  misc_feature (1)..(413): Homolog of NCBI NO: 20530127 NR Description: mitochondrial aldehyde dehydrogenase [Secale
  misc_feature (1)..(413): Homolog of NCBI NO: 14276718 NR Description: T-cytoplasm male sterility restorer factor 2 [Zea
  misc_feature (1)..(413): Homolog of NCBI NO: 20530131 NR Description: mitochondrial aldehyde dehydrogenase [Sorghum
  misc_feature (1)..(413): Homolog of NCBI NO: 7431451 NR Description: rf2 nuclear restorer protein - maize
  misc_feature (1)..(413): Homolog of NCBI NO: 18404212 NR Description: aldehyde dehydrogenase (ALDH1a) [Arabidopsis
  misc_feature (1)..(413): Homolog of NCBI NO: 19850243 NR Description: cytosolic aldehyde dehydrogenase RF2C [Zea mays]
  misc_feature (1)..(413): Homolog of NCBI NO: 19850241 NR Description: cytosolic aldehyde dehydrogenase RF2C [Zea mays]
  misc_feature (1)..(414): Homolog of NCBI NO: 34912252 NR Description: putative cytosolic aldehyde dehydrogenase
  misc_feature (1)..(414): Homolog of NCBI NO: 19850245 NR Description: cytosolic aldehyde dehydrogenase RF2D [Zea mays]
  misc_feature (1)..(414): Homolog of NCBI NO: 19850247 NR Description: cytosolic aldehyde dehydrogenase RF2D [Zea mays]
  misc_feature (1)..(413): Homolog of NCBI NO: 20530127 NR Description: mitochondrial aldehyde dehydrogenase [Secale
  misc_feature (1)..(413): Homolog of NCBI NO: 14276718 NR Description: T-cytoplasm male sterility restorer factor 2 [Zea
  misc_feature (1)..(413): Homolog of NCBI NO: 20530131 NR Description: mitochondrial aldehyde dehydrogenase [Sorghum
  misc_feature (1)..(413): Homolog of NCBI NO: 7431451 NR Description: rf2 nuclear restorer protein - maize
  misc_feature (1)..(413): Homolog of NCBI NO: 18404212 NR Description: aldehyde dehydrogenase (ALDH1a) [Arabidopsis
  misc_feature (1)..(413): Homolog of NCBI NO: 19850243 NR Description: cytosolic aldehyde dehydrogenase RF2C [Zea mays]
  misc_feature (1)..(413): Homolog of NCBI NO: 19850241 NR Description: cytosolic aldehyde dehydrogenase RF2C [Zea mays]
  misc_feature (1)..(414): Homolog of NCBI NO: 34912252 NR Description: putative cytosolic aldehyde dehydrogenase
  misc_feature (1)..(414): Homolog of NCBI NO: 19850245 NR Description: cytosolic aldehyde dehydrogenase RF2D [Zea mays]
  misc_feature (1)..(414): Homolog of NCBI NO: 19850247 NR Description: cytosolic aldehyde dehydrogenase RF2D [Zea mays]
MSKLADLVEQHTEELAALDGADAGKLLLLGKIIDIPAATQMLRYYAGAADKIHGDVLRVSGRYQGYTLKEPIGVVGVIIPWNFPTMMFFLKVSPALAAGCTVVVKPAEQTPLSALYYAHLAKMAGVPDGVINVVPGFGPTAGAALASHMDVDSVAFTGSTEVGRLIMESAARSNLKTVSLELGGKSPLIIFDDADVDMAVNLSRLAVFFNKGEVCVAGSRVYVQEGIYDEFVKKAVEAARSWKVGDPFDVTSNMGPQVDKDQFERVLKYIEHGKSEGATLLTGGKPAADKGYYIEPTIFVDVTEDMKIAQEEIFGPVMSLMKFKTVDEVIEKANCTRYGLAAGIVTKSLDVANRVSRSVRAGTVWVNCYFAFDPDAPFGGYKMSGFGRDQGLAAMDKYLQVKSVITALPDSPWY

SEQ ID NO: 15951 - DNA, 1294 bp, Zea mays subsp. mays
  misc_feature (1)..(1294): Ceres Seq. ID no. 13494804
  misc_feature: MA Experiment ID: 108522 Result: Down-regulated in Transcription
  misc_feature: MA Experiment 108522 PARAMETER Experiment Name: Zm_42deg_Heat_P Parameter: Age (day) Value: 8
  misc_feature: MA Experiment 108522 PARAMETER Experiment Name: Zm_42deg_Heat_P Parameter: Organism Value: Zea mays
  misc_feature: MA Experiment 108522 PARAMETER Experiment Name: Zm_42deg_Heat_P Parameter: Plant Line Value: 35A19
  misc_feature: MA Experiment 108522 PARAMETER Experiment Name: Zm_42deg_Heat_P Parameter: Temperature (deg C) Value: 42 vs. 22
  misc_feature: MA Experiment 108522 PARAMETER Experiment Name: Zm_42deg_Heat_P Parameter: Timepoint (hr) Value: 1
  misc_feature: MA Experiment 108522 PARAMETER Experiment Name: Zm_42deg_Heat_P Parameter: Tissue Value: Aerial
  misc_feature: MA Experiment ID: 108523 Result: Down-regulated in Transcription
  misc_feature: MA Experiment 108523 PARAMETER Experiment Name: Zm_42deg_Heat_P Parameter: Age (day) Value: 8
  misc_feature: MA Experiment 108523 PARAMETER Experiment Name: Zm_42deg_Heat_P Parameter: Organism Value: Zea mays
  misc_feature: MA Experiment 108523 PARAMETER Experiment Name: Zm_42deg_Heat_P Parameter: Plant Line Value: 35A19
  misc_feature: MA Experiment 108523 PARAMETER Experiment Name: Zm_42deg_Heat_P Parameter: Temperature (deg C) Value: 42 vs. 22
  misc_feature: MA Experiment 108523 PARAMETER Experiment Name: Zm_42deg_Heat_P Parameter: Timepoint (hr) Value: 6
  misc_feature: MA Experiment 108523 PARAMETER Experiment Name: Zm_42deg_Heat_P Parameter: Tissue Value: Aerial
  misc_feature: MA Experiment ID: 108535 Result: Up-regulated in Transcription
  misc_feature: MA Experiment 108535 PARAMETER Experiment Name: Zm_Meristem_P Parameter: Age (day) Value: 8
  misc_feature: MA Experiment 108535 PARAMETER Experiment Name: Zm_Meristem_P Parameter: Organism Value: Zea mays
  misc_feature: MA Experiment 108535 PARAMETER Experiment Name: Zm_Meristem_P Parameter: Plant Line Value: 35A19
  misc_feature: MA Experiment 108535 PARAMETER Experiment Name: Zm_Meristem_P Parameter: Tissue Value: Root Meristem vs. Above Root Meristem
  misc_feature: MA Experiment ID: 20000108 Result: Up-regulated in Transcription
  misc_feature: MA Experiment 20000108 PARAMETER Experiment Name: Zm_Root-Tips_P Parameter: Age (day) Value: 12
  misc_feature: MA Experiment 20000108 PARAMETER Experiment Name: Zm_Root-Tips_P Parameter: Organism Value: Zea mays
  misc_feature: MA Experiment 20000108 PARAMETER Experiment Name: Zm_Root-Tips_P Parameter: Tissue Value: Root tips vs. Root mid region    35
  misc_feature: MA Experiment 20000108 PARAMETER Experiment Name: Zm_Root-Tips_P Parameter: Tissue Value: Root tips vs. Root mid region   Sequence Listing-Misc Features (4)
  misc_feature: MA Experiment ID: 20000534 Result: Down-regulated in Transcription
  misc_feature: MA Experiment 20000534 PARAMETER Experiment Name: Zm_Hybrid_Pollen_P Parameter: Age (day) Value: 8
  misc_feature: MA Experiment 20000534 PARAMETER Experiment Name: Zm_Hybrid_Pollen_P Parameter: Organism Value: Zea mays
  misc_feature: MA Experiment 20000534 PARAMETER Experiment Name: Zm_Hybrid_Pollen_P Parameter: Plant Line Value: 35A19
  misc_feature: MA Experiment 20000534 PARAMETER Experiment Name: Zm_Hybrid_Pollen_P Parameter: Tissue Value: Pollen vs. Aerial
  misc_feature: MA Experiment ID: 20000535 Result: Up-regulated in Transcription
  misc_feature: MA Experiment 20000535 PARAMETER Experiment Name: Zm_Hybrid_Seed_Dev_P Parameter: DAP Value: 30 vs. 12
  misc_feature: MA Experiment 20000535 PARAMETER Experiment Name: Zm_Hybrid_Seed_Dev_P Parameter: Organism Value: Zea mays
  misc_feature: MA Experiment 20000535 PARAMETER Experiment Name: Zm_Hybrid_Seed_Dev_P Parameter: Plant Line Value: 35A19
  misc_feature: MA Experiment 20000535 PARAMETER Experiment Name: Zm_Hybrid_Seed_Dev_P Parameter: Tissue Value: Embryo vs. Unfert Floret
gcgcaccgtccctcaccgccggcctctgctcctcttccgccgccgcaggatctcgtatcgccggagaccatgtaccgcgccgccgggagccacctccgctccctcaagcatcatggtgcttctaggcttgccagtacaagtgttgcgaagcagtcctcaggtggtctgttcagctggcttcttggtggaaaatcaagcgaactccctccccttgatgttccactcccaggcattagcattccctcacctctaccagattttgtagagccatctaagacaaaagtcactactcttccaaatggcgtcaagatcgcctcggagacatcatcgagcccagcagcatctgtgggtctgtacattgactgtggttccatttacgaaacacctgcttcatctggagtatcacatctgttggagagaatggccttcaagagcacagtgaatcggactcacttacggttagttcgtgaggtagaagccattggaggaaatgtctctgcatcagcttcccgtgaacaaatgagctatacctatgatgcattgaagagctatacaccagaaatggttgaagttctcattgacagtgtaaggaatccagcattcctcgattgggaggtcaaagagcagctccagaacataaaatctgaaatagctgatgcgtctgctaatcctcaaggtctacttctggaggcccttcattcggttggatattccggggcactggcaaaacctttgatggcttcagaatctgctgtaaaccggttggatgttagcagcttggaggaatttgttgctgaacattacactgctcccaggatggttcttgcagcatcaggagttgatcatgatgcgctgatttcagttgtagaaccacttctgtctgaccttccgtgcgtgaaacgtcctgaagagccaaaatctgtgtacgtgggaggagactatcgctgccaagcagattctccaaacacacacatcgcacttgcttttgagatgccaggtggttggaatcaagagaaaactgcaatggttgtgacagtgcttcagatgctcatgggaggaggagggtccttctctgctggtgggcctggaaagggaatgcattctcgattgtatctccgtgtcttgaccaacttccaacagattgaatcattctctgctttcaatagcgtctataacaattcgggcctttttggaatttatgcagtcactagcccagacttttcatcgaaggctgtggatttggcagcaggggaactcctggagattgcgacacctggaaaagttacacaagaac

SEQ ID NO: 15952 - protein, 431 aa, Zea mays subsp. mays
  peptide (1)..(431): Ceres Seq. ID no. 13494805
  misc_feature (254)..(430): Pfam Name: Peptidase M16 inactive domain Pfam Description: Peptidase M16 inactive domain
  misc_feature (254)..(430): Pfam Name: Peptidase M16 inactive domain Pfam Description: Peptidase M16 inactive domain
  misc_feature (24)..(430): Homolog of NCBI NO: 15076515 NR Description: mitochondrial processing peptidase alpha subunit
  misc_feature (24)..(430): Homolog of NCBI NO: 11993905 NR Description: mitochondrial processing peptidase alpha-chain
  misc_feature (40)..(430): Homolog of NCBI NO: 34906418 NR Description: putative mitochondrial processing peptidase
  misc_feature (24)..(430): Homolog of NCBI NO: 21594004 NR Description: mitochondrial processing peptidase alpha subunit,
  misc_feature (24)..(430): Homolog of NCBI NO: 15218090 NR Description: mitochondrial processing peptidase alpha subunit
  misc_feature (24)..(430): Homolog of NCBI NO: 15076515 NR Description: mitochondrial processing peptidase alpha subunit
  misc_feature (40)..(430): Homolog of NCBI NO: 34906418 NR Description: putative mitochondrial processing peptidase
  misc_feature (24)..(430): Homolog of NCBI NO: 15218090 NR Description: mitochondrial processing peptidase alpha subunit
  misc_feature (25)..(430): Homolog of NCBI NO: 34909352 NR Description: putative mitochondrial processing peptidase alpha
  misc_feature (24)..(428): Homolog of NCBI NO: 2117355 NR Description: mitochondrial processing peptidase (EC 3.4.24.64)
  misc_feature (24)..(430): Homolog of NCBI NO: 266567 NR Description: Mitochondrial processing peptidase alpha subunit, precursor (Alpha-MPP) (Ubiquinol-cytochrome C reductase subunit
  misc_feature (24)..(430): Homolog of NCBI NO: 18401141 NR Description: mitochondrial processing peptidase alpha subunit
  misc_feature (24)..(430): Homolog of NCBI NO: 14334534 NR Description: putative mitochondrial processing peptidase alpha
  misc_feature (24)..(430): Homolog of NCBI NO: 21594004 NR Description: mitochondrial processing peptidase alpha subunit,
  misc_feature (24)..(430): Homolog of NCBI NO: 11993905 NR Description: mitochondrial processing peptidase alpha-chain
  misc_feature (24)..(430): Homolog of NCBI NO: 14334534 NR Description: putative mitochondrial processing peptidase alpha
  misc_feature (24)..(430): Homolog of NCBI NO: 18401141 NR Description: mitochondrial processing peptidase alpha subunit
  misc_feature (24)..(430): Homolog of NCBI NO: 266567 NR Description: Mitochondrial processing peptidase alpha subunit, precursor (Alpha-MPP) (Ubiquinol-cytochrome C reductase subunit
  misc_feature (24)..(428): Homolog of NCBI NO: 2117355 NR Description: mitochondrial processing peptidase (EC 3.4.24.64)
  misc_feature (25)..(430): Homolog of NCBI NO: 34909352 NR Description: putative mitochondrial processing peptidase alpha
AHRPSPPASAPLPPPQDLVSPETMYRAAGSHLRSLKHHGASRLASTSVAKQSSGGLFSWLLGGKSSELPPLDVPLPGISIPSPLPDFVEPSKTKVTTLPNGVKIASETSSSPAASVGLYIDCGSIYETPASSGVSHLLERMAFKSTVNRTHLRLVREVEAIGGNVSASASREQMSYTYDALKSYTPEMVEVLIDSVRNPAFLDWEVKEQLQNIKSEIADASANPQGLLLEALHSVGYSGALAKPLMASESAVNRLDVSSLEEFVAEHYTAPRMVLAASGVDHDALISVVEPLLSDLPCVKRPEEPKSVYVGGDYRCQADSPNTHIALAFEMPGGWNQEKTAMVVTVLQMLMGGGGSFSAGGPGKGMHSRLYLRVLTNFQQIESFSAFNSVYNNSGLFGIYAVTSPDFSSKAVDLAAGELLEIATPGKVTQE

SEQ ID NO: 15953 - protein, 408 aa, Zea mays subsp. mays
  peptide (1)..(408): Ceres Seq. ID no. 13494806
  misc_feature (231)..(407): Pfam Name: Peptidase M16 inactive domain Pfam Description: Peptidase M16 inactive domain
  misc_feature (231)..(407): Pfam Name: Peptidase M16 inactive domain Pfam Description: Peptidase M16 inactive domain
  misc_feature (1)..(407): Homolog of NCBI NO: 21594004 NR Description: mitochondrial processing peptidase alpha subunit,
  misc_feature (1)..(407): Homolog of NCBI NO: 15218090 NR Description: mitochondrial processing peptidase alpha subunit
  misc_feature (1)..(407): Homolog of NCBI NO: 14334534 NR Description: putative mitochondrial processing peptidase alpha
  misc_feature (1)..(407): Homolog of NCBI NO: 18401141 NR Description: mitochondrial processing peptidase alpha subunit
  misc_feature (1)..(407): Homolog of NCBI NO: 11993905 NR Description: mitochondrial processing peptidase alpha-chain
  misc_feature (17)..(407): Homolog of NCBI NO: 34906418 NR Description: putative mitochondrial processing peptidase
  misc_feature (1)..(407): Homolog of NCBI NO: 15218090 NR Description: mitochondrial processing peptidase alpha subunit
  misc_feature (1)..(407): Homolog of NCBI NO: 18401141 NR Description: mitochondrial processing peptidase alpha subunit
  misc_feature (1)..(407): Homolog of NCBI NO: 11993905 NR Description: mitochondrial processing peptidase alpha-chain
  misc_feature (1)..(407): Homolog of NCBI NO: 15076515 NR Description: mitochondrial processing peptidase alpha subunit
  misc_feature (2)..(407): Homolog of NCBI NO: 34909352 NR Description: putative mitochondrial processing peptidase alpha
  misc_feature (1)..(405): Homolog of NCBI NO: 2117355 NR Description: mitochondrial processing peptidase (EC 3.4.24.64)
  misc_feature (1)..(407): Homolog of NCBI NO: 266567 NR Description: Mitochondrial processing peptidase alpha subunit, precursor (Alpha-MPP) (Ubiquinol-cytochrome C reductase subunit
  misc_feature (1)..(407): Homolog of NCBI NO: 14334534 NR Description: putative mitochondrial processing peptidase alpha
  misc_feature (1)..(407): Homolog of NCBI NO: 21594004 NR Description: mitochondrial processing peptidase alpha subunit,
  misc_feature (17)..(407): Homolog of NCBI NO: 34906418 NR Description: putative mitochondrial processing peptidase
  misc_feature (1)..(407): Homolog of NCBI NO: 15076515 NR Description: mitochondrial processing peptidase alpha subunit
  misc_feature (1)..(407): Homolog of NCBI NO: 266567 NR Description: Mitochondrial processing peptidase alpha subunit, precursor (Alpha-MPP) (Ubiquinol-cytochrome C reductase subunit
  misc_feature (1)..(405): Homolog of NCBI NO: 2117355 NR Description: mitochondrial processing peptidase (EC 3.4.24.64)
  misc_feature (2)..(407): Homolog of NCBI NO: 34909352 NR Description: putative mitochondrial processing peptidase alpha
MYRAAGSHLRSLKHHGASRLASTSVAKQSSGGLFSWLLGGKSSELPPLDVPLPGISIPSPLPDFVEPSKTKVTTLPNGVKIASETSSSPAASVGLYIDCGSIYETPASSGVSHLLERMAFKSTVNRTHLRLVREVEAIGGNVSASASREQMSYTYDALKSYTPEMVEVLIDSVRNPAFLDWEVKEQLQNIKSEIADASANPQGLLLEALHSVGYSGALAKPLMASESAVNRLDVSSLEEFVAEHYTAPRMVLAASGVDHDALISVVEPLLSDLPCVKRPEEPKSVYVGGDYRCQADSPNTHIALAFEMPGGWNQEKTAMVVTVLQMLMGGGGSFSAGGPGKGMHSRLYLRVLTNFQQIESFSAFNSVYNNSGLFGIYAVTSPDFSSKAVDLAAGELLEIATPGKVTQE

SEQ ID NO: 15954 - protein, 291 aa, Zea mays subsp. mays
  peptide (1)..(291): Ceres Seq. ID no. 13494807
  misc_feature (114)..(290): Pfam Name: Peptidase M16 inactive domain Pfam Description: Peptidase M16 inactive domain
  misc_feature (114)..(290): Pfam Name: Peptidase M16 inactive domain Pfam Description: Peptidase M16 inactive domain
  misc_feature (1)..(290): Homolog of NCBI NO: 15076515 NR Description: mitochondrial processing peptidase alpha subunit
  misc_feature (1)..(290): Homolog of NCBI NO: 11993905 NR Description: mitochondrial processing peptidase alpha-chain
  misc_feature (1)..(290): Homolog of NCBI NO: 34906418 NR Description: putative mitochondrial processing peptidase
  misc_feature (1)..(290): Homolog of NCBI NO: 21594004 NR Description: mitochondrial processing peptidase alpha subunit,
  misc_feature (1)..(290): Homolog of NCBI NO: 15218090 NR Description: mitochondrial processing peptidase alpha subunit
  misc_feature (1)..(290): Homolog of NCBI NO: 15076515 NR Description: mitochondrial processing peptidase alpha subunit
  misc_feature (1)..(290): Homolog of NCBI NO: 34906418 NR Description: putative mitochondrial processing peptidase
  misc_feature (1)..(290): Homolog of NCBI NO: 15218090 NR Description: mitochondrial processing peptidase alpha subunit
  misc_feature (1)..(290): Homolog of NCBI NO: 34909352 NR Description: putative mitochondrial processing peptidase alpha
  misc_feature (1)..(288): Homolog of NCBI NO: 2117355 NR Description: mitochondrial processing peptidase (EC 3.4.24.64)
  misc_feature (1)..(290): Homolog of NCBI NO: 266567 NR Description: Mitochondrial processing peptidase alpha subunit, precursor (Alpha-MPP) (Ubiquinol-cytochrome C reductase subunit
  misc_feature (1)..(290): Homolog of NCBI NO: 18401141 NR Description: mitochondrial processing peptidase alpha subunit
  misc_feature (1)..(290): Homolog of NCBI NO: 14334534 NR Description: putative mitochondrial processing peptidase alpha
  misc_feature (1)..(290): Homolog of NCBI NO: 21594004 NR Description: mitochondrial processing peptidase alpha subunit,
  misc_feature (1)..(290): Homolog of NCBI NO: 11993905 NR Description: mitochondrial processing peptidase alpha-chain
  misc_feature (1)..(290): Homolog of NCBI NO: 14334534 NR Description: putative mitochondrial processing peptidase alpha
  misc_feature (1)..(290): Homolog of NCBI NO: 18401141 NR Description: mitochondrial processing peptidase alpha subunit
  misc_feature (1)..(290): Homolog of NCBI NO: 266567 NR Description: Mitochondrial processing peptidase alpha subunit, precursor (Alpha-MPP) (Ubiquinol-cytochrome C reductase subunit
  misc_feature (1)..(288): Homolog of NCBI NO: 2117355 NR Description: mitochondrial processing peptidase (EC 3.4.24.64)
  misc_feature (1)..(290): Homolog of NCBI NO: 34909352 NR Description: putative mitochondrial processing peptidase alpha
MAFKSTVNRTHLRLVREVEAIGGNVSASASREQMSYTYDALKSYTPEMVEVLIDSVRNPAFLDWEVKEQLQNIKSEIADASANPQGLLLEALHSVGYSGALAKPLMASESAVNRLDVSSLEEFVAEHYTAPRMVLAASGVDHDALISVVEPLLSDLPCVKRPEEPKSVYVGGDYRCQADSPNTHIALAFEMPGGWNQEKTAMVVTVLQMLMGGGGSFSAGGPGKGMHSRLYLRVLTNFQQIESFSAFNSVYNNSGLFGIYAVTSPDFSSKAVDLAAGELLEIATPGKVTQE

SEQ ID NO: 15955 - DNA, 1385 bp, Zea mays subsp. mays; identical to SEQ ID NO: 2381
  misc_feature (1)..(1385): Ceres Seq. ID no. 12348953
  misc_feature: MA Experiment ID: 108528 Result: Up-regulated in Transcription
  misc_feature: MA Experiment 108528 PARAMETER Experiment Name: Zm_Imbibed_Seeds_P Parameter: Age (day) Value: 5 vs. 2
  misc_feature: MA Experiment 108528 PARAMETER Experiment Name: Zm_Imbibed_Seeds_P Parameter: Organism Value: Zea mays
  misc_feature: MA Experiment 108528 PARAMETER Experiment Name: Zm_Imbibed_Seeds_P Parameter: Plant Line Value: 35A19
  misc_feature: MA Experiment 108528 PARAMETER Experiment Name: Zm_Imbibed_Seeds_P Parameter: Tissue Value: Aerial vs. Embryo
  misc_feature: MA Experiment ID: 108530 Result: Up-regulated in Transcription
  misc_feature: MA Experiment 108530 PARAMETER Experiment Name: Zm_Imbibed_Seeds_P Parameter: Age (day) Value: 6 vs. 2
  misc_feature: MA Experiment 108530 PARAMETER Experiment Name: Zm_Imbibed_Seeds_P Parameter: Organism Value: Zea mays
  misc_feature: MA Experiment 108530 PARAMETER Experiment Name: Zm_Imbibed_Seeds_P Parameter: Plant Line Value: 35A19
  misc_feature: MA Experiment 108530 PARAMETER Experiment Name: Zm_Imbibed_Seeds_P Parameter: Tissue Value: Aerial vs. Embryo
  misc_feature: MA Experiment ID: 108547 Result: Up-regulated in Transcription
  misc_feature: MA Experiment 108547 PARAMETER Experiment Name: Zm_Imbibed_Seeds_P Parameter: Age (day) Value: 4 vs. 2
  misc_feature: MA Experiment 108547 PARAMETER Experiment Name: Zm_Imbibed_Seeds_P Parameter: Organism Value: Zea mays
  misc_feature: MA Experiment 108547 PARAMETER Experiment Name: Zm_Imbibed_Seeds_P Parameter: Plant Line Value: 35A19
  misc_feature: MA Experiment 108547 PARAMETER Experiment Name: Zm_Imbibed_Seeds_P Parameter: Tissue Value: Aerial vs. Embryo
  misc_feature: MA Experiment ID: 108556 Result: Down-regulated in Transcription
  misc_feature: MA Experiment 108556 PARAMETER Experiment Name: Zm_Drought_P Parameter: Age (day) Value: 9
  misc_feature: MA Experiment 108556 PARAMETER Experiment Name: Zm_Drought_P Parameter: Organism Value: Zea mays
  misc_feature: MA Experiment 108556 PARAMETER Experiment Name: Zm_Drought_P Parameter: Plant Line Value: 35A19
  misc_feature: MA Experiment 108556 PARAMETER Experiment Name: Zm_Drought_P Parameter: Timepoint (hr) Value: 24
  misc_feature: MA Experiment 108556 PARAMETER Experiment Name: Zm_Drought_P Parameter: Tissue Value: Aerial
  misc_feature: MA Experiment 108556 PARAMETER Experiment Name: Zm_Drought_P Parameter: Treatment Value: Drought vs. No Drought
  misc_feature: MA Experiment ID: 108597 Result: Down-regulated in Transcription
  misc_feature: MA Experiment 108597 PARAMETER Experiment Name: Zm_100uM_ABA_P Parameter: Age (day) Value: 9
  misc_feature: MA Experiment 108597 PARAMETER Experiment Name: Zm_100uM_ABA_P Parameter: Organism Value: Zea mays
  misc_feature: MA Experiment 108597 PARAMETER Experiment Name: Zm_100uM_ABA_P Parameter: Plant Line Value: 35A19
  misc_feature: MA Experiment 108597 PARAMETER Experiment Name: Zm_100uM_ABA_P Parameter: Timepoint (hr) Value: 24
  misc_feature: MA Experiment 108597 PARAMETER Experiment Name: Zm_100uM_ABA_P Parameter: Tissue Value: Aerial
  misc_feature: MA Experiment 108597 PARAMETER Experiment Name: Zm_100uM_ABA_P Parameter: Treatment Value: 100uM ABA vs. No Treatment
  misc_feature: MA Experiment ID: 20000477 Result: Down-regulated in Transcription
  misc_feature: MA Experiment 20000477 PARAMETER Experiment Name: Zm_5mM_SA_P Parameter: Age (day) Value: 10
  misc_feature: MA Experiment 20000477 PARAMETER Experiment Name: Zm_5mM_SA_P Parameter: Organism Value: Zea mays
  misc_feature: MA Experiment 20000477 PARAMETER Experiment Name: Zm_5mM_SA_P Parameter: Plant Line Value: 35A19
  misc_feature: MA Experiment 20000477 PARAMETER Experiment Name: Zm_5mM_SA_P Parameter: Timepoint (hr) Value: 48
  misc_feature: MA Experiment 20000477 PARAMETER Experiment Name: Zm_5mM_SA_P Parameter: Tissue Value: Aerial
  misc_feature: MA Experiment 20000477 PARAMETER Experiment Name: Zm_5mM_SA_P Parameter: Treatment Value: 5mM SA vs. No Treatment
  misc_feature: MA Experiment ID: 20000478 Result: Down-regulated in Transcription
  misc_feature: MA Experiment 20000478 PARAMETER Experiment Name: Zm_5mM_SA_P Parameter: Age (day) Value: 11
  misc_feature: MA Experiment 20000478 PARAMETER Experiment Name: Zm_5mM_SA_P Parameter: Organism Value: Zea mays
  misc_feature: MA Experiment 20000478 PARAMETER Experiment Name: Zm_5mM_SA_P Parameter: Plant Line Value: 35A19
  misc_feature: MA Experiment 20000478 PARAMETER Experiment Name: Zm_5mM_SA_P Parameter: Timepoint (hr) Value: 72
  misc_feature: MA Experiment 20000478 PARAMETER Experiment Name: Zm_5mM_SA_P Parameter: Tissue Value: Aerial
  misc_feature: MA Experiment 20000478 PARAMETER Experiment Name: Zm_5mM_SA_P Parameter: Treatment Value: 5mM SA vs. No Treatment
  misc_feature: MA Experiment ID: 20000480 Result: Down-regulated in Transcription
  misc_feature: MA Experiment 20000480 PARAMETER Experiment Name: Zm_Drought_P Parameter: Age (day) Value: 11
  misc_feature: MA Experiment 20000480 PARAMETER Experiment Name: Zm_Drought_P Parameter: Organism Value: Zea mays
  misc_feature: MA Experiment 20000480 PARAMETER Experiment Name: Zm_Drought_P Parameter: Plant Line Value: 35A19
  misc_feature: MA Experiment 20000480 PARAMETER Experiment Name: Zm_Drought_P Parameter: Timepoint (hr) Value: 72
  misc_feature: MA Experiment 20000480 PARAMETER Experiment Name: Zm_Drought_P Parameter: Tissue Value: Aerial
  misc_feature: MA Experiment 20000480 PARAMETER Experiment Name: Zm_Drought_P Parameter: Treatment Value: Drought vs. No Drought

SEQ ID NO: 15956 - protein, 310 aa, Zea mays subsp. mays; identical to SEQ ID NO: 2382
  peptide (1)..(310): Ceres Seq. ID no. 12348954
  misc_feature (158)..(310): Pfam Name: 3-oxo-5-alpha-steroid 4-dehydrogenase Pfam Description: 3-oxo-5-alpha-steroid 4-dehydrogenase
  misc_feature (158)..(310): Pfam Name: 3-oxo-5-alpha-steroid 4-dehydrogenase Pfam Description: 3-oxo-5-alpha-steroid 4-dehydrogenase
  misc_feature (20)..(291): Homolog of NCBI NO: 31418870 NR Description: Unknown (protein for MGC:64025) [Danio rerio]
  misc_feature (24)..(310): Homolog of NCBI NO: 33585860 NR Description: Glycoprotein, synaptic 2 [Xenopus laevis]
  misc_feature (24)..(291): Homolog of NCBI NO: 30585427 NR Description: Homo sapiens glycoprotein, synaptic 2 [synthetic
  misc_feature (24)..(291): Homolog of NCBI NO: 24475816 NR Description: glycoprotein, synaptic 2; synaptic glycoprotein
  misc_feature (24)..(291): Homolog of NCBI NO: 13111809 NR Description: Unknown (protein for IMAGE:2901253) [Homo sapiens]
  misc_feature (20)..(291): Homolog of NCBI NO: 31418870 NR Description: Unknown (protein for MGC:64025) [Danio rerio]
  misc_feature (24)..(291): Homolog of NCBI NO: 30585427 NR Description: Homo sapiens glycoprotein, synaptic 2 [synthetic
  misc_feature (24)..(291): Homolog of NCBI NO: 13111809 NR Description: Unknown (protein for IMAGE:2901253) [Homo sapiens]
  misc_feature (1)..(310): Homolog of NCBI NO: 34895848 NR Description: putative glycoprotein [Oryza sativa (japonica
  misc_feature (1)..(310): Homolog of NCBI NO: 15233250 NR Description: synaptic glycoprotein SC2-like protein
  misc_feature (1)..(310): Homolog of NCBI NO: 25004880 NR Description: steroid 5-alpha reductase [Cicer arietinum]
  misc_feature (38)..(310): Homolog of NCBI NO: 39590267 NR Description: Hypothetical protein CBG11196 [Caenorhabditis
  misc_feature (38)..(310): Homolog of NCBI NO: 17531783 NR Description: Synaptic glycoprotein SC2 (35.1 kD)
  misc_feature (24)..(291): Homolog of NCBI NO: 24475816 NR Description: glycoprotein, synaptic 2; synaptic glycoprotein
  misc_feature (24)..(310): Homolog of NCBI NO: 33585860 NR Description: Glycoprotein, synaptic 2 [Xenopus laevis]
  misc_feature (38)..(310): Homolog of NCBI NO: 17531783 NR Description: Synaptic glycoprotein SC2 (35.1 kD)
  misc_feature (38)..(310): Homolog of NCBI NO: 39590267 NR Description: Hypothetical protein CBG11196 [Caenorhabditis
  misc_feature (1)..(310): Homolog of NCBI NO: 25004880 NR Description: steroid 5-alpha reductase [Cicer arietinum]
  misc_feature (1)..(310): Homolog of NCBI NO: 15233250 NR Description: synaptic glycoprotein SC2-like protein
  misc_feature (1)..(310): Homolog of NCBI NO: 34895848 NR Description: putative glycoprotein [Oryza sativa (japonica

SEQ ID NO: 15957 - protein, 202 aa, Zea mays subsp. mays; identical to SEQ ID NO: 2383
  peptide (1)..(202): Ceres Seq. ID no. 12348955
  misc_feature (50)..(202): Pfam Name: 3-oxo-5-alpha-steroid 4-dehydrogenase Pfam Description: 3-oxo-5-alpha-steroid 4-dehydrogenase
  misc_feature (50)..(202): Pfam Name: 3-oxo-5-alpha-steroid 4-dehydrogenase Pfam Description: 3-oxo-5-alpha-steroid 4-dehydrogenase
  misc_feature (1)..(183): Homolog of NCBI NO: 31418870 NR Description: Unknown (protein for MGC:64025) [Danio rerio]
  misc_feature (1)..(202): Homolog of NCBI NO: 33585860 NR Description: Glycoprotein, synaptic 2 [Xenopus laevis]
  misc_feature (1)..(183): Homolog of NCBI NO: 30585427 NR Description: Homo sapiens glycoprotein, synaptic 2 [synthetic
  misc_feature (1)..(183): Homolog of NCBI NO: 24475816 NR Description: glycoprotein, synaptic 2; synaptic glycoprotein
  misc_feature (1)..(183): Homolog of NCBI NO: 13111809 NR Description: Unknown (protein for IMAGE:2901253) [Homo sapiens]
  misc_feature (1)..(183): Homolog of NCBI NO: 31418870 NR Description: Unknown (protein for MGC:64025) [Danio rerio]
  misc_feature (1)..(183): Homolog of NCBI NO: 30585427 NR Description: Homo sapiens glycoprotein, synaptic 2 [synthetic
  misc_feature (1)..(183): Homolog of NCBI NO: 13111809 NR Description: Unknown (protein for IMAGE:2901253) [Homo sapiens]
  misc_feature (1)..(202): Homolog of NCBI NO: 34895848 NR Description: putative glycoprotein [Oryza sativa (japonica
  misc_feature (1)..(202): Homolog of NCBI NO: 15233250 NR Description: synaptic glycoprotein SC2-like protein
  misc_feature (1)..(202): Homolog of NCBI NO: 25004880 NR Description: steroid 5-alpha reductase [Cicer arietinum]
  misc_feature (1)..(202): Homolog of NCBI NO: 39590267 NR Description: Hypothetical protein CBG11196 [Caenorhabditis
  misc_feature (1)..(202): Homolog of NCBI NO: 17531783 NR Description: Synaptic glycoprotein SC2 (35.1 kD)
  misc_feature (1)..(183): Homolog of NCBI NO: 24475816 NR Description: glycoprotein, synaptic 2; synaptic glycoprotein
  misc_feature (1)..(202): Homolog of NCBI NO: 33585860 NR Description: Glycoprotein, synaptic 2 [Xenopus laevis]
  misc_feature (1)..(202): Homolog of NCBI NO: 17531783 NR Description: Synaptic glycoprotein SC2 (35.1 kD)
  misc_feature (1)..(202): Homolog of NCBI NO: 39590267 NR Description: Hypothetical protein CBG11196 [Caenorhabditis
  misc_feature (1)..(202): Homolog of NCBI NO: 25004880 NR Description: steroid 5-alpha reductase [Cicer arietinum]
  misc_feature (1)..(202): Homolog of NCBI NO: 15233250 NR Description: synaptic glycoprotein SC2-like protein
  misc_feature (1)..(202): Homolog of NCBI NO: 34895848 NR Description: putative glycoprotein [Oryza sativa (japonica

SEQ ID NO: 15958 - protein, 184 aa, Zea mays subsp. mays; identical to SEQ ID NO: 2384
  peptide (1)..(184): Ceres Seq. ID no. 12348956
  misc_feature (32)..(184): Pfam Name: 3-oxo-5-alpha-steroid 4-dehydrogenase Pfam Description: 3-oxo-5-alpha-steroid 4-dehydrogenase
  misc_feature (32)..(184): Pfam Name: 3-oxo-5-alpha-steroid 4-dehydrogenase Pfam Description: 3-oxo-5-alpha-steroid 4-dehydrogenase
  misc_feature (1)..(165): Homolog of NCBI NO: 31418870 NR Description: Unknown (protein for MGC:64025) [Danio rerio]
  misc_feature (1)..(184): Homolog of NCBI NO: 33585860 NR Description: Glycoprotein, synaptic 2 [Xenopus laevis]
  misc_feature (1)..(165): Homolog of NCBI NO: 30585427 NR Description: Homo sapiens glycoprotein, synaptic 2 [synthetic
  misc_feature (1)..(165): Homolog of NCBI NO: 24475816 NR Description: glycoprotein, synaptic 2; synaptic glycoprotein
  misc_feature (1)..(165): Homolog of NCBI NO: 13111809 NR Description: Unknown (protein for IMAGE:2901253) [Homo sapiens]
  misc_feature (1)..(165): Homolog of NCBI NO: 31418870 NR Description: Unknown (protein for MGC:64025) [Danio rerio]
  misc_feature (1)..(165): Homolog of NCBI NO: 30585427 NR Description: Homo sapiens glycoprotein, synaptic 2 [synthetic
  misc_feature (1)..(165): Homolog of NCBI NO: 13111809 NR Description: Unknown (protein for IMAGE:2901253) [Homo sapiens]
  misc_feature (1)..(184): Homolog of NCBI NO: 34895848 NR Description: putative glycoprotein [Oryza sativa (japonica
  misc_feature (1)..(184): Homolog of NCBI NO: 15233250 NR Description: synaptic glycoprotein SC2-like protein
  misc_feature (1)..(184): Homolog of NCBI NO: 25004880 NR Description: steroid 5-alpha reductase [Cicer arietinum]
  misc_feature (1)..(184): Homolog of NCBI NO: 39590267 NR Description: Hypothetical protein CBG11196 [Caenorhabditis
  misc_feature (1)..(184): Homolog of NCBI NO: 17531783 NR Description: Synaptic glycoprotein SC2 (35.1 kD)
  misc_feature (1)..(165): Homolog of NCBI NO: 24475816 NR Description: glycoprotein, synaptic 2; synaptic glycoprotein
  misc_feature (1)..(184): Homolog of NCBI NO: 33585860 NR Description: Glycoprotein, synaptic 2 [Xenopus laevis]
  misc_feature (1)..(184): Homolog of NCBI NO: 17531783 NR Description: Synaptic glycoprotein SC2 (35.1 kD)
  misc_feature (1)..(184): Homolog of NCBI NO: 39590267 NR Description: Hypothetical protein CBG11196 [Caenorhabditis
  misc_feature (1)..(184): Homolog of NCBI NO: 25004880 NR Description: steroid 5-alpha reductase [Cicer arietinum]
  misc_feature (1)..(184): Homolog of NCBI NO: 15233250 NR Description: synaptic glycoprotein SC2-like protein
  misc_feature (1)..(184): Homolog of NCBI NO: 34895848 NR Description: putative glycoprotein [Oryza sativa (japonica

SEQ ID NO: 15959 - DNA, 1742 bp, Zea mays subsp. mays
  misc_feature (1)..(1742): Ceres Seq. ID no. 12356991
  misc_feature: MA Experiment ID: 108503 Result: Up-regulated in Transcription
  misc_feature: MA Experiment 108503 PARAMETER Experiment Name: Zm_Drought_P Parameter: Age (day) Value: 8
  misc_feature: MA Experiment 108503 PARAMETER Experiment Name: Zm_Drought_P Parameter: Organism Value: Zea mays
  misc_feature: MA Experiment 108503 PARAMETER Experiment Name: Zm_Drought_P Parameter: Plant Line Value: 35A19
  misc_feature: MA Experiment 108503 PARAMETER Experiment Name: Zm_Drought_P Parameter: Timepoint (hr) Value: 6
  misc_feature: MA Experiment 108503 PARAMETER Experiment Name: Zm_Drought_P Parameter: Tissue Value: Aerial
  misc_feature: MA Experiment 108503 PARAMETER Experiment Name: Zm_Drought_P Parameter: Treatment Value: Drought vs. No Drought
  misc_feature: MA Experiment ID: 108504 Result: Up-regulated in Transcription
  misc_feature: MA Experiment 108504 PARAMETER Experiment Name: Zm_Drought_P Parameter: Age (day) Value: 8
  misc_feature: MA Experiment 108504 PARAMETER Experiment Name: Zm_Drought_P Parameter: Organism Value: Zea mays
  misc_feature: MA Experiment 108504 PARAMETER Experiment Name: Zm_Drought_P Parameter: Plant Line Value: 35A19
  misc_feature: MA Experiment 108504 PARAMETER Experiment Name: Zm_Drought_P Parameter: Timepoint (hr) Value: 12
  misc_feature: MA Experiment 108504 PARAMETER Experiment Name: Zm_Drought_P Parameter: Tissue Value: Aerial
  misc_feature: MA Experiment 108504 PARAMETER Experiment Name: Zm_Drought_P Parameter: Treatment Value: Drought vs. No Drought
  misc_feature: MA Experiment ID: 108522 Result: Up-regulated in Transcription
  misc_feature: MA Experiment 108522 PARAMETER Experiment Name: Zm_42deg_Heat_P Parameter: Age (day) Value: 8
  misc_feature: MA Experiment 108522 PARAMETER Experiment Name: Zm_42deg_Heat_P Parameter: Organism Value: Zea mays
  misc_feature: MA Experiment 108522 PARAMETER Experiment Name: Zm_42deg_Heat_P Parameter: Plant Line Value: 35A19
  misc_feature: MA Experiment 108522 PARAMETER Experiment Name: Zm_42deg_Heat_P Parameter: Temperature (deg C) Value: 42 vs. 22
  misc_feature: MA Experiment 108522 PARAMETER Experiment Name: Zm_42deg_Heat_P Parameter: Timepoint (hr) Value: 1
  misc_feature: MA Experiment 108522 PARAMETER Experiment Name: Zm_42deg_Heat_P Parameter: Tissue Value: Aerial
  misc_feature: MA Experiment ID: 108536 Result: Down-regulated in Transcription
  misc_feature: MA Experiment 108536 PARAMETER Experiment Name: Zm_Meristem_P Parameter: Age (day) Value: 8
  misc_feature: MA Experiment 108536 PARAMETER Experiment Name: Zm_Meristem_P Parameter: Organism Value: Zea mays
  misc_feature: MA Experiment 108536 PARAMETER Experiment Name: Zm_Meristem_P Parameter: Plant Line Value: 35A19
  misc_feature: MA Experiment 108536 PARAMETER Experiment Name: Zm_Meristem_P Parameter: Tissue Value: Shoot Meristem vs. Above Shoot Meristem
  misc_feature: MA Experiment ID: 108540 Result: Up-regulated in Transcription
  misc_feature: MA Experiment 108540 PARAMETER Experiment Name: Zm_20percent_PEG_P Parameter: Age (day) Value: 8
  misc_feature: MA Experiment 108540 PARAMETER Experiment Name: Zm_20percent_PEG_P Parameter: Organism Value: Zea mays
  misc_feature: MA Experiment 108540 PARAMETER Experiment Name: Zm_20percent_PEG_P Parameter: Plant Line Value: 35A19
  misc_feature: MA Experiment 108540 PARAMETER Experiment Name: Zm_20percent_PEG_P Parameter: Timepoint (hr) Value: 6
  misc_feature: MA Experiment 108540 PARAMETER Experiment Name: Zm_20percent_PEG_P Parameter: Tissue Value: Aerial
  misc_feature: MA Experiment 108540 PARAMETER Experiment Name: Zm_20percent_PEG_P Parameter: Treatment Value: 20percent PEG vs. No Treatment
  misc_feature: MA Experiment ID: 108543 Result: Down-regulated in Transcription
  misc_feature: MA Experiment ID: 108556 Result: Up-regulated in Transcription
  misc_feature: MA Experiment 108556 PARAMETER Experiment Name: Zm_Drought_P Parameter: Age (day) Value: 9
  misc_feature: MA Experiment 108556 PARAMETER Experiment Name: Zm_Drought_P Parameter: Organism Value: Zea mays
  misc_feature: MA Experiment 108556 PARAMETER Experiment Name: Zm_Drought_P Parameter: Plant Line Value: 35A19
  misc_feature: MA Experiment 108556 PARAMETER Experiment Name: Zm_Drought_P Parameter: Timepoint (hr) Value: 24
  misc_feature: MA Experiment 108556 PARAMETER Experiment Name: Zm_Drought_P Parameter: Tissue Value: Aerial
  misc_feature: MA Experiment 108556 PARAMETER Experiment Name: Zm_Drought_P Parameter: Treatment Value: Drought vs. No Drought
  misc_feature: MA Experiment ID: 20000479 Result: Up-regulated in Transcription
  misc_feature: MA Experiment 20000479 PARAMETER Experiment Name: Zm_Drought_P Parameter: Age (day) Value: 10
  misc_feature: MA Experiment 20000479 PARAMETER Experiment Name: Zm_Drought_P Parameter: Organism Value: Zea mays
  misc_feature: MA Experiment 20000479 PARAMETER Experiment Name: Zm_Drought_P Parameter: Plant Line Value: 35A19
  misc_feature: MA Experiment 20000479 PARAMETER Experiment Name: Zm_Drought_P Parameter: Timepoint (hr) Value: 48
  misc_feature: MA Experiment 20000479 PARAMETER Experiment Name: Zm_Drought_P Parameter: Tissue Value: Aerial
  misc_feature: MA Experiment 20000479 PARAMETER Experiment Name: Zm_Drought_P Parameter: Treatment Value: Drought vs. No Drought
  misc_feature: MA Experiment ID: 20000480 Result: Up-regulated in Transcription
  misc_feature: MA Experiment 20000480 PARAMETER Experiment Name: Zm_Drought_P Parameter: Age (day) Value: 11
  misc_feature: MA Experiment 20000480 PARAMETER Experiment Name: Zm_Drought_P Parameter: Organism Value: Zea mays
  misc_feature: MA Experiment 20000480 PARAMETER Experiment Name: Zm_Drought_P Parameter: Plant Line Value: 35A19
  misc_feature: MA Experiment 20000480 PARAMETER Experiment Name: Zm_Drought_P Parameter: Timepoint (hr) Value: 72
  misc_feature: MA Experiment 20000480 PARAMETER Experiment Name: Zm_Drought_P Parameter: Tissue Value: Aerial
  misc_feature: MA Experiment 20000480 PARAMETER Experiment Name: Zm_Drought_P Parameter: Treatment Value: Drought vs. No Drought
aagcgcccaaggcagcggagagagctagctccctcctcctcctcaggtagcgagcgagcgagcgagcgagctcctctgcccctctgcacacctggcctccccttctccgctgcaggaccgccgttgacgactgctccaccagtactgcgcgcgcccgcgctgcctacccttacctagccagagcgcggcgcgcgagagggagaacgaccaggaggggaggagatcgatcgatcgatcgatcgagatagatggctttcctcaacatggagcagcagacctgggccttcaccttcggtatcctaggtaacataatctcgctgatggtgttcctttcgccgctgccgacgttctaccgcgtgtaccgcaagaagtcgacggaggggttccagtcgaccccgtacgtggtgacgctgttcagctgcatgctgtggatcttctacgcgctgctcaagtccggcgccgagctgctggtgaccatcaacggcgtcgggtgcgtgatcgaggcggcgtacctggcgacgtacctggtgtacgcgcccaaggccgccagggcgctgacggccaagatgctgctgggctcaacgtcggcgtcttcggcctcgccgcgctcgccaccatggtggtctccagcgccggcctccgcgtgcgcgtgctcggatggatctgcgtcagcgtcgcgctcagcgtattcgccgcgccgctcagcatcatgcggcaggtggtccggaccaagagcgtggagttcatgcccttctcgctctccttcttcctggtgctgagcgccgtgatctggttcgcgtacggcgcgctgaagagggacgtgttcgtggcgttccccaacgtgctgggcttcgtcttcggcgtcgcgcagatggcgctgtacatggcgtacaggaacaaggagcccgcggcggcggcggcggcgatagcggtgacggtggatcaggaggcgaagctgccggagcacgccaaggaggtggtggtggccgaggccagggcgagctgcggtgccgaggtgcaccccatcgacatcgatatcgaagctacgccgacgccggtcgaggaggtgcacgagccgcaggtggtcgtggtcgtggtcgtcgacgtggagcctgtcacctgcgccggcgccgccgaggcagatgcgtccggcgttgccgacggcggcgtccctggacccatggcgccgccggagcagctggcgatcaagcccgacatggccatttccgtggaggcgtaggttggttaaagtgtgatagcagagtgagtcgatatcgatcagtagtaggtttgtcgagtcgcctgctgctgctgctacgcgacagcagcggccagatgtactgcctgcatgcatgcagtccctcccgttgactcgacccgtagagatgggatgggatggaagtagccgggcccttgggcgagtagcggcgccttgggttggcacccacgggccagccgtactggcctgtgtgatgaaccggcgagagaaagagatgagataatgtgcgagcgagagagaaggttgggttgtggtagactggtagttgaagaagacggctagctagctagatgctgctgggctctctatctgtctctagatctgtgtgtgtctgtgtaatcgaggattccctcaccttgcttgccgcctcccttttgtgtccttctagtctgatgattgttttcattccatccatgccggcgtcgcagtaataaaaaaaaaattggaatggacgggttcactg

SEQ ID NO: 15960 - protein, 237 aa, Zea mays subsp. mays
  peptide (1)..(237): Ceres Seq. ID no. 12356992
  misc_feature (72)..(195): Homolog of NCBI NO: 11359643 NR Description: related to glycine-rich cell wall structural
  misc_feature (66)..(158): Homolog of NCBI NO: 17544466 NR Description: U2 snRNP auxiliary factor (30.9 kD)
  misc_feature (69)..(151): Homolog of NCBI NO: 15235002 NR Description: glycine-rich RNA-binding protein 8 (GRP8)
  misc_feature (73)..(186): Homolog of NCBI NO: 9453859 NR Description: EBNA-1 [Cynomolgus Epstein-Barr Virus Si-IIA]
  misc_feature (73)..(186): Homolog of NCBI NO: 9453857 NR Description: EBNA-1 [Cynomolgus Epstein-Barr Virus TsB-B6]
  misc_feature (1)..(215): Homolog of NCBI NO: 29830954 NR Description: putative GntR-family transcriptional regulator
MDLRQRRAQRIRRAAQHHAAGGPDQERGVHALLALLLPGAERRDLVRVRRAEEGRVRGVPQRAGLRLRRRADGAVHGVQEQGARGGGGGDSGDGGSGGEAAGARQGGGGGRGQGELRCRGAPHRHRYRSYADAGRGGARAAGGRGRGRRRGACHLRRRRRGRCVRRCRRRRPWTHGAAGAAGDQARHGHFRGGVGWLKCDSRVSRYRSVVGLSSRLLLLLRDSSGQMYCLHACSPSR

SEQ ID NO: 15961 - protein, 207 aa, Zea mays subsp. mays
  peptide (1)..(207): Ceres Seq. ID no. 12356993
  misc_feature (1)..(99): Homolog of NCBI NO: 15241278 NR Description: MtN3-like protein
  misc_feature (1)..(99): Homolog of NCBI NO: 21593109 NR Description: MtN3-like protein [Arabidopsis thaliana]
  misc_feature (1)..(144): Homolog of NCBI NO: 15241265 NR Description: MtN3-like protein
  misc_feature (1)..(96): Homolog of NCBI NO: 11345413 NR Description: NEC1 [Petunia x hybrida]
  misc_feature (1)..(122): Homolog of NCBI NO: 15237803 NR Description: MtN3-like protein
  misc_feature (1)..(116): Homolog of NCBI NO: 15229019 NR Description: MTN3-like protein
  misc_feature (1)..(178): Homolog of NCBI NO: 15240040 NR Description: senescence-associated protein (SAG29)
  misc_feature (1)..(101): Homolog of NCBI NO: 14715258 NR Description: N3 like protein [Medicago truncatula]
  misc_feature (1)..(178): Homolog of NCBI NO: 21593422 NR Description: senescence-associated protein (SAG29)
  misc_feature (1)..(94): Homolog of NCBI NO: 1619602 NR Description: MtN3 [Medicago truncatula]
MVVSSAGLRVRVLGWICVSVALSVFAAPLSIMRQVVRTKSVEFMPFSLSFFLVLSAVIWFAYGALKRDVFVAFPNVLGFVFGVAQMALYMAYRNKEPAAAAAAIAVTVDQEAKLPEHAKEVVVAEARASCGAEVHPIDIDIEATPTPVEEVHEPQVVVVVVVDVEPVTCAGAAEADASGVADGGVPGPMAPPEQLAIKPDMAISVEA

SEQ ID NO: 15962 - protein, 176 aa, Zea mays subsp. mays
  peptide (1)..(176): Ceres Seq. ID no. 12356994
  misc_feature (13)..(100): Pfam Name: MtN3/saliva family Pfam Description: MtN3/saliva family
  misc_feature (11)..(108): Homolog of NCBI NO: 15241278 NR Description: MtN3-like protein
  misc_feature (11)..(108): Homolog of NCBI NO: 21593109 NR Description: MtN3-like protein [Arabidopsis thaliana]
  misc_feature (6)..(109): Homolog of NCBI NO: 15241265 NR Description: MtN3-like protein
  misc_feature (12)..(109): Homolog of NCBI NO: 11345413 NR Description: NEC1 [Petunia x hybrida]
  misc_feature (10)..(109): Homolog of NCBI NO: 15237803 NR Description: MtN3-like protein
  misc_feature (1)..(109): Homolog of NCBI NO: 15229019 NR Description: MTN3-like protein
  misc_feature (12)..(114): Homolog of NCBI NO: 15240040 NR Description: senescence-associated protein (SAG29)
  misc_feature (6)..(109): Homolog of NCBI NO: 14715258 NR Description: N3 like protein [Medicago truncatula]
  misc_feature (12)..(114): Homolog of NCBI NO: 21593422 NR Description: senescence-associated protein (SAG29)
  misc_feature (6)..(117): Homolog of NCBI NO: 1619602 NR Description: MtN3 [Medicago truncatula]
MAFLNMEQQTWAFTFGILGNIISLMVFLSPLPTFYRVYRKKSTEGFQSTPYVVTLFSCMLWIFYALLKSGAELLVTINGVGCVIEAAYLATYLVYAPKAARALTAKMLLGSTSASSASPRSPPWWSPAPASACACSDGSASASRSAYSPRRSASCGRWSGPRAWSSCPSRSPSSWC

SEQ ID NO: 15963 - DNA, 1472 bp, Zea mays subsp. mays
  misc_feature (1)..(1472): Ceres Seq. ID no. 12405326
  misc_feature: MA Experiment ID: 108528 Result: Down-regulated in Transcription
  misc_feature: MA Experiment 108528 PARAMETER Experiment Name: Zm_Imbibed_Seeds_P Parameter: Age (day) Value: 5 vs. 2
  misc_feature: MA Experiment 108528 PARAMETER Experiment Name: Zm_Imbibed_Seeds_P Parameter: Organism Value: Zea mays
  misc_feature: MA Experiment 108528 PARAMETER Experiment Name: Zm_Imbibed_Seeds_P Parameter: Plant Line Value: 35A19
  misc_feature: MA Experiment 108528 PARAMETER Experiment Name: Zm_Imbibed_Seeds_P Parameter: Tissue Value: Aerial vs. Embryo
  misc_feature: MA Experiment ID: 108530 Result: Down-regulated in Transcription
  misc_feature: MA Experiment 108530 PARAMETER Experiment Name: Zm_Imbibed_Seeds_P Parameter: Age (day) Value: 6 vs. 2
  misc_feature: MA Experiment 108530 PARAMETER Experiment Name: Zm_Imbibed_Seeds_P Parameter: Organism Value: Zea mays
  misc_feature: MA Experiment 108530 PARAMETER Experiment Name: Zm_Imbibed_Seeds_P Parameter: Plant Line Value: 35A19
  misc_feature: MA Experiment 108530 PARAMETER Experiment Name: Zm_Imbibed_Seeds_P Parameter: Tissue Value: Aerial vs. Embryo
  misc_feature: MA Experiment ID: 108535 Result: Up-regulated in Transcription
  misc_feature: MA Experiment 108535 PARAMETER Experiment Name: Zm_Meristem_P Parameter: Age (day) Value: 8
  misc_feature: MA Experiment 108535 PARAMETER Experiment Name: Zm_Meristem_P Parameter: Organism Value: Zea mays
  misc_feature: MA Experiment 108535 PARAMETER Experiment Name: Zm_Meristem_P Parameter: Plant Line Value: 35A19
  misc_feature: MA Experiment 108535 PARAMETER Experiment Name: Zm_Meristem_P Parameter: Tissue Value: Root Meristem vs. Above Root Meristem
  misc_feature: MA Experiment ID: 108543 Result: Up-regulated in Transcription
  misc_feature: MA Experiment ID: 108545 Result: Down-regulated in Transcription
  misc_feature: MA Experiment 108545 PARAMETER Experiment Name: Zm_Imbibed_Seeds_P Parameter: Age (day) Value: 3 vs. 2
  misc_feature: MA Experiment 108545 PARAMETER Experiment Name: Zm_Imbibed_Seeds_P Parameter: Organism Value: Zea mays
  misc_feature: MA Experiment 108545 PARAMETER Experiment Name: Zm_Imbibed_Seeds_P Parameter: Plant Line Value: 35A19
  misc_feature: MA Experiment 108545 PARAMETER Experiment Name: Zm_Imbibed_Seeds_P Parameter: Tissue Value: Aerial vs. Embryo
  misc_feature: MA Experiment ID: 108547 Result: Down-regulated in Transcription
  misc_feature: MA Experiment 108547 PARAMETER Experiment Name: Zm_Imbibed_Seeds_P Parameter: Age (day) Value: 4 vs. 2
  misc_feature: MA Experiment 108547 PARAMETER Experiment Name: Zm_Imbibed_Seeds_P Parameter: Organism Value: Zea mays
  misc_feature: MA Experiment 108547 PARAMETER Experiment Name: Zm_Imbibed_Seeds_P Parameter: Plant Line Value: 35A19
  misc_feature: MA Experiment 108547 PARAMETER Experiment Name: Zm_Imbibed_Seeds_P Parameter: Tissue Value: Aerial vs. Embryo
  misc_feature: MA Experiment ID: 108689 Result: Down-regulated in Transcription
  misc_feature: MA Experiment 108689 PARAMETER Experiment Name: Zm_Drought_Roots_P Parameter: Age (day) Value: 9
  misc_feature: MA Experiment 108689 PARAMETER Experiment Name: Zm_Drought_Roots_P Parameter: Organism Value: Zea mays
  misc_feature: MA Experiment 108689 PARAMETER Experiment Name: Zm_Drought_Roots_P Parameter: Plant Line Value: 35A19
  misc_feature: MA Experiment 108689 PARAMETER Experiment Name: Zm_Drought_Roots_P Parameter: Timepoint (hr) Value: 24
  misc_feature: MA Experiment 108689 PARAMETER Experiment Name: Zm_Drought_Roots_P Parameter: Tissue Value: Roots
  misc_feature: MA Experiment 108689 PARAMETER Experiment Name: Zm_Drought_Roots_P Parameter: Treatment Value: Drought vs. No Drought
  misc_feature: MA Experiment ID: 20000480 Result: Down-regulated in Transcription
  misc_feature: MA Experiment 20000480 PARAMETER Experiment Name: Zm_Drought_P Parameter: Age (day) Value: 11
  misc_feature: MA Experiment 20000480 PARAMETER Experiment Name: Zm_Drought_P Parameter: Organism Value: Zea mays
  misc_feature: MA Experiment 20000480 PARAMETER Experiment Name: Zm_Drought_P Parameter: Plant Line Value: 35A19
  misc_feature: MA Experiment 20000480 PARAMETER Experiment Name: Zm_Drought_P Parameter: Timepoint (hr) Value: 72
  misc_feature: MA Experiment 20000480 PARAMETER Experiment Name: Zm_Drought_P Parameter: Tissue Value: Aerial
  misc_feature: MA Experiment 20000480 PARAMETER Experiment Name: Zm_Drought_P Parameter: Treatment Value: Drought vs. No Drought
  misc_feature: MA Experiment ID: 20000488 Result: Down-regulated in Transcription
  misc_feature: MA Experiment 20000488 PARAMETER Experiment Name: Zm_50mM_NH4NO3_L_to_H_P Parameter: Organism Value: Zea mays
  misc_feature: MA Experiment 20000488 PARAMETER Experiment Name: Zm_50mM_NH4NO3_L_to_H_P Parameter: Timepoint (hr) Value: 8
  misc_feature: MA Experiment 20000488 PARAMETER Experiment Name: Zm_50mM_NH4NO3_L_to_H_P Parameter: Tissue Value: Leaves
  misc_feature: MA Experiment 20000488 PARAMETER Experiment Name: Zm_50mM_NH4NO3_L_to_H_P Parameter: Treatment Value: 50mM NH4NO3 vs. 100mM Mannitol
  misc_feature: MA Experiment ID: 20000630 Result: Up-regulated in Transcription
  misc_feature: MA Experiment 20000630 PARAMETER Experiment Name: Zm_Herbicide-Treatments_P Parameter: Timepoint (hr) Value: 4
  misc_feature: MA Experiment 20000630 PARAMETER Experiment Name: Zm_Herbicide-Treatments_P Parameter: Tissue Value: Aerial
  misc_feature: MA Experiment 20000630 PARAMETER Experiment Name: Zm_Herbicide-Treatments_P Parameter: Treatment Value: Roundup vs. No Treatment
aatgcttcgaaaattgtgtcatcccacaccgtgttcacctcctcacacggtctagagtcaagtcaactcactctcctagtcttcgatccagatcccatcgggttggactgtgtacactcttaaaacttcatcagctcccgagcaatctcagcccgtacatcaggttcttggatctctcccgagctgggatccgtcaagttttctgctccagcggcgacaattcgtcaggaatggccaacaagccgagtcttctgagcactctgccgactaacccaccagcacagtttctgaaagatatcacggacggcttctctgaaactcaaatgcttggtgaaggtgcatttggaactgtttacaagggcattctgcaagatgggcagccaattgcggtgaagaagcttgcagagaatgcgccggtggcacctgagaagcagttcaagattggggttgggaacccttatggccatgcagcatccgaatatagtcaggatactcggctactgccgtgaaccgcaaaggaaagtgattgagcagagtggaagatacattattgtagacgtggttgagagcttactgtactatgaatacgttcctaatggaaaccttgaaaagtatatttccgatgcatcagcttctagacctgattggaagacatgcttcgagataatcaagggcatctgccagggcttacgttacctacataaggaaatggataggccaattgttcatttggatcttcatcctaccaacatattgttggatgagaacatggtgccgaaaatcacggatttcggcctgtccagactctttggtgaagaacaaaccagaataaacacaattaatgttgtgggaaagaaagggtacatggctccagaatatctatataggggtgaaatttcaacccggtcagatatatatagcttaggtctagtaatcatggagattataacaggcaagaacagttcttcaagcgacaaagatatgtctgcaagggactttgtagataaaggtgcgtgagacgtggacagatgagcacatagcatccaagcactcagcactagatgcagtcagcctccaggaagtaagaacatgcattgaaattgggctaaaatgtgtggatattgatcagaacaagagaccttctatagttgaaattgttgacaagctcaatggaaggcatgctcactgaatgatgaactcctgcatactatacatgcaagtgaaaattatgttgcggacccatggagatttgctctagatggaatcatggacaaaataattgtatgtgttaccgattatgtacttttgaataatgtgttcctcgtgttgtgtcactttttcaggagttccttgatttgtcattgtgtttttctttcttttgacacaaatctgcatgcataacctgttgaaaaattgtgtgcatactagttatttgttttttctcatgttatgtgaatactatttttttacct

SEQ ID NO: 15964 - protein, 202 aa, Zea mays subsp. mays
  peptide (1)..(202): Ceres Seq. ID no. 12405327
  misc_feature (20)..(191): Homolog of NCBI NO: 15220353 NR Description: serine/threonine kinase, putative; protein id:
  misc_feature (20)..(191): Homolog of NCBI NO: 4008010 NR Description: receptor-like protein kinase [Arabidopsis
  misc_feature (17)..(200): Homolog of NCBI NO: 21728344 NR Description: stem rust resistance protein Rpg1
  misc_feature (17)..(200): Homolog of NCBI NO: 21929729 NR Description: barley stem rust resistance protein
  misc_feature (17)..(200): Homolog of NCBI NO: 21929723 NR Description: barley stem rust resistance protein
  misc_feature (14)..(199): Homolog of NCBI NO: 21929723 NR Description: barley stem rust resistance protein
  misc_feature (14)..(199): Homolog of NCBI NO: 21728344 NR Description: stem rust resistance protein Rpg1
  misc_feature (14)..(199): Homolog of NCBI NO: 21929729 NR Description: barley stem rust resistance protein
  misc_feature (59)..(198): Homolog of NCBI NO: 37532178 NR Description: putative receptor-like protein kinase
  misc_feature (17)..(199): Homolog of NCBI NO: 38344521 NR Description: OSJNBa0016N04.14 [Oryza sativa (japonica
MRRWHLRSSSRLGLGTLMAMQHPNIVRILGYCREPQRKVIEQSGRYIIVDVVESLLYYEYVPNGNLEKYISDASASRPDWKTCFEIIKGICQGLRYLHKEMDRPIVHLDLHPTNILLDENMVPKITDFGLSRLFGEEQTRINTINVVGKKGYMAPEYLYRGEISTRSDIYSLGLVIMEIITGKNSSSSDKDMSARDFVDKGA

SEQ ID NO: 15965 - protein, 185 aa, Zea mays subsp. mays
  peptide (1)..(185): Ceres Seq. ID no. 12405328
  misc_feature (1)..(182): Homolog of NCBI NO: 21929729 NR Description: barley stem rust resistance protein
  misc_feature (42)..(181): Homolog of NCBI NO: 37532178 NR Description: putative receptor-like protein kinase
  misc_feature (1)..(182): Homolog of NCBI NO: 38344521 NR Description: OSJNBa0016N04.14 [Oryza sativa (japonica
  misc_feature (3)..(174): Homolog of NCBI NO: 15220353 NR Description: serine/threonine kinase, putative; protein id:
  misc_feature (3)..(174): Homolog of NCBI NO: 4008010 NR Description: receptor-like protein kinase [Arabidopsis
  misc_feature (1)..(183): Homolog of NCBI NO: 21728344 NR Description: stem rust resistance protein Rpg1
  misc_feature (1)..(183): Homolog of NCBI NO: 21929729 NR Description: barley stem rust resistance protein
  misc_feature (1)..(183): Homolog of NCBI NO: 21929723 NR Description: barley stem rust resistance protein
  misc_feature (1)..(182): Homolog of NCBI NO: 21929723 NR Description: barley stem rust resistance protein
  misc_feature (1)..(182): Homolog of NCBI NO: 21728344 NR Description: stem rust resistance protein Rpg1
MAMQHPNIVRILGYCREPQRKVIEQSGRYIIVDVVESLLYYEYVPNGNLEKYISDASASRPDWKTCFEIIKGICQGLRYLHKEMDRPIVHLDLHPTNILLDENMVPKITDFGLSRLFGEEQTRINTINVVGKKGYMAPEYLYRGEISTRSDIYSLGLVIMEIITGKNSSSSDKDMSARDFVDKGA

SEQ ID NO: 15966 - protein, 183 aa, Zea mays subsp. mays
  peptide (1)..(183): Ceres Seq. ID no. 12405329
  misc_feature (1)..(172): Homolog of NCBI NO: 15220353 NR Description: serine/threonine kinase, putative; protein id:
  misc_feature (1)..(172): Homolog of NCBI NO: 4008010 NR Description: receptor-like protein kinase [Arabidopsis
  misc_feature (1)..(181): Homolog of NCBI NO: 21728344 NR Description: stem rust resistance protein Rpg1
  misc_feature (1)..(181): Homolog of NCBI NO: 21929729 NR Description: barley stem rust resistance protein
  misc_feature (1)..(181): Homolog of NCBI NO: 21929723 NR Description: barley stem rust resistance protein
  misc_feature (1)..(180): Homolog of NCBI NO: 21929723 NR Description: barley stem rust resistance protein
  misc_feature (1)..(180): Homolog of NCBI NO: 21728344 NR Description: stem rust resistance protein Rpg1
  misc_feature (1)..(180): Homolog of NCBI NO: 21929729 NR Description: barley stem rust resistance protein
  misc_feature (40)..(179): Homolog of NCBI NO: 37532178 NR Description: putative receptor-like protein kinase
  misc_feature (1)..(180): Homolog of NCBI NO: 38344521 NR Description: OSJNBa0016N04.14 [Oryza sativa (japonica
MQHPNIVRILGYCREPQRKVIEQSGRYIIVDVVESLLYYEYVPNGNLEKYISDASASRPDWKTCFEIIKGICQGLRYLHKEMDRPIVHLDLHPTNILLDENMVPKITDFGLSRLFGEEQTRINTINVVGKKGYMAPEYLYRGEISTRSDIYSLGLVIMEIITGKNSSSSDKDMSARDFVDKGA

SEQ ID NO: 15967 - DNA, 764 bp, Zea mays subsp. mays
  misc_feature (1)..(764): Ceres Seq. ID no. 12406736
  misc_feature: MA Experiment ID: 108527 Result: Up-regulated in Transcription
  misc_feature: MA Experiment 108527 PARAMETER Experiment Name: Zm_5mM_NO_P Parameter: Age (day) Value: 8
  misc_feature: MA Experiment 108527 PARAMETER Experiment Name: Zm_5mM_NO_P Parameter: Organism Value: Zea mays
  misc_feature: MA Experiment 108527 PARAMETER Experiment Name: Zm_5mM_NO_P Parameter: Plant Line Value: 35A19
  misc_feature: MA Experiment 108527 PARAMETER Experiment Name: Zm_5mM_NO_P Parameter: Timepoint (hr) Value: 6
  misc_feature: MA Experiment 108527 PARAMETER Experiment Name: Zm_5mM_NO_P Parameter: Tissue Value: Aerial
  misc_feature: MA Experiment 108527 PARAMETER Experiment Name: Zm_5mM_NO_P Parameter: Treatment Value: 5mM NO vs. No Treatment
  misc_feature: MA Experiment ID: 108559 Result: Up-regulated in Transcription
  misc_feature: MA Experiment 108559 PARAMETER Experiment Name: Zm_5mM_NO_P Parameter: Age (day) Value: 8
  misc_feature: MA Experiment 108559 PARAMETER Experiment Name: Zm_5mM_NO_P Parameter: Organism Value: Zea mays
  misc_feature: MA Experiment 108559 PARAMETER Experiment Name: Zm_5mM_NO_P Parameter: Plant Line Value: 35A19
  misc_feature: MA Experiment 108559 PARAMETER Experiment Name: Zm_5mM_NO_P Parameter: Timepoint (hr) Value: 12
  misc_feature: MA Experiment 108559 PARAMETER Experiment Name: Zm_5mM_NO_P Parameter: Tissue Value: Aerial
  misc_feature: MA Experiment 108559 PARAMETER Experiment Name: Zm_5mM_NO_P Parameter: Treatment Value: 5mM NO vs. No Treatment
  misc_feature: MA Experiment ID: 20000478 Result: Up-regulated in Transcription
  misc_feature: MA Experiment 20000478 PARAMETER Experiment Name: Zm_5mM_SA_P Parameter: Age (day) Value: 11
  misc_feature: MA Experiment 20000478 PARAMETER Experiment Name: Zm_5mM_SA_P Parameter: Organism Value: Zea mays
  misc_feature: MA Experiment 20000478 PARAMETER Experiment Name: Zm_5mM_SA_P Parameter: Plant Line Value: 35A19
  misc_feature: MA Experiment 20000478 PARAMETER Experiment Name: Zm_5mM_SA_P Parameter: Timepoint (hr) Value: 72
  misc_feature: MA Experiment 20000478 PARAMETER Experiment Name: Zm_5mM_SA_P Parameter: Tissue Value: Aerial
  misc_feature: MA Experiment 20000478 PARAMETER Experiment Name: Zm_5mM_SA_P Parameter: Treatment Value: 5mM SA vs. No Treatment
cttgcccggtctccgccttttcggagaccgcacccaatggccggctcaaccaaggtgctggccgccatcctgctcgtcgacctcgtcgccttcggcctcgccatcggcgcggtgcagagccgcccctcggcgaggctggagacggacgagaggcaggagtggacctactgcgtgtaccgcacggacgccgccacggcgctgggtggcgccgcgctcgcgctggtgttcgtgggacaggcggtggccgccgccgccagtcgctgcttctgctgcgggtccgtgctgcggcccggcggcgccagggcctgcgcgctcgtcctcttcatctcctcctgggtgacattcgtcatcgctgaggcgtgcttgctagctggtcttttgcaatccgcctaccacactggctaccggaaggtgtttttccagaacccgccggactgcgagacggtgcggaggggcacgttcggagccggcgctgcttttgcccttttcacctgcgtgctcacctcggcctactactactgcttctccaaggcgcggatctactaccaccgcccggaagccgccatcggcatgactccgttgtaaacagatttaccggtctctctgcagtaacagttttgatagcaactatatatgtctgttaggtttttgcatatattatgttgggctggtatgtgacagtttttcaggaccatgtatctgactgagttgaactcaatgaaatatgatggctgctggtgctggaccggctcatccttagttcc

SEQ ID NO: 15968 - protein, 194 aa, Zea mays subsp. mays
  peptide (1)..(194): Ceres Seq. ID no. 12406737
  misc_feature (16)..(178): Homolog of NCBI NO: 18391509 NR Description: expressed protein
  misc_feature (19)..(190): Homolog of NCBI NO: 38344206 NR Description: OSJNBa0064G10.22 [Oryza sativa (japonica
  misc_feature (16)..(194): Homolog of NCBI NO: 21554630 NR Description: unknown [Arabidopsis thaliana]
  misc_feature (16)..(194): Homolog of NCBI NO: 18407003 NR Description: Expressed protein
  misc_feature (16)..(178): Homolog of NCBI NO: 18416991 NR Description: Expressed protein
  misc_feature (16)..(191): Homolog of NCBI NO: 38016521 NR Description: fiber protein Fb34 [Gossypium barbadense]
  misc_feature (16)..(185): Homolog of NCBI NO: 18404242 NR Description: expressed protein
  misc_feature (19)..(179): Homolog of NCBI NO: 34394069 NR Description: unknown protein [Oryza sativa (japonica
  misc_feature (16)..(185): Homolog of NCBI NO: 18400781 NR Description: expressed protein
  misc_feature (13)..(193): Homolog of NCBI NO: 22748411 NR Description: hypothetical protein [Oryza sativa (japonica
LARSPPFRRPHPMAGSTKVLAAILLVDLVAFGLAIGAVQSRPSARLETDERQEWTYCVYRTDAATALGGAALALVFVGQAVAAAASRCFCCGSVLRPGGARACALVLFISSWVTFVIAEACLLAGLLQSAYHTGYRKVFFQNPPDCETVRRGTFGAGAAFALFTCVLTSAYYYCFSKARIYYHRPEAAIGMTPL

SEQ ID NO: 15969 - protein, 182 aa, Zea mays subsp. mays
  peptide (1)..(182): Ceres Seq. ID no. 12406738
  misc_feature (4)..(166): Homolog of NCBI NO: 18391509 NR Description: expressed protein
  misc_feature (7)..(178): Homolog of NCBI NO: 38344206 NR Description: OSJNBa0064G10.22 [Oryza sativa (japonica
  misc_feature (4)..(182): Homolog of NCBI NO: 21554630 NR Description: unknown [Arabidopsis thaliana]
  misc_feature (4)..(182): Homolog of NCBI NO: 18407003 NR Description: Expressed protein
  misc_feature (4)..(166): Homolog of NCBI NO: 18416991 NR Description: Expressed protein
  misc_feature (4)..(179): Homolog of NCBI NO: 38016521 NR Description: fiber protein Fb34 [Gossypium barbadense]
  misc_feature (4)..(173): Homolog of NCBI NO: 18404242 NR Description: expressed protein
  misc_feature (7)..(167): Homolog of NCBI NO: 34394069 NR Description: unknown protein [Oryza sativa (japonica
  misc_feature (4)..(173): Homolog of NCBI NO: 18400781 NR Description: expressed protein
  misc_feature (1)..(181): Homolog of NCBI NO: 22748411 NR Description: hypothetical protein [Oryza sativa (japonica
MAGSTKVLAAILLVDLVAFGLAIGAVQSRPSARLETDERQEWTYCVYRTDAATALGGAALALVFVGQAVAAAASRCFCCGSVLRPGGARACALVLFISSWVTFVIAEACLLAGLLQSAYHTGYRKVFFQNPPDCETVRRGTFGAGAAFALFTCVLTSAYYYCFSKARIYYHRPEAAIGMTPL

SEQ ID NO: 15970 - protein, 117 aa, Zea mays subsp. mays
  peptide (1)..(117): Ceres Seq. ID no. 12406739
CPVSAFSETAPNGRLNQGAGRHPARRPRRLRPRHRRGAEPPLGEAGDGREAGVDLLRVPHGRRHGAGWRRARAGVRGTGGGRRRQSLLLLRVRAAARRRQGLRARPLHLLLGDIRHR

SEQ ID NO: 15971 - DNA, 478 bp, Zea mays subsp. mays
  misc_feature (1)..(478): Ceres Seq. ID no. 12578891
  misc_feature: MA Experiment ID: 108528 Result: Down-regulated in Transcription
  misc_feature: MA Experiment 108528 PARAMETER Experiment Name: Zm_Imbibed_Seeds_P Parameter: Age (day) Value: 5 vs. 2
  misc_feature: MA Experiment 108528 PARAMETER Experiment Name: Zm_Imbibed_Seeds_P Parameter: Organism Value: Zea mays
  misc_feature: MA Experiment 108528 PARAMETER Experiment Name: Zm_Imbibed_Seeds_P Parameter: Plant Line Value: 35A19
  misc_feature: MA Experiment 108528 PARAMETER Experiment Name: Zm_Imbibed_Seeds_P Parameter: Tissue Value: Aerial vs. Embryo
  misc_feature: MA Experiment ID: 108529 Result: Down-regulated in Transcription
  misc_feature: MA Experiment 108529 PARAMETER Experiment Name: Zm_Imbibed_Seeds_P Parameter: Age (day) Value: 5 vs. 2
  misc_feature: MA Experiment 108529 PARAMETER Experiment Name: Zm_Imbibed_Seeds_P Parameter: Organism Value: Zea mays
  misc_feature: MA Experiment 108529 PARAMETER Experiment Name: Zm_Imbibed_Seeds_P Parameter: Plant Line Value: 35A19
  misc_feature: MA Experiment 108529 PARAMETER Experiment Name: Zm_Imbibed_Seeds_P Parameter: Tissue Value: Roots vs. Embryo
  misc_feature: MA Experiment ID: 108530 Result: Down-regulated in Transcription
  misc_feature: MA Experiment 108530 PARAMETER Experiment Name: Zm_Imbibed_Seeds_P Parameter: Age (day) Value: 6 vs. 2
  misc_feature: MA Experiment 108530 PARAMETER Experiment Name: Zm_Imbibed_Seeds_P Parameter: Organism Value: Zea mays
  misc_feature: MA Experiment 108530 PARAMETER Experiment Name: Zm_Imbibed_Seeds_P Parameter: Plant Line Value: 35A19
  misc_feature: MA Experiment 108530 PARAMETER Experiment Name: Zm_Imbibed_Seeds_P Parameter: Tissue Value: Aerial vs. Embryo
  misc_feature: MA Experiment ID: 108543 Result: Up-regulated in Transcription
  misc_feature: MA Experiment ID: 108545 Result: Down-regulated in Transcription
  misc_feature: MA Experiment 108545 PARAMETER Experiment Name: Zm_Imbibed_Seeds_P Parameter: Age (day) Value: 3 vs. 2
  misc_feature: MA Experiment 108545 PARAMETER Experiment Name: Zm_Imbibed_Seeds_P Parameter: Organism Value: Zea mays
  misc_feature: MA Experiment 108545 PARAMETER Experiment Name: Zm_Imbibed_Seeds_P Parameter: Plant Line Value: 35A19
  misc_feature: MA Experiment 108545 PARAMETER Experiment Name: Zm_Imbibed_Seeds_P Parameter: Tissue Value: Aerial vs. Embryo
  misc_feature: MA Experiment ID: 108547 Result: Down-regulated in Transcription
  misc_feature: MA Experiment 108547 PARAMETER Experiment Name: Zm_Imbibed_Seeds_P Parameter: Age (day) Value: 4 vs. 2
  misc_feature: MA Experiment 108547 PARAMETER Experiment Name: Zm_Imbibed_Seeds_P Parameter: Organism Value: Zea mays
  misc_feature: MA Experiment 108547 PARAMETER Experiment Name: Zm_Imbibed_Seeds_P Parameter: Plant Line Value: 35A19
  misc_feature: MA Experiment 108547 PARAMETER Experiment Name: Zm_Imbibed_Seeds_P Parameter: Tissue Value: Aerial vs. Embryo
  misc_feature: MA Experiment ID: 108689 Result: Down-regulated in Transcription
  misc_feature: MA Experiment 108689 PARAMETER Experiment Name: Zm_Drought_Roots_P Parameter: Age (day) Value: 9
  misc_feature: MA Experiment 108689 PARAMETER Experiment Name: Zm_Drought_Roots_P Parameter: Organism Value: Zea mays
  misc_feature: MA Experiment 108689 PARAMETER Experiment Name: Zm_Drought_Roots_P Parameter: Plant Line Value: 35A19
  misc_feature: MA Experiment 108689 PARAMETER Experiment Name: Zm_Drought_Roots_P Parameter: Timepoint (hr) Value: 24
  misc_feature: MA Experiment 108689 PARAMETER Experiment Name: Zm_Drought_Roots_P Parameter: Tissue Value: Roots
  misc_feature: MA Experiment 108689 PARAMETER Experiment Name: Zm_Drought_Roots_P Parameter: Treatment Value: Drought vs. No Drought
atcccaaagagcaagagcacgcagtagtgcagcagcactgaagcactacttcctgcactcactgtgctagctgctcaaaccgtagtagtaacagtccatcaccayaccayaccaccaatggctcccaaggttgcgctcttccttgccctaagcctcctgttcgctgccaccgcgcatggctgcgaaccctactgttccggcccagtcgtcccaacaccaccagtcgtgccgactccgtcgtcgcatagccacgggcgctgcccgatcgacgcgctcaagctcaaggtgtgcgccaatgtgctgggcctcgtcaaggtcggcctaccgcaatacgagcaatgctgcccattgctggaggggctggtggaccttgacgccgcattgtgcctctgcaccgccatcaaggcaaacgtcctcggcatccacctcaacgtgccccttagcctcaacctcatcctcaacaactgcggcaagattt

SEQ ID NO: 15972 - protein, 120 aa, Zea mays subsp. mays
  peptide (1)..(120): Ceres Seq. ID no. 13580079
  misc_feature (48)..(119): Pfam Name: Protease inhibitor/seed storage/LTP family Pfam Description: Protease inhibitor/seed storage/LTP family
  misc_feature (1)..(119): Homolog of NCBI NO: 37536722 NR Description: putative lipid transfer protein
  misc_feature (1)..(119): Homolog of NCBI NO: 37536718 NR Description: putative lipid transfer protein
  misc_feature (1)..(119): Homolog of NCBI NO: 1084461 NR Description: root-specific protein RCc3 - rice
  misc_feature (1)..(119): Homolog of NCBI NO: 37533212 NR Description: putative lipid transfer protein
  misc_feature (5)..(119): Homolog of NCBI NO: 37536710 NR Description: putative lipid transfer protein
  misc_feature (6)..(119): Homolog of NCBI NO: 39748092 NR Description: lipid transfer protein-like protein
  misc_feature (4)..(119): Homolog of NCBI NO: 37536712 NR Description: putative lipid transfer protein
  misc_feature (4)..(119): Homolog of NCBI NO: 37536704 NR Description: putative lipid transfer protein
  misc_feature (1)..(119): Homolog of NCBI NO: 399204 NR Description: CORTICAL CELL DELINEATING PROTEIN PRECURSOR
  misc_feature (1)..(119): Homolog of NCBI NO: 2226329 NR Description: physical impedance induced protein [Zea mays]
MAPKVALFLALSLLFAATAHGCEPYCSGPVVPTPPVVPTPSSHSHGRCPIDALKLKVCANVLGLVKVGLPQYEQCCPLLEGLVDLDAALCLCTAIKANVLGIHLNVPLSLNLILNNCGKI

SEQ ID NO: 15973 - protein, 101 aa, Zea mays subsp. mays
  peptide (1)..(101): Ceres Seq. ID no. 13580080
MAANPTVPAQSSQHHQSCRLRRRIATGAARSTRSSSRCAPMCWASSRSAYRNTSNAAHCWRGWWTLTPHCASAPPSRQTSSASTSTCPLASTSSSTTAARF

SEQ ID NO: 15974 - protein, 61 aa, Zea mays subsp. mays
  peptide (1)..(61): Ceres Seq. ID no. 13580081
MCWASSRSAYRNTSNAAHCWRGWWTLTPHCASAPPSRQTSSASTSTCPLASTSSSTTAARF

SEQ ID NO: 15975 - DNA, 1732 bp, Zea mays subsp. mays
  misc_feature (1)..(1732): Ceres Seq. ID no. 12566433
  misc_feature: MA Experiment ID: 108522 Result: Down-regulated in Transcription
  misc_feature: MA Experiment 108522 PARAMETER Experiment Name: Zm_42deg_Heat_P Parameter: Age (day) Value: 8
  misc_feature: MA Experiment 108522 PARAMETER Experiment Name: Zm_42deg_Heat_P Parameter: Organism Value: Zea mays
  misc_feature: MA Experiment 108522 PARAMETER Experiment Name: Zm_42deg_Heat_P Parameter: Plant Line Value: 35A19
  misc_feature: MA Experiment 108522 PARAMETER Experiment Name: Zm_42deg_Heat_P Parameter: Temperature (deg C) Value: 42 vs. 22
  misc_feature: MA Experiment 108522 PARAMETER Experiment Name: Zm_42deg_Heat_P Parameter: Timepoint (hr) Value: 1
  misc_feature: MA Experiment 108522 PARAMETER Experiment Name: Zm_42deg_Heat_P Parameter: Tissue Value: Aerial
  misc_feature: MA Experiment ID: 108523 Result: Down-regulated in Transcription
  misc_feature: MA Experiment 108523 PARAMETER Experiment Name: Zm_42deg_Heat_P Parameter: Age (day) Value: 8
  misc_feature: MA Experiment 108523 PARAMETER Experiment Name: Zm_42deg_Heat_P Parameter: Organism Value: Zea mays
  misc_feature: MA Experiment 108523 PARAMETER Experiment Name: Zm_42deg_Heat_P Parameter: Plant Line Value: 35A19
  misc_feature: MA Experiment 108523 PARAMETER Experiment Name: Zm_42deg_Heat_P Parameter: Temperature (deg C) Value: 42 vs. 22
  misc_feature: MA Experiment 108523 PARAMETER Experiment Name: Zm_42deg_Heat_P Parameter: Timepoint (hr) Value: 6
  misc_feature: MA Experiment 108523 PARAMETER Experiment Name: Zm_42deg_Heat_P Parameter: Tissue Value: Aerial
  misc_feature: MA Experiment ID: 108528 Result: Up-regulated in Transcription
  misc_feature: MA Experiment 108528 PARAMETER Experiment Name: Zm_Imbibed_Seeds_P Parameter: Age (day) Value: 5 vs. 2
  misc_feature: MA Experiment 108528 PARAMETER Experiment Name: Zm_Imbibed_Seeds_P Parameter: Organism Value: Zea mays
  misc_feature: MA Experiment 108528 PARAMETER Experiment Name: Zm_Imbibed_Seeds_P Parameter: Plant Line Value: 35A19
  misc_feature: MA Experiment 108528 PARAMETER Experiment Name: Zm_Imbibed_Seeds_P Parameter: Tissue Value: Aerial vs. Embryo
  misc_feature: MA Experiment ID: 108530 Result: Up-regulated in Transcription
  misc_feature: MA Experiment 108530 PARAMETER Experiment Name: Zm_Imbibed_Seeds_P Parameter: Age (day) Value: 6 vs. 2
  misc_feature: MA Experiment 108530 PARAMETER Experiment Name: Zm_Imbibed_Seeds_P Parameter: Organism Value: Zea mays
  misc_feature: MA Experiment 108530 PARAMETER Experiment Name: Zm_Imbibed_Seeds_P Parameter: Plant Line Value: 35A19
  misc_feature: MA Experiment 108530 PARAMETER Experiment Name: Zm_Imbibed_Seeds_P Parameter: Tissue Value: Aerial vs. Embryo
  misc_feature: MA Experiment ID: 108545 Result: Up-regulated in Transcription
  misc_feature: MA Experiment 108545 PARAMETER Experiment Name: Zm_Imbibed_Seeds_P Parameter: Age (day) Value: 3 vs. 2
  misc_feature: MA Experiment 108545 PARAMETER Experiment Name: Zm_Imbibed_Seeds_P Parameter: Organism Value: Zea mays
  misc_feature: MA Experiment 108545 PARAMETER Experiment Name: Zm_Imbibed_Seeds_P Parameter: Plant Line Value: 35A19
  misc_feature: MA Experiment 108545 PARAMETER Experiment Name: Zm_Imbibed_Seeds_P Parameter: Tissue Value: Aerial vs. Embryo
  misc_feature: MA Experiment ID: 108687 Result: Down-regulated in Transcription
  misc_feature: MA Experiment 108687 PARAMETER Experiment Name: Zm_Embryos-Flowers__P Parameter: Tissue Value: Embryo vs. Aerial+
  misc_feature: MA Experiment ID: 108689 Result: Up-regulated in Transcription
  misc_feature: MA Experiment 108689 PARAMETER Experiment Name: Zm_Drought_Roots_P Parameter: Age (day) Value: 9
  misc_feature: MA Experiment 108689 PARAMETER Experiment Name: Zm_Drought_Roots_P Parameter: Organism Value: Zea mays
  misc_feature: MA Experiment 108689 PARAMETER Experiment Name: Zm_Drought_Roots_P Parameter: Plant Line Value: 35A19
  misc_feature: MA Experiment 108689 PARAMETER Experiment Name: Zm_Drought_Roots_P Parameter: Timepoint (hr) Value: 24
  misc_feature: MA Experiment 108689 PARAMETER Experiment Name: Zm_Drought_Roots_P Parameter: Tissue Value: Roots
  misc_feature: MA Experiment 108689 PARAMETER Experiment Name: Zm_Drought_Roots_P Parameter: Treatment Value: Drought vs. No Drought
  misc_feature: MA Experiment ID: 20000477 Result: Down-regulated in Transcription
  misc_feature: MA Experiment 20000477 PARAMETER Experiment Name: Zm_5mM_SA_P Parameter: Age (day) Value: 10
  misc_feature: MA Experiment 20000477 PARAMETER Experiment Name: Zm_5mM_SA_P Parameter: Organism Value: Zea mays
  misc_feature: MA Experiment 20000477 PARAMETER Experiment Name: Zm_5mM_SA_P Parameter: Plant Line Value: 35A19
  misc_feature: MA Experiment 20000477 PARAMETER Experiment Name: Zm_5mM_SA_P Parameter: Timepoint (hr) Value: 48
  misc_feature: MA Experiment 20000477 PARAMETER Experiment Name: Zm_5mM_SA_P Parameter: Tissue Value: Aerial
  misc_feature: MA Experiment 20000477 PARAMETER Experiment Name: Zm_5mM_SA_P Parameter: Treatment Value: 5mM SA vs. No Treatment
  misc_feature: MA Experiment ID: 20000478 Result: Down-regulated in Transcription
  misc_feature: MA Experiment 20000478 PARAMETER Experiment Name: Zm_5mM_SA_P Parameter: Age (day) Value: 11
  misc_feature: MA Experiment 20000478 PARAMETER Experiment Name: Zm_5mM_SA_P Parameter: Organism Value: Zea mays
  misc_feature: MA Experiment 20000478 PARAMETER Experiment Name: Zm_5mM_SA_P Parameter: Plant Line Value: 35A19
  misc_feature: MA Experiment 20000478 PARAMETER Experiment Name: Zm_5mM_SA_P Parameter: Timepoint (hr) Value: 72
  misc_feature: MA Experiment 20000478 PARAMETER Experiment Name: Zm_5mM_SA_P Parameter: Tissue Value: Aerial
  misc_feature: MA Experiment 20000478 PARAMETER Experiment Name: Zm_5mM_SA_P Parameter: Treatment Value: 5mM SA vs. No Treatment
  misc_feature: MA Experiment ID: 20000492 Result: Down-regulated in Transcription
  misc_feature: MA Experiment 20000492 PARAMETER Experiment Name: Zm_Hybrid_Seed_Dev_P Parameter: DAP Value: 12
  misc_feature: MA Experiment 20000492 PARAMETER Experiment Name: Zm_Hybrid_Seed_Dev_P Parameter: Organism Value: Zea mays
  misc_feature: MA Experiment 20000492 PARAMETER Experiment Name: Zm_Hybrid_Seed_Dev_P Parameter: Plant Line Value: 35A19
  misc_feature: MA Experiment 20000492 PARAMETER Experiment Name: Zm_Hybrid_Seed_Dev_P Parameter: Tissue Value: Fert Kernel vs. Unfert Floret
  misc_feature: MA Experiment ID: 20000535 Result: Down-regulated in Transcription
  misc_feature: MA Experiment 20000535 PARAMETER Experiment Name: Zm_Hybrid_Seed_Dev_P Parameter: DAP Value: 30 vs. 12
  misc_feature: MA Experiment 20000535 PARAMETER Experiment Name: Zm_Hybrid_Seed_Dev_P Parameter: Organism Value: Zea mays
  misc_feature: MA Experiment 20000535 PARAMETER Experiment Name: Zm_Hybrid_Seed_Dev_P Parameter: Plant Line Value: 35A19
  misc_feature: MA Experiment 20000535 PARAMETER Experiment Name: Zm_Hybrid_Seed_Dev_P Parameter: Tissue Value: Embryo vs. Unfert Floret
acgtactgctctcctagctagcttagctactaccagctccgatcctgtgctgccgccgccatggagaatccctacacgagcttcttcaacagccatccgcagcaccaccgctactactaccaccccgcgccgccagcgccggcgccagccgcctaccacccctccctgcctttcttcgctgcgcaccgccagccacctgctccgacggcgcccgccccgccctcgccaccgctccgggaagccctgccgctgctctccctggcccccacgcggcatgaggagcgggagcgccgcgcccggccaccggcaccagcgttggaggattctgaagagaaccgggacgagggagaagaagagcaggaggaggaggagggccccaccgcgagcagcaagagcaaccacggccagcaccagcgcctgggagtgggacgacagcgagggttcttcgccgacctgaacgccagcgcggcgggtgacgatgacgacccgatggacgtggaggctgcagccgacggctccggctccgcggcggcgggcgacgacgtgaccgtggcgctgcgcatcggtctgccgctgccgggacctgccgagctggtctcggacctctcctcttccggcggcgcccgcaggcaacagcaccagcacgacggcggcggcggcgaggaggaggaggaggatgaggagggtgacggggagaacggtggcggcggcgaggaggaaggaaccaccgcggcggcgccgctagggttcccgtcctcgccgattgggcggctcaacaaggggcagtactggatcccgacgccgtcgcagatcctcatcggcccgacgcagttctcctgccccgtctgcttcaagaccttcaaccgctacaacaacatgcagatgcacatgtggggtcacgggtcacagtaccgcaagggcccggagtcgctgcggggcatccagccgacggccatgctgcggctgccgtgctactgctgctcgccggggtgccgcaacaacatcgaccacccgcgcgccaagccgctcaaggacttccgcacgctgcagacgcactacaagcgcaagcacggcctcaagcccttcctctgccgccgctgcggcaaggccttcgccgtcaagggcgactggcgcacgcacgagaagaactgcggcaggctctggtactgcctctgcggctccgagttcaagcacaagcgctcgctcaaggaccacgcccgcgccttcggccgcggccacggcttcgtcggcggcggccctcctggcgccgggtgcggcgggggactcgacgacgacgatgacggcgctgtttccgacgtcgagcacgacggtgccgccacggcggccaggtcgatgtgaccgatccatgcagctgccatctatggatcgatcgagctctctatattcctagccggccggcaggtcaatattatatatacttattagtaggccgaccgactggtgcaagtgcaaaagaaaatctgttgtaccatatagtaacagattatcaagctgttctttcattttgcagctgctgtagcgctactgctatatagagtcggttctcttcgtctgctccgtcctagttaagtgcagcacacggctcatccctggcacgagaaataaatcacgggcatgcgtgtgtcaacagctagaatatgtgctcgattgatgcacagtgtgttagaatttattgtccattttctaataatattttttactgttgaagttc

SEQ ID NO: 15976 - protein, 432 aa, Zea mays subsp. mays
  peptide (1)..(432): Ceres Seq. ID no. 12566434
  misc_feature (258)..(280): Pfam Name: Zinc finger, C2H2 type Pfam Description: Zinc finger, C2H2 type
  misc_feature (1)..(74): Homolog of NCBI NO: 9294415 NR Description: zinc finger-like protein [Arabidopsis thaliana]
  misc_feature (161)..(421): Homolog of NCBI NO: 9294415 NR Description: zinc finger-like protein [Arabidopsis thaliana]
  misc_feature (1)..(74): Homolog of NCBI NO: 30685975 NR Description: DNA-binding protein -related [Arabidopsis
  misc_feature (161)..(421): Homolog of NCBI NO: 30685975 NR Description: DNA-binding protein -related [Arabidopsis
  misc_feature (1)..(76): Homolog of NCBI NO: 15223781 NR Description: hypothetical protein; protein id: At1g51220.1
  misc_feature (207)..(421): Homolog of NCBI NO: 15223781 NR Description: hypothetical protein; protein id: At1g51220.1
  misc_feature (1)..(74): Homolog of NCBI NO: 28973719 NR Description: putative zinc finger protein [Arabidopsis
  misc_feature (1)..(104): Homolog of NCBI NO: 15230370 NR Description: zinc finger - like protein
  misc_feature (161)..(421): Homolog of NCBI NO: 15230370 NR Description: zinc finger - like protein
  misc_feature (159)..(421): Homolog of NCBI NO: 28973719 NR Description: putative zinc finger protein [Arabidopsis
MENPYTSFFNSHPQHHRYYYHPAPPAPAPAAYHPSLPFFAAHRQPPAPTAPAPPSPPLREALPLLSLAPTRHEERERRARPPAPALEDSEENRDEGEEEQEEEEGPTASSKSNHGQHQRLGVGRQRGFFADLNASAAGDDDDPMDVEAAADGSGSAAAGDDVTVALRIGLPLPGPAELVSDLSSSGGARRQQHQHDGGGGEEEEEDEEGDGENGGGGEEEGTTAAAPLGFPSSPIGRLNKGQYWIPTPSQILIGPTQFSCPVCFKTFNRYNNMQMHMWGHGSQYRKGPESLRGIQPTAMLRLPCYCCSPGCRNNIDHPRAKPLKDFRTLQTHYKRKHGLKPFLCRRCGKAFAVKGDWRTHEKNCGRLWYCLCGSEFKHKRSLKDHARAFGRGHGFVGGGPPGAGCGGGLDDDDDGAVSDVEHDGAATAARSM

SEQ ID NO: 15977 - protein, 289 aa, Zea mays subsp. mays
  peptide (1)..(289): Ceres Seq. ID no. 12566435
  misc_feature (115)..(137): Pfam Name: Zinc finger, C2H2 type Pfam Description: Zinc finger, C2H2 type
  misc_feature (99)..(250): Homolog of NCBI NO: 15223175 NR Description: hypothetical protein
  misc_feature (100)..(251): Homolog of NCBI NO: 30693123 NR Description: transparent testa 1 (TT1) protein [Arabidopsis
  misc_feature (100)..(251): Homolog of NCBI NO: 18253283 NR Description: transparent testa 1 [Arabidopsis thaliana]
  misc_feature (10)..(250): Homolog of NCBI NO: 34908460 NR Description: P0683F02.21 [Oryza sativa (japonica
  misc_feature (97)..(280): Homolog of NCBI NO: 15222242 NR Description: zinc finger protein, putative; protein id:
  misc_feature (18)..(278): Homolog of NCBI NO: 9294415 NR Description: zinc finger-like protein [Arabidopsis thaliana]
  misc_feature (18)..(278): Homolog of NCBI NO: 30685975 NR Description: DNA-binding protein -related [Arabidopsis
  misc_feature (64)..(278): Homolog of NCBI NO: 15223781 NR Description: hypothetical protein; protein id: At1g51220.1
  misc_feature (18)..(278): Homolog of NCBI NO: 15230370 NR Description: zinc finger - like protein
  misc_feature (16)..(278): Homolog of NCBI NO: 28973719 NR Description: putative zinc finger protein [Arabidopsis
MDVEAAADGSGSAAAGDDVTVALRIGLPLPGPAELVSDLSSSGGARRQQHQHDGGGGEEEEEDEEGDGENGGGGEEEGTTAAAPLGFPSSPIGRLNKGQYWIPTPSQILIGPTQFSCPVCFKTFNRYNNMQMHMWGHGSQYRKGPESLRGIQPTAMLRLPCYCCSPGCRNNIDHPRAKPLKDFRTLQTHYKRKHGLKPFLCRRCGKAFAVKGDWRTHEKNCGRLWYCLCGSEFKHKRSLKDHARAFGRGHGFVGGGPPGAGCGGGLDDDDDGAVSDVEHDGAATAARSM

SEQ ID NO: 15978 - DNA, 1844 bp, Zea mays subsp. mays
  misc_feature (1)..(1844): Ceres Seq. ID no. 12381094
  misc_feature: MA Experiment ID: 108522 Result: Down-regulated in Transcription
  misc_feature: MA Experiment 108522 PARAMETER Experiment Name: Zm_42deg_Heat_P Parameter: Age (day) Value: 8
  misc_feature: MA Experiment 108522 PARAMETER Experiment Name: Zm_42deg_Heat_P Parameter: Organism Value: Zea mays
  misc_feature: MA Experiment 108522 PARAMETER Experiment Name: Zm_42deg_Heat_P Parameter: Plant Line Value: 35A19
  misc_feature: MA Experiment 108522 PARAMETER Experiment Name: Zm_42deg_Heat_P Parameter: Temperature (deg C) Value: 42 vs. 22
  misc_feature: MA Experiment 108522 PARAMETER Experiment Name: Zm_42deg_Heat_P Parameter: Timepoint (hr) Value: 1
  misc_feature: MA Experiment 108522 PARAMETER Experiment Name: Zm_42deg_Heat_P Parameter: Tissue Value: Aerial
  misc_feature: MA Experiment ID: 108523 Result: Down-regulated in Transcription
  misc_feature: MA Experiment 108523 PARAMETER Experiment Name: Zm_42deg_Heat_P Parameter: Age (day) Value: 8
  misc_feature: MA Experiment 108523 PARAMETER Experiment Name: Zm_42deg_Heat_P Parameter: Organism Value: Zea mays
  misc_feature: MA Experiment 108523 PARAMETER Experiment Name: Zm_42deg_Heat_P Parameter: Plant Line Value: 35A19
  misc_feature: MA Experiment 108523 PARAMETER Experiment Name: Zm_42deg_Heat_P Parameter: Temperature (deg C) Value: 42 vs. 22
  misc_feature: MA Experiment 108523 PARAMETER Experiment Name: Zm_42deg_Heat_P Parameter: Timepoint (hr) Value: 6
  misc_feature: MA Experiment 108523 PARAMETER Experiment Name: Zm_42deg_Heat_P Parameter: Tissue Value: Aerial
  misc_feature: MA Experiment ID: 108527 Result: Up-regulated in Transcription
  misc_feature: MA Experiment 108527 PARAMETER Experiment Name: Zm_5mM_NO_P Parameter: Age (day) Value: 8
  misc_feature: MA Experiment 108527 PARAMETER Experiment Name: Zm_5mM_NO_P Parameter: Organism Value: Zea mays
  misc_feature: MA Experiment 108527 PARAMETER Experiment Name: Zm_5mM_NO_P Parameter: Plant Line Value: 35A19
  misc_feature: MA Experiment 108527 PARAMETER Experiment Name: Zm_5mM_NO_P Parameter: Timepoint (hr) Value: 6
  misc_feature: MA Experiment 108527 PARAMETER Experiment Name: Zm_5mM_NO_P Parameter: Tissue Value: Aerial
  misc_feature: MA Experiment 108527 PARAMETER Experiment Name: Zm_5mM_NO_P Parameter: Treatment Value: 5mM NO vs. No Treatment
  misc_feature: MA Experiment ID: 108528 Result: Up-regulated in Transcription
  misc_feature: MA Experiment 108528 PARAMETER Experiment Name: Zm_Imbibed_Seeds_P Parameter: Age (day) Value: 5 vs. 2
  misc_feature: MA Experiment 108528 PARAMETER Experiment Name: Zm_Imbibed_Seeds_P Parameter: Organism Value: Zea mays
  misc_feature: MA Experiment 108528 PARAMETER Experiment Name: Zm_Imbibed_Seeds_P Parameter: Plant Line Value: 35A19
  misc_feature: MA Experiment 108528 PARAMETER Experiment Name: Zm_Imbibed_Seeds_P Parameter: Tissue Value: Aerial vs. Embryo
  misc_feature: MA Experiment ID: 108529 Result: Up-regulated in Transcription
  misc_feature: MA Experiment 108529 PARAMETER Experiment Name: Zm_Imbibed_Seeds_P Parameter: Age (day) Value: 5 vs. 2
  misc_feature: MA Experiment 108529 PARAMETER Experiment Name: Zm_Imbibed_Seeds_P Parameter: Organism Value: Zea mays
  misc_feature: MA Experiment 108529 PARAMETER Experiment Name: Zm_Imbibed_Seeds_P Parameter: Plant Line Value: 35A19
  misc_feature: MA Experiment 108529 PARAMETER Experiment Name: Zm_Imbibed_Seeds_P Parameter: Tissue Value: Roots vs. Embryo
  misc_feature: MA Experiment ID: 108530 Result: Up-regulated in Transcription
  misc_feature: MA Experiment 108530 PARAMETER Experiment Name: Zm_Imbibed_Seeds_P Parameter: Age (day) Value: 6 vs. 2
  misc_feature: MA Experiment 108530 PARAMETER Experiment Name: Zm_Imbibed_Seeds_P Parameter: Organism Value: Zea mays
  misc_feature: MA Experiment 108530 PARAMETER Experiment Name: Zm_Imbibed_Seeds_P Parameter: Plant Line Value: 35A19
  misc_feature: MA Experiment 108530 PARAMETER Experiment Name: Zm_Imbibed_Seeds_P Parameter: Tissue Value: Aerial vs. Embryo
  misc_feature: MA Experiment ID: 108534 Result: Down-regulated in Transcription
  misc_feature: MA Experiment 108534 PARAMETER Experiment Name: Zm_4deg_Cold_P Parameter: Age (hr) Value: 8
  misc_feature: MA Experiment 108534 PARAMETER Experiment Name: Zm_4deg_Cold_P Parameter: Organism Value: Zea mays
  misc_feature: MA Experiment 108534 PARAMETER Experiment Name: Zm_4deg_Cold_P Parameter: Plant Line Value: 35A19
  misc_feature: MA Experiment 108534 PARAMETER Experiment Name: Zm_4deg_Cold_P Parameter: Temperature (deg C) Value: 4 vs. 22
  misc_feature: MA Experiment 108534 PARAMETER Experiment Name: Zm_4deg_Cold_P Parameter: Timepoint (hr) Value: 6
  misc_feature: MA Experiment 108534 PARAMETER Experiment Name: Zm_4deg_Cold_P Parameter: Tissue Value: Aerial
  misc_feature: MA Experiment ID: 108535 Result: Down-regulated in Transcription
  misc_feature: MA Experiment 108535 PARAMETER Experiment Name: Zm_Meristem_P Parameter: Age (day) Value: 8
  misc_feature: MA Experiment 108535 PARAMETER Experiment Name: Zm_Meristem_P Parameter: Organism Value: Zea mays
  misc_feature: MA Experiment 108535 PARAMETER Experiment Name: Zm_Meristem_P Parameter: Plant Line Value: 35A19
  misc_feature: MA Experiment 108535 PARAMETER Experiment Name: Zm_Meristem_P Parameter: Tissue Value: Root Meristem vs. Above Root Meristem
  misc_feature: MA Experiment ID: 108543 Result: Down-regulated in Transcription
  misc_feature: MA Experiment ID: 108556 Result: Up-regulated in Transcription
  misc_feature: MA Experiment 108556 PARAMETER Experiment Name: Zm_Drought_P Parameter: Age (day) Value: 9
  misc_feature: MA Experiment 108556 PARAMETER Experiment Name: Zm_Drought_P Parameter: Organism Value: Zea mays
  misc_feature: MA Experiment 108556 PARAMETER Experiment Name: Zm_Drought_P Parameter: Plant Line Value: 35A19
  misc_feature: MA Experiment 108556 PARAMETER Experiment Name: Zm_Drought_P Parameter: Timepoint (hr) Value: 24
  misc_feature: MA Experiment 108556 PARAMETER Experiment Name: Zm_Drought_P Parameter: Tissue Value: Aerial
  misc_feature: MA Experiment 108556 PARAMETER Experiment Name: Zm_Drought_P Parameter: Treatment Value: Drought vs. No Drought
  misc_feature: MA Experiment ID: 108687 Result: Up-regulated in Transcription
  misc_feature: MA Experiment 108687 PARAMETER Experiment Name: Zm_Embryos-Flowers__P Parameter: Tissue Value: Embryo vs. Aerial+
  misc_feature: MA Experiment ID: 108688 Result: Down-regulated in Transcription
  misc_feature: MA Experiment 108688 PARAMETER Experiment Name: Zm_Embryos-Flowers__P Parameter: Tissue Value: Immature Flowers vs. Aerial+
  misc_feature: MA Experiment ID: 108689 Result: Up-regulated in Transcription
  misc_feature: MA Experiment 108689 PARAMETER Experiment Name: Zm_Drought_Roots_P Parameter: Age (day) Value: 9
  misc_feature: MA Experiment 108689 PARAMETER Experiment Name: Zm_Drought_Roots_P Parameter: Organism Value: Zea mays
  misc_feature: MA Experiment 108689 PARAMETER Experiment Name: Zm_Drought_Roots_P Parameter: Plant Line Value: 35A19
  misc_feature: MA Experiment 108689 PARAMETER Experiment Name: Zm_Drought_Roots_P Parameter: Timepoint (hr) Value: 24
  misc_feature: MA Experiment 108689 PARAMETER Experiment Name: Zm_Drought_Roots_P Parameter: Tissue Value: Roots
  misc_feature: MA Experiment 108689 PARAMETER Experiment Name: Zm_Drought_Roots_P Parameter: Treatment Value: Drought vs. No Drought
  misc_feature: MA Experiment ID: 20000478 Result: Up-regulated in Transcription
  misc_feature: MA Experiment 20000478 PARAMETER Experiment Name: Zm_5mM_SA_P Parameter: Age (day) Value: 11
  misc_feature: MA Experiment 20000478 PARAMETER Experiment Name: Zm_5mM_SA_P Parameter: Organism Value: Zea mays
  misc_feature: MA Experiment 20000478 PARAMETER Experiment Name: Zm_5mM_SA_P Parameter: Plant Line Value: 35A19
  misc_feature: MA Experiment 20000478 PARAMETER Experiment Name: Zm_5mM_SA_P Parameter: Timepoint (hr) Value: 72
  misc_feature: MA Experiment 20000478 PARAMETER Experiment Name: Zm_5mM_SA_P Parameter: Tissue Value: Aerial
  misc_feature: MA Experiment 20000478 PARAMETER Experiment Name: Zm_5mM_SA_P Parameter: Treatment Value: 5mM SA vs. No Treatment
  misc_feature: MA Experiment ID: 20000480 Result: Up-regulated in Transcription
  misc_feature: MA Experiment 20000480 PARAMETER Experiment Name: Zm_Drought_P Parameter: Age (day) Value: 11
  misc_feature: MA Experiment 20000480 PARAMETER Experiment Name: Zm_Drought_P Parameter: Organism Value: Zea mays
  misc_feature: MA Experiment 20000480 PARAMETER Experiment Name: Zm_Drought_P Parameter: Plant Line Value: 35A19
  misc_feature: MA Experiment 20000480 PARAMETER Experiment Name: Zm_Drought_P Parameter: Timepoint (hr) Value: 72
  misc_feature: MA Experiment 20000480 PARAMETER Experiment Name: Zm_Drought_P Parameter: Tissue Value: Aerial
  misc_feature: MA Experiment 20000480 PARAMETER Experiment Name: Zm_Drought_P Parameter: Treatment Value: Drought vs. No Drought
gcacgagaccatcacctagaacatcctaatcgaaaaaaaacgttagccttttccaatcagggagagagctcaaacatggcactcgaacccgtcgctctcctgctcacggtcctcgtcgccgcgccgctcacggtcctcctcctcctcctcttcctcgtcgccggcaacaagaggcccgctcgtgctgcttctcccacgccgcgccaccgcttgaggctgccgctgccgccgtcgccgcggggcctcccgctgctgggccacctgcacctgctgggctcgctgccgcaccgcgcgctggcgtctctggcgcgcgcgcacggccccgtgctgctgctccgcctgggccgcgtgcccaccgtggtcgtgtcctccgctgccgccgccgaggaggtgatgcgggcgcgggacctggcgttcgcgaaccggcccgcgagcgccatgggccgtgcgcctcctctacggccgcgacgtcgcgttcgcgccctacggcgagtactggcgccaggcgcgccgcgtctgcgtcgtccacctcctcagcgcgcgtcacgtcgggtccttccgccgtgtccgagagcaggaggccgccgcgctggtcgcacgcgtcgcccgggacagcgccggtggcgcggccgtcggcctcagcgatctcctcaccgagtacgccaacgccgtcgtgtcgcgcgccgcgttcggcgacgagagcgcgcgcgggctgttgggcgaattcgactccggccgtcggcagaggaaagtgctcaccgacttccagaagctcgtggggacgacgcccgtcggggagctgctgccgtggctgggctgggtggacgccgtcacggggctggaggggaagatcaggcggacgttcgaggcgctcgacgggttgctcgagaaggtgatcgatgaccaccggcggcggcctcgcagcggggaggagggcggtgaccgggacttcgtggacgtgttgctggacgtccacaacaaggaccaagagcacggcatccaactagagaccaacgaaatcaaggccatcatcttggacatgttcgcggcaggcacggacacgatagccacggcgatggaatgggccatggcggagctcgtcacccacccgcgtgccatgcggagagcccaggacgaggtccgcgcggcggcggccggctcaaccggcgtgaacgaggaccacgtcgcgcagctggactacctcaaggccgtgctgaaggagacgctccggttgcacgcgccgttgccactgctggtgccccgggagccggcggcggacaccgagatcctggggtaccacgtcccggcgcgcacgcgcgtgctggtcaacgcctgggctattggccgggaccccgcgacgtgggagcgcgccgaggaattcgtgccagagaggttcttgggcggcgccgccgcagctgacgtcggcttcaaggggcagcacttcgagctcctgccgttcggcggcggcaggaggatgtgccccggaatcgcgtttgcggagggaagcgccgagatggccctggcgagcctgctgtatcattttgactgggaggcggcgagccggggccagaacgggaaagggacgctgtcgctggacatgaccgagatgaacggattagccgtgcatatcaactccggtcttccgcttgtagccaagccgtggatccccttcaagaactaggagaagatattggagatatttggttttttactgcaaacaatgtgcttgattttaatgttattttagacatttttgctcttcttcgtccttctccctttttccctttttgtgtgtgtacgcttgtaaaaaaagacaaaatatcaaaataatctctactaccccg

SEQ ID NO: 15979 - protein, 300 aa, Zea mays subsp. mays
  peptide (1)..(300): Ceres Seq. ID no. 12381095
  misc_feature (76)..(149): Homolog of NCBI NO: 22331674 NR Description: similar to cytochrome p450 family; protein id:
  misc_feature (43)..(143): Homolog of NCBI NO: 584863 NR Description: Cytochrome P450 71A4 (CYPLXXIA4) (P-450EG2)
  misc_feature (76)..(149): Homolog of NCBI NO: 5915814 NR Description: Cytochrome P450 71A6
  misc_feature (35)..(143): Homolog of NCBI NO: 3582021 NR Description: cytochrome P450 [Nepeta racemosa]
  misc_feature (35)..(149): Homolog of NCBI NO: 117188 NR Description: CYTOCHROME P450 71A1 (CYPLXXIA1) (ARP-2)
  misc_feature (35)..(149): Homolog of NCBI NO: 25282608 NR Description: cytochrome P-450LXXIA1 [similarity] - avocado
  misc_feature (26)..(147): Homolog of NCBI NO: 34904246 NR Description: putative cytochrome P-450LXXIA1 (cyp71A1) family
  misc_feature (35)..(142): Homolog of NCBI NO: 34904238 NR Description: putative cytochrome P-450LXXIA1 (cyp71A1) family
  misc_feature (35)..(147): Homolog of NCBI NO: 34904240 NR Description: putative cytochrome P-450LXXIA1 (cyp71A1) family
  misc_feature (31)..(147): Homolog of NCBI NO: 34904242 NR Description: putative cytochrome P-450LXXIA1 (cyp71A1) family
ARDHHLEHPNRKKTLAFSNQGESSNMALEPVALLLTVLVAAPLTVLLLLLFLVAGNKRPARAASPTPRHRLRLPLPPSPRGLPLLGHLHLLGSLPHRALASLARAHGPVLLLRLGRVPTVVVSSAAAAEEVMRARDLAFANRPASAMGRAPPLRPRRRVRALRRVLAPGAPRLRRPPPQRASRRVLPPCPRAGGRRAGRTRRPGQRRWRGRRPQRSPHRVRQRRRVARRVRRRERARAVGRIRLRPSAEESAHRLPEARGDDARRGAAAVAGLGGRRHGAGGEDQADVRGARRVAREGDR

SEQ ID NO: 15980 - protein, 275 aa, Zea mays subsp. mays
  peptide (1)..(275): Ceres Seq. ID no. 12381096
  misc_feature (51)..(124): Homolog of NCBI NO: 22331674 NR Description: similar to cytochrome p450 family; protein id:
  misc_feature (18)..(118): Homolog of NCBI NO: 584863 NR Description: Cytochrome P450 71A4 (CYPLXXIA4) (P-450EG2)
  misc_feature (51)..(124): Homolog of NCBI NO: 5915814 NR Description: Cytochrome P450 71A6
  misc_feature (10)..(118): Homolog of NCBI NO: 3582021 NR Description: cytochrome P450 [Nepeta racemosa]
  misc_feature (10)..(124): Homolog of NCBI NO: 117188 NR Description: CYTOCHROME P450 71A1 (CYPLXXIA1) (ARP-2)
  misc_feature (10)..(124): Homolog of NCBI NO: 25282608 NR Description: cytochrome P-450LXXIA1 [similarity] - avocado
  misc_feature (1)..(122): Homolog of NCBI NO: 34904246 NR Description: putative cytochrome P-450LXXIA1 (cyp71A1) family
  misc_feature (10)..(117): Homolog of NCBI NO: 34904238 NR Description: putative cytochrome P-450LXXIA1 (cyp71A1) family
  misc_feature (10)..(122): Homolog of NCBI NO: 34904240 NR Description: putative cytochrome P-450LXXIA1 (cyp71A1) family
  misc_feature (6)..(122): Homolog of NCBI NO: 34904242 NR Description: putative cytochrome P-450LXXIA1 (cyp71A1) family
MALEPVALLLTVLVAAPLTVLLLLLFLVAGNKRPARAASPTPRHRLRLPLPPSPRGLPLLGHLHLLGSLPHRALASLARAHGPVLLLRLGRVPTVVVSSAAAAEEVMRARDLAFANRPASAMGRAPPLRPRRRVRALRRVLAPGAPRLRRPPPQRASRRVLPPCPRAGGRRAGRTRRPGQRRWRGRRPQRSPHRVRQRRRVARRVRRRERARAVGRIRLRPSAEESAHRLPEARGDDARRGAAAVAGLGGRRHGAGGEDQADVRGARRVAREGDR

SEQ ID NO: 15981 - protein, 213 aa, Zea mays subsp. mays
  peptide (1)..(213): Ceres Seq. ID no. 12381097
  misc_feature (1)..(209): Homolog of NCBI NO: 22331674 NR Description: similar to cytochrome p450 family; protein id:
  misc_feature (1)..(208): Homolog of NCBI NO: 584863 NR Description: Cytochrome P450 71A4 (CYPLXXIA4) (P-450EG2)
  misc_feature (1)..(207): Homolog of NCBI NO: 5915814 NR Description: Cytochrome P450 71A6
  misc_feature (1)..(207): Homolog of NCBI NO: 3582021 NR Description: cytochrome P450 [Nepeta racemosa]
  misc_feature (1)..(171): Homolog of NCBI NO: 117188 NR Description: CYTOCHROME P450 71A1 (CYPLXXIA1) (ARP-2)
  misc_feature (1)..(206): Homolog of NCBI NO: 25282608 NR Description: cytochrome P-450LXXIA1 [similarity] - avocado
  misc_feature (1)..(210): Homolog of NCBI NO: 34904246 NR Description: putative cytochrome P-450LXXIA1 (cyp71A1) family
  misc_feature (1)..(208): Homolog of NCBI NO: 34904238 NR Description: putative cytochrome P-450LXXIA1 (cyp71A1) family
  misc_feature (1)..(210): Homolog of NCBI NO: 34904240 NR Description: putative cytochrome P-450LXXIA1 (cyp71A1) family
  misc_feature (1)..(205): Homolog of NCBI NO: 34904242 NR Description: putative cytochrome P-450LXXIA1 (cyp71A1) family
MFAAGTDTIATAMEWAMAELVTHPRAMRRAQDEVRAAAAGSTGVNEDHVAQLDYLKAVLKETLRLHAPLPLLVPREPAADTEILGYHVPARTRVLVNAWAIGRDPATWERAEEFVPERFLGGAAAADVGFKGQHFELLPFGGGRRMCPGIAFAEGSAEMALASLLYHFDWEAASRGQNGKGTLSLDMTEMNGLAVHINSGLPLVAKPWIPFKN

SEQ ID NO: 15982 - DNA, 1340 bp, Zea mays subsp. mays
  misc_feature (1)..(1340): Ceres Seq. ID no. 12363910
  misc_feature: MA Experiment ID: 108523 Result: Up-regulated in Transcription
  misc_feature: MA Experiment 108523 PARAMETER Experiment Name: Zm_42deg_Heat_P Parameter: Age (day) Value: 8
  misc_feature: MA Experiment 108523 PARAMETER Experiment Name: Zm_42deg_Heat_P Parameter: Organism Value: Zea mays
  misc_feature: MA Experiment 108523 PARAMETER Experiment Name: Zm_42deg_Heat_P Parameter: Plant Line Value: 35A19
  misc_feature: MA Experiment 108523 PARAMETER Experiment Name: Zm_42deg_Heat_P Parameter: Temperature (deg C) Value: 42 vs. 22
  misc_feature: MA Experiment 108523 PARAMETER Experiment Name: Zm_42deg_Heat_P Parameter: Timepoint (hr) Value: 6
  misc_feature: MA Experiment 108523 PARAMETER Experiment Name: Zm_42deg_Heat_P Parameter: Tissue Value: Aerial
  misc_feature: MA Experiment ID: 108528 Result: Up-regulated in Transcription
  misc_feature: MA Experiment 108528 PARAMETER Experiment Name: Zm_Imbibed_Seeds_P Parameter: Age (day) Value: 5 vs. 2
  misc_feature: MA Experiment 108528 PARAMETER Experiment Name: Zm_Imbibed_Seeds_P Parameter: Organism Value: Zea mays
  misc_feature: MA Experiment 108528 PARAMETER Experiment Name: Zm_Imbibed_Seeds_P Parameter: Plant Line Value: 35A19
  misc_feature: MA Experiment 108528 PARAMETER Experiment Name: Zm_Imbibed_Seeds_P Parameter: Tissue Value: Aerial vs. Embryo
  misc_feature: MA Experiment ID: 108530 Result: Up-regulated in Transcription
  misc_feature: MA Experiment 108530 PARAMETER Experiment Name: Zm_Imbibed_Seeds_P Parameter: Age (day) Value: 6 vs. 2
  misc_feature: MA Experiment 108530 PARAMETER Experiment Name: Zm_Imbibed_Seeds_P Parameter: Organism Value: Zea mays
  misc_feature: MA Experiment 108530 PARAMETER Experiment Name: Zm_Imbibed_Seeds_P Parameter: Plant Line Value: 35A19
  misc_feature: MA Experiment 108530 PARAMETER Experiment Name: Zm_Imbibed_Seeds_P Parameter: Tissue Value: Aerial vs. Embryo
  misc_feature: MA Experiment ID: 108559 Result: Down-regulated in Transcription
  misc_feature: MA Experiment 108559 PARAMETER Experiment Name: Zm_5mM_NO_P Parameter: Age (day) Value: 8
  misc_feature: MA Experiment 108559 PARAMETER Experiment Name: Zm_5mM_NO_P Parameter: Organism Value: Zea mays
  misc_feature: MA Experiment 108559 PARAMETER Experiment Name: Zm_5mM_NO_P Parameter: Plant Line Value: 35A19
  misc_feature: MA Experiment 108559 PARAMETER Experiment Name: Zm_5mM_NO_P Parameter: Timepoint (hr) Value: 12
  misc_feature: MA Experiment 108559 PARAMETER Experiment Name: Zm_5mM_NO_P Parameter: Tissue Value: Aerial
  misc_feature: MA Experiment 108559 PARAMETER Experiment Name: Zm_5mM_NO_P Parameter: Treatment Value: 5mM NO vs. No Treatment
  misc_feature: MA Experiment ID: 108687 Result: Down-regulated in Transcription
  misc_feature: MA Experiment 108687 PARAMETER Experiment Name: Zm_Embryos-Flowers__P Parameter: Tissue Value: Embryo vs. Aerial+
  misc_feature: MA Experiment ID: 20000477 Result: Down-regulated in Transcription
  misc_feature: MA Experiment 20000477 PARAMETER Experiment Name: Zm_5mM_SA_P Parameter: Age (day) Value: 10
  misc_feature: MA Experiment 20000477 PARAMETER Experiment Name: Zm_5mM_SA_P Parameter: Organism Value: Zea mays
  misc_feature: MA Experiment 20000477 PARAMETER Experiment Name: Zm_5mM_SA_P Parameter: Plant Line Value: 35A19
  misc_feature: MA Experiment 20000477 PARAMETER Experiment Name: Zm_5mM_SA_P Parameter: Timepoint (hr) Value: 48
  misc_feature: MA Experiment 20000477 PARAMETER Experiment Name: Zm_5mM_SA_P Parameter: Tissue Value: Aerial
  misc_feature: MA Experiment 20000477 PARAMETER Experiment Name: Zm_5mM_SA_P Parameter: Treatment Value: 5mM SA vs. No Treatment
  misc_feature: MA Experiment ID: 20000480 Result: Down-regulated in Transcription
  misc_feature: MA Experiment 20000480 PARAMETER Experiment Name: Zm_Drought_P Parameter: Age (day) Value: 11
  misc_feature: MA Experiment 20000480 PARAMETER Experiment Name: Zm_Drought_P Parameter: Organism Value: Zea mays
  misc_feature: MA Experiment 20000480 PARAMETER Experiment Name: Zm_Drought_P Parameter: Plant Line Value: 35A19
  misc_feature: MA Experiment 20000480 PARAMETER Experiment Name: Zm_Drought_P Parameter: Timepoint (hr) Value: 72
  misc_feature: MA Experiment 20000480 PARAMETER Experiment Name: Zm_Drought_P Parameter: Tissue Value: Aerial
  misc_feature: MA Experiment 20000480 PARAMETER Experiment Name: Zm_Drought_P Parameter: Treatment Value: Drought vs. No Drought
  misc_feature: MA Experiment ID: 20000535 Result: Down-regulated in Transcription
  misc_feature: MA Experiment 20000535 PARAMETER Experiment Name: Zm_Hybrid_Seed_Dev_P Parameter: DAP Value: 30 vs. 12
  misc_feature: MA Experiment 20000535 PARAMETER Experiment Name: Zm_Hybrid_Seed_Dev_P Parameter: Organism Value: Zea mays
  misc_feature: MA Experiment 20000535 PARAMETER Experiment Name: Zm_Hybrid_Seed_Dev_P Parameter: Plant Line Value: 35A19
  misc_feature: MA Experiment 20000535 PARAMETER Experiment Name: Zm_Hybrid_Seed_Dev_P Parameter: Tissue Value: Embryo vs. Unfert Floret
  misc_feature: MA Experiment ID: 20000629 Result: Up-regulated in Transcription
  misc_feature: MA Experiment 20000629 PARAMETER Experiment Name: Zm_Herbicide-Treatments_P Parameter: Timepoint (hr) Value: 12
  misc_feature: MA Experiment 20000629 PARAMETER Experiment Name: Zm_Herbicide-Treatments_P Parameter: Tissue Value: Aerial
  misc_feature: MA Experiment 20000629 PARAMETER Experiment Name: Zm_Herbicide-Treatments_P Parameter: Treatment Value: Trimec vs. No Treatment
ggttccattactggtccctagcaggaagcaggatggagttggcgctcagcttgggggagaccatggcggatgccggaagggacctcatgctggggcttgggatgggggtcggggtgcggagggaggaggaagcgcagagagggaggagggacagggaggtgaggcgggagctggagttcacggcgaggagcgcccggtcgtcgccggagccggcggtgcgactcaccctcctgcacggcctcggcctcccgtggccgccgccgccgtcgtccgagaccaaccggcacctggaggcgtcggcgcgtggcttcgacgtgaaccgggcgccgtcgctgtccgcggccggtggcgccgcggaggaggacgaggagcaggacgaggcggcggcggcggcggcatcgtcgtcgcccaacaacagcgcgagctccttcccgacggacttctccgcgcaggggccaggtggcgcccggcgccgaccgcgcgtgctcccgcgccagcgacgaggacgacggcggctccgcgcgcaagaagctgcgcctctccaaggagcagtccgcgttcctggaggatagcttcaaggagcacgccacgctgaacccgaagcagaagctcgcgctggcgaagcagctcaacctccggccgcgccaggtggaggtgtggttccagaaccgcagagccaggacgaagctgaagcagacggaggtggactgcgagtacctcaagcgatgctgcgagacgctgacggaggagaaccggcggctgcagaaggagctatccgagctccgctcgctcaagacggtgcaccccttctacatgcacctcccggccaccaccctttccatgtgcccctcctgcgagcgcgtcgcctccaactccgcgccggcgcccgcgtcatcgccgtcccccgctactggcattgcggccccggcaccggagcagaggccctcgtcgttcgcggctctgttctcgtcccctctgaaccgcccgctggccgcccaggcgcaaccgcaaccgcaggcgccggccaactcgtgaggcgctctctactctatctccggcgacgcgaacggaggtggatctggctgtaaatacgatcacctttttttggcttcctttttcttttgttttcacttgatgcggttcttgagattttttttttgtggattgccgatgggttggtttaccggtttattagagcgcatcatctggccgtcggattggactgcggacggccgggtgcagaaaggaagtgctgcgatagagtttattaacctcagtagcatcgatcatgttttgttaccttgctatctatcttggcgtcaatataggccttgaaatcc

SEQ ID NO: 15983 - protein, 197 aa, Zea mays subsp. mays
  peptide (1)..(197): Ceres Seq. ID no. 12363911
VPLLVPSRKQDGVGAQLGGDHGGCRKGPHAGAWDGGRGAEGGGSAEREEGQGGEAGAGVHGEERPVVAGAGGATHPPARPRPPVAAAAVVRDQPAPGGVGAWLRREPGAVAVRGRWRRGGGRGAGRGGGGGGIVVAQQQRELLPDGLLRAGARWRPAPTARAPAPATRTTAAPRARSCASPRSSPRSWRIASRSTPR

SEQ ID NO: 15984 - protein, 189 aa, Zea mays subsp. mays
  peptide (1)..(189): Ceres Seq. ID no. 12363912
  misc_feature (114)..(157): Homolog of NCBI NO: 12230908 NR Description: Homeobox-leucine zipper protein HAT14 (HD-ZIP
  misc_feature (96)..(157): Homolog of NCBI NO: 29028870 NR Description: At5g06710 [Arabidopsis thaliana]
  misc_feature (96)..(157): Homolog of NCBI NO: 22326632 NR Description: homeobox-leucine zipper protein HAT14 (HD-Zip
FHYWSLAGSRMELALSLGETMADAGRDLMLGLGMGVGVRREEEAQRGRRDREVRRELEFTARSARSSPEPAVRLTLLHGLGLPWPPPPSSETNRHLEASARGFDVNRAPSLSAAGGAAEEDEEQDEAAAAAASSSPNNSASSFPTDFSAQGPGGARRRPRVLPRQRRGRRRLRAQEAAPLQGAVRVPGG

SEQ ID NO: 15985 - protein, 179 aa, Zea mays subsp. mays
  peptide (1)..(179): Ceres Seq. ID no. 12363913
  misc_feature (104)..(147): Homolog of NCBI NO: 12230908 NR Description: Homeobox-leucine zipper protein HAT14 (HD-ZIP
  misc_feature (86)..(147): Homolog of NCBI NO: 29028870 NR Description: At5g06710 [Arabidopsis thaliana]
  misc_feature (86)..(147): Homolog of NCBI NO: 22326632 NR Description: homeobox-leucine zipper protein HAT14 (HD-Zip
MELALSLGETMADAGRDLMLGLGMGVGVRREEEAQRGRRDREVRRELEFTARSARSSPEPAVRLTLLHGLGLPWPPPPSSETNRHLEASARGFDVNRAPSLSAAGGAAEEDEEQDEAAAAAASSSPNNSASSFPTDFSAQGPGGARRRPRVLPRQRRGRRRLRAQEAAPLQGAVRVPGG

SEQ ID NO: 15986 - DNA, 1452 bp, Zea mays subsp. mays
  misc_feature (1)..(1452): Ceres Seq. ID no. 12359603
  misc_feature: MA Experiment ID: 108527 Result: Up-regulated in Transcription
  misc_feature: MA Experiment 108527 PARAMETER Experiment Name: Zm_5mM_NO_P Parameter: Age (day) Value: 8
  misc_feature: MA Experiment 108527 PARAMETER Experiment Name: Zm_5mM_NO_P Parameter: Organism Value: Zea mays
  misc_feature: MA Experiment 108527 PARAMETER Experiment Name: Zm_5mM_NO_P Parameter: Plant Line Value: 35A19
  misc_feature: MA Experiment 108527 PARAMETER Experiment Name: Zm_5mM_NO_P Parameter: Timepoint (hr) Value: 6
  misc_feature: MA Experiment 108527 PARAMETER Experiment Name: Zm_5mM_NO_P Parameter: Tissue Value: Aerial
  misc_feature: MA Experiment 108527 PARAMETER Experiment Name: Zm_5mM_NO_P Parameter: Treatment Value: 5mM NO vs. No Treatment
  misc_feature: MA Experiment ID: 108534 Result: Up-regulated in Transcription
  misc_feature: MA Experiment 108534 PARAMETER Experiment Name: Zm_4deg_Cold_P Parameter: Age (hr) Value: 8
  misc_feature: MA Experiment 108534 PARAMETER Experiment Name: Zm_4deg_Cold_P Parameter: Organism Value: Zea mays
  misc_feature: MA Experiment 108534 PARAMETER Experiment Name: Zm_4deg_Cold_P Parameter: Plant Line Value: 35A19
  misc_feature: MA Experiment 108534 PARAMETER Experiment Name: Zm_4deg_Cold_P Parameter: Temperature (deg C) Value: 4 vs. 22
  misc_feature: MA Experiment 108534 PARAMETER Experiment Name: Zm_4deg_Cold_P Parameter: Timepoint (hr) Value: 6
  misc_feature: MA Experiment 108534 PARAMETER Experiment Name: Zm_4deg_Cold_P Parameter: Tissue Value: Aerial
  misc_feature: MA Experiment ID: 108543 Result: Up-regulated in Transcription
  misc_feature: MA Experiment ID: 20000492 Result: Down-regulated in Transcription
  misc_feature: MA Experiment 20000492 PARAMETER Experiment Name: Zm_Hybrid_Seed_Dev_P Parameter: DAP Value: 12
  misc_feature: MA Experiment 20000492 PARAMETER Experiment Name: Zm_Hybrid_Seed_Dev_P Parameter: Organism Value: Zea mays
  misc_feature: MA Experiment 20000492 PARAMETER Experiment Name: Zm_Hybrid_Seed_Dev_P Parameter: Plant Line Value: 35A19
  misc_feature: MA Experiment 20000492 PARAMETER Experiment Name: Zm_Hybrid_Seed_Dev_P Parameter: Tissue Value: Fert Kernel vs. Unfert Floret
  misc_feature: MA Experiment ID: 20000535 Result: Down-regulated in Transcription
  misc_feature: MA Experiment 20000535 PARAMETER Experiment Name: Zm_Hybrid_Seed_Dev_P Parameter: DAP Value: 30 vs. 12
  misc_feature: MA Experiment 20000535 PARAMETER Experiment Name: Zm_Hybrid_Seed_Dev_P Parameter: Organism Value: Zea mays
  misc_feature: MA Experiment 20000535 PARAMETER Experiment Name: Zm_Hybrid_Seed_Dev_P Parameter: Plant Line Value: 35A19
  misc_feature: MA Experiment 20000535 PARAMETER Experiment Name: Zm_Hybrid_Seed_Dev_P Parameter: Tissue Value: Embryo vs. Unfert Floret
  misc_feature: MA Experiment ID: 20000626 Result: Down-regulated in Transcription
  misc_feature: MA Experiment 20000626 PARAMETER Experiment Name: Zm_Herbicide-Treatments_P Parameter: Timepoint (hr) Value: 12
  misc_feature: MA Experiment 20000626 PARAMETER Experiment Name: Zm_Herbicide-Treatments_P Parameter: Tissue Value: Aerial
  misc_feature: MA Experiment 20000626 PARAMETER Experiment Name: Zm_Herbicide-Treatments_P Parameter: Treatment Value: Roundup vs. No Treatment
aggcagccaggcacccaatcaacggacggccagccggcagccgtcgtagcgggagccgggagaatagtaaaggacaaatcagacgaggaggagcgtggagcggggacagcctgcgctgcgctgccttgctccggccggccggccccccaccttagcccttgtcccggttccctcctccaccattcaaatctcctggcttcgtttcagttcgatttgaagcggggcggcagaggaggcagggggattgggtccggggacgacatttggcggcatcaaccacacagcacaggcacagcgcagcaccatgacgatggagggggcggtttccgacaacaccaagggcctggcgctcgccgtcgcctccagcgccttcatcggcgccagcttcatcctcaagaagatcggcctcctgcgagcagccaagtgcggcgaccgcgcaggtggcggaggacacacttacctctccgagcctctatggtgggcgggaatgaccacaatgctgcttggggaggtcgcaaacttcattgcttacatatttgcgcccggctgtactcgtgactccacttggggcgttaagcataatcgtaagttcagtgttggcgcactttgtgctcaaggagcggcttgagaagctcggggtccttggctgtgtgtcgtgcatagtaggttcagttgttgttgtcatgcatgctcctgaagagcatatgcctaactctgtcaaggaaatctggaacctagctactcaaccagggtttctagcatatgtggtgacagcattgttacttgtgggagcgctagtactcttctttgaacctcgatacggtcagactaacatcctgatatatctgggtatctgctcttcaatgggatcgctaacggtcgttagcatcaaagccattggtgttgccataaagcttacgttggatggggtgaatcaggctgcttatccatacacatggctttttcttatggttgcaattgtttgtggggtttctcaaataaattacctgaacaaggcattggatacctttaatctggctattgtctctcctatatattatgtaatgtttactacccttacaatagtggcaagtggaattatgtttaaggactgggctggtcaaagcttaagtagtattgcttgtgaattatgcggcctgataaccatcctttctgggacaattttgttgcacacagcagaggagggagccaacaattctgcagctttgttgccttggcctttggataaagggtctatatcatggtgtatcaacttaagcagtgacaatcttctaaagaatgtcgaagaggactacttcacagctctgcaaagttcacctgccccagtataatgaagaaactgataaatatctaaaagggaacatgcaaatcaaggtgtaaatcttaacagtgccagaaacctggcagttttgggtgaggngattgtacctg

SEQ ID NO: 15987 - protein, 222 aa, Zea mays subsp. mays
  peptide (1)..(222): Ceres Seq. ID no. 12359604
  misc_feature (1)..(174): Pfam Name: Protein of unknown function (DUF803) Pfam Description: Protein of unknown function (DUF803)
  misc_feature (1)..(182): Homolog of NCBI NO: 18399280 NR Description: expressed protein
  misc_feature (1)..(189): Homolog of NCBI NO: 20161440 NR Description: B1065E10.15 [Oryza sativa (japonica
  misc_feature (1)..(174): Homolog of NCBI NO: 25406128 NR Description: unknown protein F17M19.5 [imported] - Arabidopsis
  misc_feature (1)..(180): Homolog of NCBI NO: 21593618 NR Description: unknown [Arabidopsis thaliana]
  misc_feature (1)..(180): Homolog of NCBI NO: 15229534 NR Description: unknown protein; protein id: At3g23870.1
  misc_feature (1)..(180): Homolog of NCBI NO: 18414079 NR Description: expressed protein
  misc_feature (1)..(174): Homolog of NCBI NO: 25412015 NR Description: hypothetical protein At2g21120 [imported] -
  misc_feature (1)..(189): Homolog of NCBI NO: 18409942 NR Description: expressed protein
  misc_feature (1)..(190): Homolog of NCBI NO: 26449939 NR Description: unknown protein [Arabidopsis thaliana]
  misc_feature (1)..(174): Homolog of NCBI NO: 30681265 NR Description: expressed protein [Arabidopsis thaliana]
MHAPEEHMPNSVKEIWNLATQPGFLAYVVTALLLVGALVLFFEPRYGQTNILIYLGICSSMGSLTVVSIKAIGVAIKLTLDGVNQAAYPYTWLFLMVAIVCGVSQINYLNKALDTFNLAIVSPIYYVMFTTLTIVASGIMFKDWAGQSLSSIACELCGLITILSGTILLHTAEEGANNSAALLPWPLDKGSISWCINLSSDNLLKNVEEDYFTALQSSPAPV

SEQ ID NO: 15988 - protein, 215 aa, Zea mays subsp. mays
  peptide (1)..(215): Ceres Seq. ID no. 12359605
  misc_feature (1)..(167): Pfam Name: Protein of unknown function (DUF803) Pfam Description: Protein of unknown function (DUF803)
  misc_feature (1)..(175): Homolog of NCBI NO: 18399280 NR Description: expressed protein
  misc_feature (1)..(182): Homolog of NCBI NO: 20161440 NR Description: B1065E10.15 [Oryza sativa (japonica
  misc_feature (1)..(167): Homolog of NCBI NO: 25406128 NR Description: unknown protein F17M19.5 [imported] - Arabidopsis
  misc_feature (1)..(173): Homolog of NCBI NO: 21593618 NR Description: unknown [Arabidopsis thaliana]
  misc_feature (1)..(173): Homolog of NCBI NO: 15229534 NR Description: unknown protein; protein id: At3g23870.1
  misc_feature (1)..(173): Homolog of NCBI NO: 18414079 NR Description: expressed protein
  misc_feature (1)..(167): Homolog of NCBI NO: 25412015 NR Description: hypothetical protein At2g21120 [imported] -
  misc_feature (1)..(182): Homolog of NCBI NO: 18409942 NR Description: expressed protein
  misc_feature (1)..(183): Homolog of NCBI NO: 26449939 NR Description: unknown protein [Arabidopsis thaliana]
  misc_feature (1)..(167): Homolog of NCBI NO: 30681265 NR Description: expressed protein [Arabidopsis thaliana]
MPNSVKEIWNLATQPGFLAYVVTALLLVGALVLFFEPRYGQTNILIYLGICSSMGSLTVVSIKAIGVAIKLTLDGVNQAAYPYTWLFLMVAIVCGVSQINYLNKALDTFNLAIVSPIYYVMFTTLTIVASGIMFKDWAGQSLSSIACELCGLITILSGTILLHTAEEGANNSAALLPWPLDKGSISWCINLSSDNLLKNVEEDYFTALQSSPAPV

SEQ ID NO: 15989 - protein, 185 aa, Zea mays subsp. mays
  peptide (1)..(185): Ceres Seq. ID no. 12359606
RQPGTQSTDGQPAAVVAGAGRIVKDKSDEEERGAGTACAALPCSGRPAPHLSPCPGSLLHHSNLLASFQFDLKRGGRGGRGIGSGDDIWRHQPHSTGTAQHHDDGGGGFRQHQGPGARRRLQRLHRRQLHPQEDRPPASSQVRRPRRWRRTHLPLRASMVGGNDHNAAWGGRKLHCLHICARLYS

SEQ ID NO: 15990 - DNA, 1466 bp, Zea mays subsp. mays
  misc_feature (1)..(1466): Ceres Seq. ID no. 12404987
  misc_feature: MA Experiment ID: 20000535 Result: Up-regulated in Transcription
  misc_feature: MA Experiment 20000535 PARAMETER Experiment Name: Zm_Hybrid_Seed_Dev_P Parameter: DAP Value: 30 vs. 12
  misc_feature: MA Experiment 20000535 PARAMETER Experiment Name: Zm_Hybrid_Seed_Dev_P Parameter: Organism Value: Zea mays
  misc_feature: MA Experiment 20000535 PARAMETER Experiment Name: Zm_Hybrid_Seed_Dev_P Parameter: Plant Line Value: 35A19
  misc_feature: MA Experiment 20000535 PARAMETER Experiment Name: Zm_Hybrid_Seed_Dev_P Parameter: Tissue Value: Embryo vs. Unfert Floret
aaggacagcctcctcgtcccgtcctcccgcgccgccgcgacgaatgggccccaccaccgccgcgccacgctcgcgccgggaactggcgccggaggcccatgtggcggagccggcggcgtgtccatcgacgtcaacggcctgaagcggcgtggcggcgggaggcgctcgtgggtgcgcgtggacgcggcgacgggcgccgcggaggccgtcgaggtcgccaagccggcgttgatgcggcggctggacctgcccgcgcgggacctccgcctcctcgaccccctcttcgtctacccgtccgccatcctaggccgcgagcgcgccgtcgtctgcaacctcgagcacctgcggtgcatcatcaccgccgatgaggcgctcgttctgcgcgaacccgacgccgctgggggcgccgcagcggaggaggccgtgcggaggtacgtcgacgagctgcagcgacgcctcgtcgaccgcgccgacgacctgcctttcgagttcatcgcgctggaggtcgcgctggaggccgcttgctctttcctagactcgcaggctattgaattagaggctgaagcttacccattactagatgagctgacagcaaaaattagtaccctcaatttggaacgagtccgacgcctaaagagcaagctggttgcattgacaaggagagtacagaagagatgagatagagcaactgatggatgacgatggtgatatggctgaaatgtatctcactgagaagaagataagaatggaagcatcaatgttagatgatgaggaccttcagggaattggcaatagtcataatgggtttggttcatctctatcggctccagtttcaccagtttcgacaacccctgcaactcggaggcttgagaaggaattcagttttgccagaagcaggcacagcagcttcaagagctcagatagcagccagtacaatatagaagaactggaaatgttgttggaggcctactttgttgttatcgattacaccctcagcaagttgacttcgctaaaggagtatattgatgacacagaagatttcatcaacatacaactggataacgtccggaaccagctgatccaattcgagctgctcctgaccaccgccacgttcgtggtggccatcttcggggtggtctcgggggttttcggcatgaacttcgaggtccctctgttctcggttccgcacgcgttcgagtggaccctcgccataactggggtctgcggcgccgtcgtattctgctgcttcatctggtacttcaagaagaggaggtttttccccttgtaggtgaaagcttctcttctctcgccctgtcaccagagtccagacagcagcgtacgtatgagactgggtacggcaattgtacatgctgcattgttctcgaaatgcgctgtctgttcacgtgagcttttctccctttttaagctcacgccgctgatcgtgtgtagcttcaccggtctgctgt

SEQ ID NO: 15991 - protein, 225 aa, Zea mays subsp. mays
  peptide (1)..(225): Ceres Seq. ID no. 12404988
  misc_feature (55)..(224): Homolog of NCBI NO: 25360941 NR Description: MRS2-7 [Arabidopsis thaliana]
  misc_feature (45)..(224): Homolog of NCBI NO: 25360882 NR Description: MRS2-5 [Arabidopsis thaliana]
  misc_feature (45)..(224): Homolog of NCBI NO: 15227679 NR Description: hypothetical protein
  misc_feature (115)..(224): Homolog of NCBI NO: 18412911 NR Description: expressed protein
  misc_feature (33)..(153): Homolog of NCBI NO: 18412911 NR Description: expressed protein
  misc_feature (158)..(224): Homolog of NCBI NO: 21553824 NR Description: unknown [Arabidopsis thaliana]
  misc_feature (33)..(153): Homolog of NCBI NO: 21553824 NR Description: unknown [Arabidopsis thaliana]
  misc_feature (158)..(224): Homolog of NCBI NO: 18394312 NR Description: expressed protein
  misc_feature (5)..(153): Homolog of NCBI NO: 18394312 NR Description: expressed protein
  misc_feature (1)..(224): Homolog of NCBI NO: 38345033 NR Description: OSJNBa0029H02.17 [Oryza sativa (japonica
KDSLLVPSSRAAATNGPHHRRATLAPGTGAGGPCGGAGGVSIDVNGLKRRGGGRRSWVRVDAATGAAEAVEVAKPALMRRLDLPARDLRLLDPLFVYPSAILGRERAVVCNLEHLRCIITADEALVLREPDAAGGAAAEEAVRRYVDELQRRLVDRADDLPFEFIALEVALEAACSFLDSQAIELEAEAYPLLDELTAKISTLNLERVRRLKSKLVALTRRVQKR

SEQ ID NO: 15992 - protein, 198 aa, Zea mays subsp. mays
  peptide (1)..(198): Ceres Seq. ID no. 12404989
  misc_feature (7)..(156): Homolog of NCBI NO: 30698047 NR Description: expressed protein [Arabidopsis thaliana]
  misc_feature (7)..(193): Homolog of NCBI NO: 30682808 NR Description: expressed protein [Arabidopsis thaliana]
  misc_feature (7)..(189): Homolog of NCBI NO: 30698045 NR Description: expressed protein [Arabidopsis thaliana]
  misc_feature (7)..(193): Homolog of NCBI NO: 25360941 NR Description: MRS2-7 [Arabidopsis thaliana]
  misc_feature (1)..(198): Homolog of NCBI NO: 25360882 NR Description: MRS2-5 [Arabidopsis thaliana]
  misc_feature (1)..(198): Homolog of NCBI NO: 15227679 NR Description: hypothetical protein
  misc_feature (1)..(198): Homolog of NCBI NO: 18412911 NR Description: expressed protein
  misc_feature (1)..(198): Homolog of NCBI NO: 21553824 NR Description: unknown [Arabidopsis thaliana]
  misc_feature (1)..(198): Homolog of NCBI NO: 18394312 NR Description: expressed protein
  misc_feature (1)..(198): Homolog of NCBI NO: 38345033 NR Description: OSJNBa0029H02.17 [Oryza sativa (japonica
MDDDGDMAEMYLTEKKIRMEASMLDDEDLQGIGNSHNGFGSSLSAPVSPVSTTPATRRLEKEFSFARSRHSSFKSSDSSQYNIEELEMLLEAYFVVIDYTLSKLTSLKEYIDDTEDFINIQLDNVRNQLIQFELLLTTATFVVAIFGVVSGVFGMNFEVPLFSVPHAFEWTLAITGVCGAVVFCCFIWYFKKRRFFPL

SEQ ID NO: 15993 - protein, 192 aa, Zea mays subsp. mays
  peptide (1)..(192): Ceres Seq. ID no. 12404990
  misc_feature (1)..(150): Homolog of NCBI NO: 30698047 NR Description: expressed protein [Arabidopsis thaliana]
  misc_feature (1)..(187): Homolog of NCBI NO: 30682808 NR Description: expressed protein [Arabidopsis thaliana]
  misc_feature (1)..(183): Homolog of NCBI NO: 30698045 NR Description: expressed protein [Arabidopsis thaliana]
  misc_feature (1)..(187): Homolog of NCBI NO: 25360941 NR Description: MRS2-7 [Arabidopsis thaliana]
  misc_feature (1)..(192): Homolog of NCBI NO: 25360882 NR Description: MRS2-5 [Arabidopsis thaliana]
  misc_feature (1)..(192): Homolog of NCBI NO: 15227679 NR Description: hypothetical protein
  misc_feature (1)..(192): Homolog of NCBI NO: 18412911 NR Description: expressed protein
  misc_feature (1)..(192): Homolog of NCBI NO: 21553824 NR Description: unknown [Arabidopsis thaliana]
  misc_feature (1)..(192): Homolog of NCBI NO: 18394312 NR Description: expressed protein
  misc_feature (1)..(192): Homolog of NCBI NO: 38345033 NR Description: OSJNBa0029H02.17 [Oryza sativa (japonica
MAEMYLTEKKIRMEASMLDDEDLQGIGNSHNGFGSSLSAPVSPVSTTPATRRLEKEFSFARSRHSSFKSSDSSQYNIEELEMLLEAYFVVIDYTLSKLTSLKEYIDDTEDFINIQLDNVRNQLIQFELLLTTATFVVAIFGVVSGVFGMNFEVPLFSVPHAFEWTLAITGVCGAVVFCCFIWYFKKRRFFPL

SEQ ID NO: 15994 - DNA, 1421 bp, Zea mays subsp. mays
  misc_feature (1)..(1421): Ceres Seq. ID no. 12407513
  misc_feature: MA Experiment ID: 108543 Result: Down-regulated in Transcription
  misc_feature: MA Experiment ID: 108544 Result: Up-regulated in Transcription
  misc_feature: MA Experiment ID: 20000479 Result: Down-regulated in Transcription
  misc_feature: MA Experiment 20000479 PARAMETER Experiment Name: Zm_Drought_P Parameter: Age (day) Value: 10
  misc_feature: MA Experiment 20000479 PARAMETER Experiment Name: Zm_Drought_P Parameter: Organism Value: Zea mays
  misc_feature: MA Experiment 20000479 PARAMETER Experiment Name: Zm_Drought_P Parameter: Plant Line Value: 35A19
  misc_feature: MA Experiment 20000479 PARAMETER Experiment Name: Zm_Drought_P Parameter: Timepoint (hr) Value: 48
  misc_feature: MA Experiment 20000479 PARAMETER Experiment Name: Zm_Drought_P Parameter: Tissue Value: Aerial
  misc_feature: MA Experiment 20000479 PARAMETER Experiment Name: Zm_Drought_P Parameter: Treatment Value: Drought vs. No Drought
  misc_feature: MA Experiment ID: 20000492 Result: Up-regulated in Transcription
  misc_feature: MA Experiment 20000492 PARAMETER Experiment Name: Zm_Hybrid_Seed_Dev_P Parameter: DAP Value: 12
  misc_feature: MA Experiment 20000492 PARAMETER Experiment Name: Zm_Hybrid_Seed_Dev_P Parameter: Organism Value: Zea mays
  misc_feature: MA Experiment 20000492 PARAMETER Experiment Name: Zm_Hybrid_Seed_Dev_P Parameter: Plant Line Value: 35A19
  misc_feature: MA Experiment 20000492 PARAMETER Experiment Name: Zm_Hybrid_Seed_Dev_P Parameter: Tissue Value: Fert Kernel vs. Unfert Floret
  misc_feature: MA Experiment ID: 20000535 Result: Up-regulated in Transcription
  misc_feature: MA Experiment 20000535 PARAMETER Experiment Name: Zm_Hybrid_Seed_Dev_P Parameter: DAP Value: 30 vs. 12
  misc_feature: MA Experiment 20000535 PARAMETER Experiment Name: Zm_Hybrid_Seed_Dev_P Parameter: Organism Value: Zea mays
  misc_feature: MA Experiment 20000535 PARAMETER Experiment Name: Zm_Hybrid_Seed_Dev_P Parameter: Plant Line Value: 35A19
  misc_feature: MA Experiment 20000535 PARAMETER Experiment Name: Zm_Hybrid_Seed_Dev_P Parameter: Tissue Value: Embryo vs. Unfert Floret
acaaaccataaaccaagaagctgctgcgggacgttcaaatcaaacatctctaccctctccttccagcgaaatggcaagagcggcggctcctccgcctctgcaccggctgcccggtctggccttgctgtgccttgccgtggcagtttgcttctccggcggcgaaaacgccgcggcggcggcctggacgaggaagatagtcggcgttcacgagctcagggtgggggatttctccgtcaaggtcaccaactggggggcgactctcatgtccgtcatcctccccgactccaaagggaacttgggcgacgttgtgctcggctacgacaccgtcgctgaatacgtcaacggcaccgcctacttcggcggtctgatcggccgcgtggccaacagggtcgccggcgcgcggttcacgctggacgggaaagcctaccgcctctaccgcaacgacggcaacaactcgctccacggtggccaccgggggttcagcaaggtcgtatggacggtgaaggagcacgtcggcggcggtgactccccgtacatcacgctctactaccatagcttcgacggggagcaagggttccccggcgacctggacgtgtacgtgacgtaccgtctgtcgcgcccgtacgtgctgagcgtgcgcatgaacgccacggcgcggagcagggccaccccggtgaacctcgcgcaccacgcgtactggaacctcggcggccacggcagcgggcccgtcctcggcgaaacggtgcagctcttcgcgtcgcggtacacgccggtggacgccgcgctcgtgccgacgggcgcgctggcgcccgtggccggcacgccctacgacttccgcgcgccggcgcccgtgggggcgcgcctgggcggacctgcggccgcgccgtggcactggcggcgtcgcgggctacgacaccaactacgccgtggacggcgccgcgtcgccgtcgctgcggccggtggcgcgcgtntgggacggcgccacggggcgggccatggagctgtgggcggaccagcccggggtgcagttctacaccagcaacgggctcgctggcgtcaggggcaagggcggtagcgtgtaccggcggtacgccgcgctgtgcctcgagacgcaggggttccccgatgccgtcaaccacccgagcttcccgtcgcagatcgtgaggccgggcaaggtgtatagccatgacatgctctttaagttctccttcgcctagctacaagactactggtgcatgcggttcatgcgtacacctgcgcagtgctgtgtcaccttgatgtgtcttgattagactcctccgtctactctcaagaactttacatccccaaataacagcgtgctgcccggtacgagctagggttttatatgtatgcgcgggcgcggcttatgctcgataatttccgtctcattggttggccgt

SEQ ID NO: 15995 - protein, 357 aa, Zea mays subsp. mays
  peptide (1)..(357): Ceres Seq. ID no. 12407514
  misc_feature (67)..(288): Pfam Name: Aldose 1-epimerase Pfam Description: Aldose 1-epimerase
  misc_feature (57)..(288): Homolog of NCBI NO: 7430313 NR Description: probable aldose 1-epimerase (EC 5.1.3.3) - common
  misc_feature (41)..(288): Homolog of NCBI NO: 15824565 NR Description: non-cell-autonomous protein pathway1;
  misc_feature (39)..(288): Homolog of NCBI NO: 40882679 NR Description: putative aldose 1-epimerase
  misc_feature (39)..(288): Homolog of NCBI NO: 15824567 NR Description: non-cell-autonomous protein pathway2;
  misc_feature (66)..(288): Homolog of NCBI NO: 21537069 NR Description: aldose 1-epimerase-like protein [Arabidopsis
  misc_feature (66)..(284): Homolog of NCBI NO: 15242223 NR Description: putative aldose 1-epimerase - like protein
  misc_feature (66)..(288): Homolog of NCBI NO: 15228261 NR Description: aldose 1-epimerase - like protein
  misc_feature (39)..(288): Homolog of NCBI NO: 38567884 NR Description: OSJNBa0036B21.19 [Oryza sativa (japonica
  misc_feature (28)..(163): Homolog of NCBI NO: 38567883 NR Description: OSJNBa0036B21.18 [Oryza sativa (japonica
  misc_feature (152)..(288): Homolog of NCBI NO: 38567883 NR Description: OSJNBa0036B21.18 [Oryza sativa (japonica
  misc_feature (324)..(324): Xaa is any aa, unknown or other
QTINQEAAAGRSNQTSLPSPSSEMARAAAPPPLHRLPGLALLCLAVAVCFSGGENAAAAAWTRKIVGVHELRVGDFSVKVTNWGATLMSVILPDSKGNLGDVVLGYDTVAEYVNGTAYFGGLIGRVANRVAGARFTLDGKAYRLYRNDGNNSLHGGHRGFSKVVWTVKEHVGGGDSPYITLYYHSFDGEQGFPGDLDVYVTYRLSRPYVLSVRMNATARSRATPVNLAHHAYWNLGGHGSGPVLGETVQLFASRYTPVDAALVPTGALAPVAGTPYDFRAPAPVGARLGGPAAAPWHWRRRGLRHQLRRGRRRVAVAAAGGARXGRRHGAGHGAVGGPARGAVLHQQRARWRQGQGR

SEQ ID NO: 15996 - protein, 334 aa, Zea mays subsp. mays
  peptide (1)..(334): Ceres Seq. ID no. 12407515
  misc_feature (44)..(265): Pfam Name: Aldose 1-epimerase Pfam Description: Aldose 1-epimerase
  misc_feature (43)..(265): Homolog of NCBI NO: 15228261 NR Description: aldose 1-epimerase - like protein
  misc_feature (43)..(265): Homolog of NCBI NO: 21537069 NR Description: aldose 1-epimerase-like protein [Arabidopsis
  misc_feature (43)..(261): Homolog of NCBI NO: 15242223 NR Description: putative aldose 1-epimerase - like protein
  misc_feature (34)..(265): Homolog of NCBI NO: 7430313 NR Description: probable aldose 1-epimerase (EC 5.1.3.3) - common
  misc_feature (18)..(265): Homolog of NCBI NO: 15824565 NR Description: non-cell-autonomous protein pathway1;
  misc_feature (16)..(265): Homolog of NCBI NO: 40882679 NR Description: putative aldose 1-epimerase
  misc_feature (16)..(265): Homolog of NCBI NO: 15824567 NR Description: non-cell-autonomous protein pathway2;
  misc_feature (16)..(265): Homolog of NCBI NO: 38567884 NR Description: OSJNBa0036B21.19 [Oryza sativa (japonica
  misc_feature (5)..(140): Homolog of NCBI NO: 38567883 NR Description: OSJNBa0036B21.18 [Oryza sativa (japonica
  misc_feature (129)..(265): Homolog of NCBI NO: 38567883 NR Description: OSJNBa0036B21.18 [Oryza sativa (japonica
  misc_feature (301)..(301): Xaa is any aa, unknown or other
MARAAAPPPLHRLPGLALLCLAVAVCFSGGENAAAAAWTRKIVGVHELRVGDFSVKVTNWGATLMSVILPDSKGNLGDVVLGYDTVAEYVNGTAYFGGLIGRVANRVAGARFTLDGKAYRLYRNDGNNSLHGGHRGFSKVVWTVKEHVGGGDSPYITLYYHSFDGEQGFPGDLDVYVTYRLSRPYVLSVRMNATARSRATPVNLAHHAYWNLGGHGSGPVLGETVQLFASRYTPVDAALVPTGALAPVAGTPYDFRAPAPVGARLGGPAAAPWHWRRRGLRHQLRRGRRRVAVAAAGGARXGRRHGAGHGAVGGPARGAVLHQQRARWRQGQGR

SEQ ID NO: 15997 - protein, 270 aa, Zea mays subsp. mays
  peptide (1)..(270): Ceres Seq. ID no. 12407516
  misc_feature (1)..(201): Pfam Name: Aldose 1-epimerase Pfam Description: Aldose 1-epimerase
  misc_feature (1)..(201): Homolog of NCBI NO: 15228261 NR Description: aldose 1-epimerase - like protein
  misc_feature (1)..(201): Homolog of NCBI NO: 21537069 NR Description: aldose 1-epimerase-like protein [Arabidopsis
  misc_feature (1)..(197): Homolog of NCBI NO: 15242223 NR Description: putative aldose 1-epimerase - like protein
  misc_feature (1)..(201): Homolog of NCBI NO: 7430313 NR Description: probable aldose 1-epimerase (EC 5.1.3.3) - common
  misc_feature (1)..(201): Homolog of NCBI NO: 15824565 NR Description: non-cell-autonomous protein pathway1;
  misc_feature (1)..(201): Homolog of NCBI NO: 40882679 NR Description: putative aldose 1-epimerase
  misc_feature (1)..(201): Homolog of NCBI NO: 15824567 NR Description: non-cell-autonomous protein pathway2;
  misc_feature (1)..(201): Homolog of NCBI NO: 38567884 NR Description: OSJNBa0036B21.19 [Oryza sativa (japonica
  misc_feature (1)..(76): Homolog of NCBI NO: 38567883 NR Description: OSJNBa0036B21.18 [Oryza sativa (japonica
  misc_feature (65)..(201): Homolog of NCBI NO: 38567883 NR Description: OSJNBa0036B21.18 [Oryza sativa (japonica
  misc_feature (237)..(237): Xaa is any aa, unknown or other
MSVILPDSKGNLGDVVLGYDTVAEYVNGTAYFGGLIGRVANRVAGARFTLDGKAYRLYRNDGNNSLHGGHRGFSKVVWTVKEHVGGGDSPYITLYYHSFDGEQGFPGDLDVYVTYRLSRPYVLSVRMNATARSRATPVNLAHHAYWNLGGHGSGPVLGETVQLFASRYTPVDAALVPTGALAPVAGTPYDFRAPAPVGARLGGPAAAPWHWRRRGLRHQLRRGRRRVAVAAAGGARXGRRHGAGHGAVGGPARGAVLHQQRARWRQGQGR

SEQ ID NO: 15998 - DNA, 1067 bp, Zea mays subsp. mays
  misc_feature (1)..(1067): Ceres Seq. ID no. 12406572
  misc_feature: MA Experiment ID: 108529 Result: Down-regulated in Transcription
  misc_feature: MA Experiment 108529 PARAMETER Experiment Name: Zm_Imbibed_Seeds_P Parameter: Age (day) Value: 5 vs. 2
  misc_feature: MA Experiment 108529 PARAMETER Experiment Name: Zm_Imbibed_Seeds_P Parameter: Organism Value: Zea mays
  misc_feature: MA Experiment 108529 PARAMETER Experiment Name: Zm_Imbibed_Seeds_P Parameter: Plant Line Value: 35A19
  misc_feature: MA Experiment 108529 PARAMETER Experiment Name: Zm_Imbibed_Seeds_P Parameter: Tissue Value: Roots vs. Embryo
  misc_feature: MA Experiment ID: 108534 Result: Up-regulated in Transcription
  misc_feature: MA Experiment 108534 PARAMETER Experiment Name: Zm_4deg_Cold_P Parameter: Age (hr) Value: 8
  misc_feature: MA Experiment 108534 PARAMETER Experiment Name: Zm_4deg_Cold_P Parameter: Organism Value: Zea mays
  misc_feature: MA Experiment 108534 PARAMETER Experiment Name: Zm_4deg_Cold_P Parameter: Plant Line Value: 35A19
  misc_feature: MA Experiment 108534 PARAMETER Experiment Name: Zm_4deg_Cold_P Parameter: Temperature (deg C) Value: 4 vs. 22
  misc_feature: MA Experiment 108534 PARAMETER Experiment Name: Zm_4deg_Cold_P Parameter: Timepoint (hr) Value: 6
  misc_feature: MA Experiment 108534 PARAMETER Experiment Name: Zm_4deg_Cold_P Parameter: Tissue Value: Aerial
  misc_feature: MA Experiment ID: 108543 Result: Up-regulated in Transcription
  misc_feature: MA Experiment ID: 108544 Result: Up-regulated in Transcription
  misc_feature: MA Experiment ID: 108545 Result: Down-regulated in Transcription
  misc_feature: MA Experiment 108545 PARAMETER Experiment Name: Zm_Imbibed_Seeds_P Parameter: Age (day) Value: 3 vs. 2
  misc_feature: MA Experiment 108545 PARAMETER Experiment Name: Zm_Imbibed_Seeds_P Parameter: Organism Value: Zea mays
  misc_feature: MA Experiment 108545 PARAMETER Experiment Name: Zm_Imbibed_Seeds_P Parameter: Plant Line Value: 35A19
  misc_feature: MA Experiment 108545 PARAMETER Experiment Name: Zm_Imbibed_Seeds_P Parameter: Tissue Value: Aerial vs. Embryo
  misc_feature: MA Experiment ID: 108546 Result: Down-regulated in Transcription
  misc_feature: MA Experiment 108546 PARAMETER Experiment Name: Zm_Imbibed_Seeds_P Parameter: Age (day) Value: 3 vs. 2
  misc_feature: MA Experiment 108546 PARAMETER Experiment Name: Zm_Imbibed_Seeds_P Parameter: Organism Value: Zea mays
  misc_feature: MA Experiment 108546 PARAMETER Experiment Name: Zm_Imbibed_Seeds_P Parameter: Plant Line Value: 35A19
  misc_feature: MA Experiment 108546 PARAMETER Experiment Name: Zm_Imbibed_Seeds_P Parameter: Tissue Value: Roots vs. Embryo
  misc_feature: MA Experiment ID: 108688 Result: Down-regulated in Transcription
  misc_feature: MA Experiment 108688 PARAMETER Experiment Name: Zm_Embryos-Flowers__P Parameter: Tissue Value: Immature Flowers vs. Aerial+
actcccggcctcccctcccttgccgtccacttcttcctccaccacagtcatcagtggcgttatcctcttcgttctcgcctccctggttgttgttggctgggtgttggcgagctgggagtagagaccgagaagtggagcggccatgaagatccagtgcgacgcgtgcgagggcgcggctgccacggtggtgtgctgcgccgacgaggccgcgctgtgcgcgcgctgcgacgtcgagatccacgccgccaacaagctcgccagcaagcaccagcgcctcccgctcgaggcgctctccgccaagctcccgcgctgcgacgtctgccaggagaaagcggcgttcatcttctgcgtggaggaccgggcgctcttctgccaggactgcgacgagcccatccacgtcccgggcacgctctccgggaaccaccagcgctacctggccaccggcatccgcgtcggcctcgcctcggcttccgcctgcagcgacgcctgcgacgcccacgactccgaccaccacgccccgcccaaggccaccatcgagccaccgcacgccgccgtctccgccgcggtgcagcaggtgccctcgccgccgcagttcctgccgcagggctgggccgtcgacgagctcctgcagttctccgactacgagtccagcgacaagctgcacaaggagccgacgctcgggttcaaggagctggagtggttcgccgacatcgacctcttccacgagcaggcgcccaaagccagcaggacgttggcggaggtgccggagcttttcggataccaggcggcgaacgacgcggcgtactacaggccggccaaagccgccggcggcggcggcgccggggttcgccagagcaagaaggcccggatcgaggtcaccgacgacgaggactaccttatagtccctgatcttggttaaataagagagcgcaggagttttgtttcttctcctgatgtgtaccagagaagaattttactgtgtacaagctagtgtcatgtgttgtgcatctttgactgtagtgtcgctcaattctgaacatctattaagccacttttgttgctatgcc

SEQ ID NO: 15999 - protein, 302 aa, Zea mays subsp. mays
  peptide (1)..(302): Ceres Seq. ID no. 12406573
TPGLPSLAVHFFLHHSHQWRYPLRSRLPGCCWLGVGELGVETEKWSGHEDPVRRVRGRGCHGGVLRRRGRAVRALRRRDPRRQQARQQAPAPPARGALRQAPALRRLPGESGVHLLRGGPGALLPGLRRAHPRPGHALREPPALPGHRHPRRPRLGFRLQRRLRRPRLRPPRPAQGHHRATARRRLRRGAAGALAAAVPAAGLGRRRAPAVLRLRVQRQAAQGADARVQGAGVVRRHRPLPRAGAQSQQDVGGGAGAFRIPGGERRGVLQAGQSRRRRRRRGSPEQEGPDRGHRRRGLPYSP

SEQ ID NO: 16000 - protein, 258 aa, Zea mays subsp. mays
  peptide (1)..(258): Ceres Seq. ID no. 12406574
  misc_feature (52)..(99): Pfam Name: B-box zinc finger Pfam Description: B-box zinc finger
  misc_feature (1)..(154): Homolog of NCBI NO: 34903708 NR Description: putative zinc-finger protein
  misc_feature (1)..(119): Homolog of NCBI NO: 7489603 NR Description: zinc-finger protein R2931 [imported] - rice
  misc_feature (1)..(108): Homolog of NCBI NO: 18412037 NR Description: CONSTANS B-box zinc finger family protein
  misc_feature (1)..(108): Homolog of NCBI NO: 17433085 NR Description: Zinc finger protein constans-like 7
  misc_feature (1)..(173): Homolog of NCBI NO: 30679541 NR Description: salt-tolerance protein [Arabidopsis thaliana]
  misc_feature (1)..(227): Homolog of NCBI NO: 25408150 NR Description: hypothetical protein At2g31380 [imported] -
  misc_feature (1)..(227): Homolog of NCBI NO: 18402646 NR Description: salt tolerance-like protein
  misc_feature (1)..(258): Homolog of NCBI NO: 15221367 NR Description: salt-tolerance protein
  misc_feature (1)..(258): Homolog of NCBI NO: 3618310 NR Description: zinc finger protein [Oryza sativa (japonica
  misc_feature (1)..(258): Homolog of NCBI NO: 3618314 NR Description: zinc finger protein [Oryza sativa (japonica
MKIQCDACEGAAATVVCCADEAALCARCDVEIHAANKLASKHQRLPLEALSAKLPRCDVCQEKAAFIFCVEDRALFCQDCDEPIHVPGTLSGNHQRYLATGIRVGLASASACSDACDAHDSDHHAPPKATIEPPHAAVSAAVQQVPSPPQFLPQGWAVDELLQFSDYESSDKLHKEPTLGFKELEWFADIDLFHEQAPKASRTLAEVPELFGYQAANDAAYYRPAKAAGGGGAGVRQSKKARIEVTDDEDYLIVPDLG

SEQ ID NO: 16001 - DNA, 2011 bp, Zea mays subsp. mays
  misc_feature (1)..(2011): Ceres Seq. ID no. 12358730
  misc_feature: MA Experiment ID: 108528 Result: Up-regulated in Transcription
  misc_feature: MA Experiment 108528 PARAMETER Experiment Name: Zm_Imbibed_Seeds_P Parameter: Age (day) Value: 5 vs. 2
  misc_feature: MA Experiment 108528 PARAMETER Experiment Name: Zm_Imbibed_Seeds_P Parameter: Organism Value: Zea mays
  misc_feature: MA Experiment 108528 PARAMETER Experiment Name: Zm_Imbibed_Seeds_P Parameter: Plant Line Value: 35A19
  misc_feature: MA Experiment 108528 PARAMETER Experiment Name: Zm_Imbibed_Seeds_P Parameter: Tissue Value: Aerial vs. Embryo
  misc_feature: MA Experiment ID: 108545 Result: Up-regulated in Transcription
  misc_feature: MA Experiment 108545 PARAMETER Experiment Name: Zm_Imbibed_Seeds_P Parameter: Age (day) Value: 3 vs. 2
  misc_feature: MA Experiment 108545 PARAMETER Experiment Name: Zm_Imbibed_Seeds_P Parameter: Organism Value: Zea mays
  misc_feature: MA Experiment 108545 PARAMETER Experiment Name: Zm_Imbibed_Seeds_P Parameter: Plant Line Value: 35A19
  misc_feature: MA Experiment 108545 PARAMETER Experiment Name: Zm_Imbibed_Seeds_P Parameter: Tissue Value: Aerial vs. Embryo
  misc_feature: MA Experiment ID: 108547 Result: Up-regulated in Transcription
  misc_feature: MA Experiment 108547 PARAMETER Experiment Name: Zm_Imbibed_Seeds_P Parameter: Age (day) Value: 4 vs. 2
  misc_feature: MA Experiment 108547 PARAMETER Experiment Name: Zm_Imbibed_Seeds_P Parameter: Organism Value: Zea mays
  misc_feature: MA Experiment 108547 PARAMETER Experiment Name: Zm_Imbibed_Seeds_P Parameter: Plant Line Value: 35A19
  misc_feature: MA Experiment 108547 PARAMETER Experiment Name: Zm_Imbibed_Seeds_P Parameter: Tissue Value: Aerial vs. Embryo
  misc_feature: MA Experiment ID: 20000487 Result: Up-regulated in Transcription
  misc_feature: MA Experiment 20000487 PARAMETER Experiment Name: Zm_50mM_NH4NO3_L_to_H_P Parameter: Organism Value: Zea mays
  misc_feature: MA Experiment 20000487 PARAMETER Experiment Name: Zm_50mM_NH4NO3_L_to_H_P Parameter: Timepoint (hr) Value: 4
  misc_feature: MA Experiment 20000487 PARAMETER Experiment Name: Zm_50mM_NH4NO3_L_to_H_P Parameter: Tissue Value: Leaves
  misc_feature: MA Experiment 20000487 PARAMETER Experiment Name: Zm_50mM_NH4NO3_L_to_H_P Parameter: Treatment Value: 50mM NH4NO3 vs. 100mM Mannitol
ctctttcgatagctggcgaaggcgcggcgcgcagggccagtagcaaccctcccatggcctacgctgcgcctcccatggcgtcgtccctcaccgcctcccacccccctctttccccgtcccacctcataacccatccgcatcgctgccctgcgcgccccaaccccaccaccggcctcctccgcctcaccccgtctcgccgccgcggtcgtccccccgtggccgtccgcctcgcaatatctgcctcgtccacctcagccccgcccccgtcggcggatcggtcggaggccgcgtcgtcgctggagagatacctctcggcgacggtgacgggagcggtgatgggaacgggggcggccccaccagcttcggccccgccgcgcgccccgccggcgatgaaggggggacggaagcagtatagcgcgttgggggctgtcacgctcgagaaggccaagctcgatctctcccagcgccgcaagaatatcatgcccgagttggcgacaggtggtggtggtggagatattggaaaaaggatcggtcatggtgggggtgatggtggtgatgatgatggtgacgatgatgactactttgatgattttgatgagggagaggaagaaggtgggcttttcaggaggcgaattgttgtacaagagctattcaatagggagttcgtagaagctgtgttgcaagaatggtacaagacgatgagtgatttgcctaccggtcttcgccaagcttgtgagatgggtttggtgagttctgcacagatggtacgttacttgtcaatatttgcaagacctacaaacgctaggtccttctcaagagctcttccaggctggctttccagaggtcttgttggaaggacacttgcagatccatcattcccacataaaatgtctttggagtttatagctaccattgcgtcatctatttggtgtgaaatgaatattcgcaaagagaggtttaaacaagaatgggatttggtgattgttaatgctttgactgcagcttgttgcaacttgatggttcttggacttttagcaccatgccgttcatatgcgagtacatctcgatttgacttccaaaatgcaattgagaaacttccgaacaacatatttgagaagagctatcctttgagagagtttgatctagcaaaacgaatcagtgcattcttttataaagctgctgagcttagtctggtcgggtttgtagctggctctgtgcaagggggtatgtcaatagtcttgtccgcaagaaaagaaaggaggttatcggtgactattccctctatcagcaccaatgctcttggttatggagctttcctaggactctatgctaacttgcgttatcaattgctatgtggagtagaccaatatatggtcaagcgcttcgatgttttgggtgtggcaatcttcttcagcacagcagcaagactgatgaatattcagattggtgaggcatcaaggaggacttggcttggcgaggaagctgatccacagtactcagatcgactgttgagagcatacaagagacctgtggaggttgacgcggaccaatcaaggtggtttatatccaaggatgcaattgtatctggccttggtcttctaggtatcaagcagggtggacctgaggcaacattttctaagtctcgtcgaaagagagtcatccgcaaaaaggtcacttcaggttgagtttagtggatttggatagcaatgctggaacaattttgcttctgttccactatgccagagggaggtctacccaaattatggtaaatgagaaaaaggtatcaagtcaaccagcacgtggtctgtcggcgaagggatcaaagggtttgttactgggaagggttagttaaaaggtgccaattactattttataatttaattgcagttatttaaggtaagaaaatatgttgttttcttgtattgctgtgaggcaaatagacacgcttagtggtagttttgtaagattgttaatgtactgactttacatgagaaatggattctgcattttt

SEQ ID NO: 16002 - protein, 560 aa, Zea mays subsp. mays
  peptide (1)..(560): Ceres Seq. ID no. 12358731
  misc_feature (2)..(141): Pfam Name: Glycoprotein GG/GX Pfam Description: Glycoprotein GG/GX
  misc_feature (170)..(417): Homolog of NCBI NO: 30687283 NR Description: expressed protein [Arabidopsis thaliana]
  misc_feature (217)..(458): Homolog of NCBI NO: 18405375 NR Description: chloroplast lumen common protein family
  misc_feature (217)..(456): Homolog of NCBI NO: 22331818 NR Description: chloroplast lumen common protein family
  misc_feature (282)..(478): Homolog of NCBI NO: 6934300 NR Description: unknown [Euphorbia esula]
  misc_feature (170)..(478): Homolog of NCBI NO: 30687286 NR Description: expressed protein [Arabidopsis thaliana]
  misc_feature (162)..(478): Homolog of NCBI NO: 34900644 NR Description: hypothetical protein~similar to Arabidopsis
  misc_feature (162)..(478): Homolog of NCBI NO: 34395170 NR Description: chloroplast lumen common protein family-like
  misc_feature (158)..(489): Homolog of NCBI NO: 15242979 NR Description: putative protein
  misc_feature (215)..(559): Homolog of NCBI NO: 9759209 NR Description: gb|AAD25674.1~gene_id:MXC17.8~similar to unknown
  misc_feature (52)..(559): Homolog of NCBI NO: 22327037 NR Description: putative protein
LSIAGEGAARRASSNPPMAYAAPPMASSLTASHPPLSPSHLITHPHRCPARPNPTTGLLRLTPSRRRGRPPVAVRLAISASSTSAPPPSADRSEAASSLERYLSATVTGAVMGTGAAPPASAPPRAPPAMKGGRKQYSALGAVTLEKAKLDLSQRRKNIMPELATGGGGGDIGKRIGHGGGDGGDDDGDDDDYFDDFDEGEEEGGLFRRRIVVQELFNREFVEAVLQEWYKTMSDLPTGLRQACEMGLVSSAQMVRYLSIFARPTNARSFSRALPGWLSRGLVGRTLADPSFPHKMSLEFIATIASSIWCEMNIRKERFKQEWDLVIVNALTAACCNLMVLGLLAPCRSYASTSRFDFQNAIEKLPNNIFEKSYPLREFDLAKRISAFFYKAAELSLVGFVAGSVQGGMSIVLSARKERRLSVTIPSISTNALGYGAFLGLYANLRYQLLCGVDQYMVKRFDVLGVAIFFSTAARLMNIQIGEASRRTWLGEEADPQYSDRLLRAYKRPVEVDADQSRWFISKDAIVSGLGLLGIKQGGPEATFSKSRRKRVIRKKVTSG

SEQ ID NO: 16003 - protein, 543 aa, Zea mays subsp. mays
  peptide (1)..(543): Ceres Seq. ID no. 12358732
  misc_feature (1)..(124): Pfam Name: Glycoprotein GG/GX Pfam Description: Glycoprotein GG/GX
  misc_feature (153)..(400): Homolog of NCBI NO: 30687283 NR Description: expressed protein [Arabidopsis thaliana]
  misc_feature (200)..(441): Homolog of NCBI NO: 18405375 NR Description: chloroplast lumen common protein family
  misc_feature (200)..(439): Homolog of NCBI NO: 22331818 NR Description: chloroplast lumen common protein family
  misc_feature (265)..(461): Homolog of NCBI NO: 6934300 NR Description: unknown [Euphorbia esula]
  misc_feature (153)..(461): Homolog of NCBI NO: 30687286 NR Description: expressed protein [Arabidopsis thaliana]
  misc_feature (145)..(461): Homolog of NCBI NO: 34900644 NR Description: hypothetical protein~similar to Arabidopsis
  misc_feature (145)..(461): Homolog of NCBI NO: 34395170 NR Description: chloroplast lumen common protein family-like
  misc_feature (141)..(472): Homolog of NCBI NO: 15242979 NR Description: putative protein
  misc_feature (198)..(542): Homolog of NCBI NO: 9759209 NR Description: gb|AAD25674.1~gene_id:MXC17.8~similar to unknown
  misc_feature (35)..(542): Homolog of NCBI NO: 22327037 NR Description: putative protein
MAYAAPPMASSLTASHPPLSPSHLITHPHRCPARPNPTTGLLRLTPSRRRGRPPVAVRLAISASSTSAPPPSADRSEAASSLERYLSATVTGAVMGTGAAPPASAPPRAPPAMKGGRKQYSALGAVTLEKAKLDLSQRRKNIMPELATGGGGGDIGKRIGHGGGDGGDDDGDDDDYFDDFDEGEEEGGLFRRRIVVQELFNREFVEAVLQEWYKTMSDLPTGLRQACEMGLVSSAQMVRYLSIFARPTNARSFSRALPGWLSRGLVGRTLADPSFPHKMSLEFIATIASSIWCEMNIRKERFKQEWDLVIVNALTAACCNLMVLGLLAPCRSYASTSRFDFQNAIEKLPNNIFEKSYPLREFDLAKRISAFFYKAAELSLVGFVAGSVQGGMSIVLSARKERRLSVTIPSISTNALGYGAFLGLYANLRYQLLCGVDQYMVKRFDVLGVAIFFSTAARLMNIQIGEASRRTWLGEEADPQYSDRLLRAYKRPVEVDADQSRWFISKDAIVSGLGLLGIKQGGPEATFSKSRRKRVIRKKVTSG

SEQ ID NO: 16004 - protein, 536 aa, Zea mays subsp. mays
  peptide (1)..(536): Ceres Seq. ID no. 12358733
  misc_feature (1)..(117): Pfam Name: Glycoprotein GG/GX Pfam Description: Glycoprotein GG/GX
  misc_feature (146)..(393): Homolog of NCBI NO: 30687283 NR Description: expressed protein [Arabidopsis thaliana]
  misc_feature (193)..(434): Homolog of NCBI NO: 18405375 NR Description: chloroplast lumen common protein family
  misc_feature (193)..(432): Homolog of NCBI NO: 22331818 NR Description: chloroplast lumen common protein family
  misc_feature (258)..(454): Homolog of NCBI NO: 6934300 NR Description: unknown [Euphorbia esula]
  misc_feature (146)..(454): Homolog of NCBI NO: 30687286 NR Description: expressed protein [Arabidopsis thaliana]
  misc_feature (138)..(454): Homolog of NCBI NO: 34900644 NR Description: hypothetical protein~similar to Arabidopsis
  misc_feature (138)..(454): Homolog of NCBI NO: 34395170 NR Description: chloroplast lumen common protein family-like
  misc_feature (134)..(465): Homolog of NCBI NO: 15242979 NR Description: putative protein
  misc_feature (191)..(535): Homolog of NCBI NO: 9759209 NR Description: gb|AAD25674.1~gene_id:MXC17.8~similar to unknown
  misc_feature (28)..(535): Homolog of NCBI NO: 22327037 NR Description: putative protein
MASSLTASHPPLSPSHLITHPHRCPARPNPTTGLLRLTPSRRRGRPPVAVRLAISASSTSAPPPSADRSEAASSLERYLSATVTGAVMGTGAAPPASAPPRAPPAMKGGRKQYSALGAVTLEKAKLDLSQRRKNIMPELATGGGGGDIGKRIGHGGGDGGDDDGDDDDYFDDFDEGEEEGGLFRRRIVVQELFNREFVEAVLQEWYKTMSDLPTGLRQACEMGLVSSAQMVRYLSIFARPTNARSFSRALPGWLSRGLVGRTLADPSFPHKMSLEFIATIASSIWCEMNIRKERFKQEWDLVIVNALTAACCNLMVLGLLAPCRSYASTSRFDFQNAIEKLPNNIFEKSYPLREFDLAKRISAFFYKAAELSLVGFVAGSVQGGMSIVLSARKERRLSVTIPSISTNALGYGAFLGLYANLRYQLLCGVDQYMVKRFDVLGVAIFFSTAARLMNIQIGEASRRTWLGEEADPQYSDRLLRAYKRPVEVDADQSRWFISKDAIVSGLGLLGIKQGGPEATFSKSRRKRVIRKKVTSG

SEQ ID NO: 16005 - DNA, 1864 bp, Zea mays subsp. mays
  misc_feature (1)..(1864): Ceres Seq. ID no. 12407509
  misc_feature: MA Experiment ID: 108504 Result: Down-regulated in Transcription
  misc_feature: MA Experiment 108504 PARAMETER Experiment Name: Zm_Drought_P Parameter: Age (day) Value: 8
  misc_feature: MA Experiment 108504 PARAMETER Experiment Name: Zm_Drought_P Parameter: Organism Value: Zea mays
  misc_feature: MA Experiment 108504 PARAMETER Experiment Name: Zm_Drought_P Parameter: Plant Line Value: 35A19
  misc_feature: MA Experiment 108504 PARAMETER Experiment Name: Zm_Drought_P Parameter: Timepoint (hr) Value: 12
  misc_feature: MA Experiment 108504 PARAMETER Experiment Name: Zm_Drought_P Parameter: Tissue Value: Aerial
  misc_feature: MA Experiment 108504 PARAMETER Experiment Name: Zm_Drought_P Parameter: Treatment Value: Drought vs. No Drought
  misc_feature: MA Experiment ID: 108529 Result: Down-regulated in Transcription
  misc_feature: MA Experiment 108529 PARAMETER Experiment Name: Zm_Imbibed_Seeds_P Parameter: Age (day) Value: 5 vs. 2
  misc_feature: MA Experiment 108529 PARAMETER Experiment Name: Zm_Imbibed_Seeds_P Parameter: Organism Value: Zea mays
  misc_feature: MA Experiment 108529 PARAMETER Experiment Name: Zm_Imbibed_Seeds_P Parameter: Plant Line Value: 35A19
  misc_feature: MA Experiment 108529 PARAMETER Experiment Name: Zm_Imbibed_Seeds_P Parameter: Tissue Value: Roots vs. Embryo
  misc_feature: MA Experiment ID: 108535 Result: Up-regulated in Transcription
  misc_feature: MA Experiment 108535 PARAMETER Experiment Name: Zm_Meristem_P Parameter: Age (day) Value: 8
  misc_feature: MA Experiment 108535 PARAMETER Experiment Name: Zm_Meristem_P Parameter: Organism Value: Zea mays
  misc_feature: MA Experiment 108535 PARAMETER Experiment Name: Zm_Meristem_P Parameter: Plant Line Value: 35A19
  misc_feature: MA Experiment 108535 PARAMETER Experiment Name: Zm_Meristem_P Parameter: Tissue Value: Root Meristem vs. Above Root Meristem
  misc_feature: MA Experiment ID: 108544 Result: Down-regulated in Transcription
  misc_feature: MA Experiment ID: 108546 Result: Down-regulated in Transcription
  misc_feature: MA Experiment 108546 PARAMETER Experiment Name: Zm_Imbibed_Seeds_P Parameter: Age (day) Value: 3 vs. 2
  misc_feature: MA Experiment 108546 PARAMETER Experiment Name: Zm_Imbibed_Seeds_P Parameter: Organism Value: Zea mays
  misc_feature: MA Experiment 108546 PARAMETER Experiment Name: Zm_Imbibed_Seeds_P Parameter: Plant Line Value: 35A19
  misc_feature: MA Experiment 108546 PARAMETER Experiment Name: Zm_Imbibed_Seeds_P Parameter: Tissue Value: Roots vs. Embryo
  misc_feature: MA Experiment ID: 108559 Result: Down-regulated in Transcription
  misc_feature: MA Experiment 108559 PARAMETER Experiment Name: Zm_5mM_NO_P Parameter: Age (day) Value: 8
  misc_feature: MA Experiment 108559 PARAMETER Experiment Name: Zm_5mM_NO_P Parameter: Organism Value: Zea mays
  misc_feature: MA Experiment 108559 PARAMETER Experiment Name: Zm_5mM_NO_P Parameter: Plant Line Value: 35A19
  misc_feature: MA Experiment 108559 PARAMETER Experiment Name: Zm_5mM_NO_P Parameter: Timepoint (hr) Value: 12
  misc_feature: MA Experiment 108559 PARAMETER Experiment Name: Zm_5mM_NO_P Parameter: Tissue Value: Aerial
  misc_feature: MA Experiment 108559 PARAMETER Experiment Name: Zm_5mM_NO_P Parameter: Treatment Value: 5mM NO vs. No Treatment
  misc_feature: MA Experiment ID: 108689 Result: Down-regulated in Transcription
  misc_feature: MA Experiment 108689 PARAMETER Experiment Name: Zm_Drought_Roots_P Parameter: Age (day) Value: 9
  misc_feature: MA Experiment 108689 PARAMETER Experiment Name: Zm_Drought_Roots_P Parameter: Organism Value: Zea mays
  misc_feature: MA Experiment 108689 PARAMETER Experiment Name: Zm_Drought_Roots_P Parameter: Plant Line Value: 35A19
  misc_feature: MA Experiment 108689 PARAMETER Experiment Name: Zm_Drought_Roots_P Parameter: Timepoint (hr) Value: 24
  misc_feature: MA Experiment 108689 PARAMETER Experiment Name: Zm_Drought_Roots_P Parameter: Tissue Value: Roots
  misc_feature: MA Experiment 108689 PARAMETER Experiment Name: Zm_Drought_Roots_P Parameter: Treatment Value: Drought vs. No Drought
  misc_feature: MA Experiment ID: 20000108 Result: Up-regulated in Transcription
  misc_feature: MA Experiment 20000108 PARAMETER Experiment Name: Zm_Root-Tips_P Parameter: Age (day) Value: 12
  misc_feature: MA Experiment 20000108 PARAMETER Experiment Name: Zm_Root-Tips_P Parameter: Organism Value: Zea mays
  misc_feature: MA Experiment 20000108 PARAMETER Experiment Name: Zm_Root-Tips_P Parameter: Tissue Value: Root tips vs. Root mid region    35
  misc_feature: MA Experiment 20000108 PARAMETER Experiment Name: Zm_Root-Tips_P Parameter: Tissue Value: Root tips vs. Root mid region   Sequence Listing-Misc Features (4)
  misc_feature: MA Experiment ID: 20000480 Result: Down-regulated in Transcription
  misc_feature: MA Experiment 20000480 PARAMETER Experiment Name: Zm_Drought_P Parameter: Age (day) Value: 11
  misc_feature: MA Experiment 20000480 PARAMETER Experiment Name: Zm_Drought_P Parameter: Organism Value: Zea mays
  misc_feature: MA Experiment 20000480 PARAMETER Experiment Name: Zm_Drought_P Parameter: Plant Line Value: 35A19
  misc_feature: MA Experiment 20000480 PARAMETER Experiment Name: Zm_Drought_P Parameter: Timepoint (hr) Value: 72
  misc_feature: MA Experiment 20000480 PARAMETER Experiment Name: Zm_Drought_P Parameter: Tissue Value: Aerial
  misc_feature: MA Experiment 20000480 PARAMETER Experiment Name: Zm_Drought_P Parameter: Treatment Value: Drought vs. No Drought
accaacccacacccgttccgtttctggcgcacagcacagtcacagtgctcggcatcttttccgctccgctctgacgctctcccactcccccacagtcccacgccctccagtcaaagcaagccgctgcttggccggccgggaaggctcggtcgcagcgccgaggaatggcggccaagccggtcaccgtcggcgacctcatccaccgcgtcgcctcttcctgcctctccaaccgcctgccgtgcaaccacaccttccgcgactccgtggacagcgactttgacgacgacgacgacgacgacgaccccttcgccgacgccgtctccagcagcgagaaatgccagcggtccccgcccgctgcggaggtcgaggaagaggaggaggaggacgagaagctcaagatctgggaggagagggagcaggagaaggagaggctggccgccgcgtccaagggcgccgagcgcgcccgcgacgcggacgcgctgatggcggaggtgttcgacgccgtctccggggtgcgccgcgcctacgccgcgctccaggacgcgcactgcccctgggaccccgacaagatgcggaccgcggacgcggccgtggtcgccgagctccgccacctcgcgcgcctccgcgaccgcttccgccgctccgcagccgtgggccacatcccgcgcccgaaaccgtccgcgccgccgctgcgcgaggccgtggcgccgtacgaggcggcgctcgacgacctccagcgccagctccagtccaggcaggccgaggtggacgcgctcaaagagaagctcgcggcggccaccagccgccgcaacgggcgccaccaccacgtcccgccctccaagcagaacggcggcgcgccgacggcggagctcttcaccacctgcgccgagcaagcccgcgcggcgacgcgggccttcgcggggcacctcgcgcacctgatgcgcgcggcggggctggagctcgcggcggccacccggtcgctcaccaagatcccggtgtcctccccgcagctggccaagcacgcgctggaggcgcacgccacgcgcgccctcctcggcggcttcgagcacgagtccttctacctggacggctccctctcgtcgctgctggaccccgccgcgttccggcgggagcggtacgcgcagttccgggacatgcgcgggatggagcccgcggagctgctgggcgtgctcccgacctgcgccttcggccgctacgccgccgccaagttcgcggcgctcctgccgccgcgcgtggaggaggccgtcctgggcgacgccgagcaccggagggtggtcaacgccggcgcccacccgcggacgcccttctacggggagttcctgcgcgcggccaaggccgtgtggatgctgcacctgctagccttcgcgctggagccgccgcccagccacttcgatgccggacgcggtgcggagttccaccaggagtacatggagagcgtgaccggcgcgccaccgcacggcggcgcgggcctggtcgtcgggttcgccgtcgcgcccgggttccggctggggaacggcgccgtcgtgcgcgcccgggtctacctggtgccgcgtggtggccgaccgtgacagacccatgcatggcgtgacagaccgcgtggtagcgttgcatagcgccgcggcccacggatcacctccgagagttgttggtgggtgccaatgcgcaccctgctggagcctggagctggacctgcggagtagctgctggctggctgcgttggtgaagaacagacaaaggctcatagctactgtactagtggctccgtagattttatttcattttacttctccttgttaatctcaaaaaaagtaataatcgccatgtgtaagaggactttgaattt

SEQ ID NO: 16006 - protein, 474 aa, Zea mays subsp. mays
  peptide (1)..(474): Ceres Seq. ID no. 12407510
  misc_feature (91)..(219): Pfam Name: Plant protein of unknown function (DUF641) Pfam Description: Plant protein of unknown function (DUF641)
  misc_feature (66)..(467): Homolog of NCBI NO: 8777470 NR Description: gb|AAB82637.1~gene_id:K15M2.1~similar to unknown
  misc_feature (102)..(467): Homolog of NCBI NO: 37535904 NR Description: hypothetical protein [Oryza sativa (japonica
  misc_feature (1)..(260): Homolog of NCBI NO: 34897362 NR Description: hypothetical protein [Oryza sativa]
  misc_feature (268)..(470): Homolog of NCBI NO: 26452122 NR Description: unknown protein [Arabidopsis thaliana]
  misc_feature (66)..(308): Homolog of NCBI NO: 26452122 NR Description: unknown protein [Arabidopsis thaliana]
  misc_feature (268)..(470): Homolog of NCBI NO: 30697152 NR Description: expressed protein [Arabidopsis thaliana]
  misc_feature (66)..(308): Homolog of NCBI NO: 30697152 NR Description: expressed protein [Arabidopsis thaliana]
  misc_feature (268)..(470): Homolog of NCBI NO: 22327960 NR Description: putative protein
  misc_feature (66)..(308): Homolog of NCBI NO: 22327960 NR Description: putative protein
  misc_feature (32)..(474): Homolog of NCBI NO: 34897362 NR Description: hypothetical protein [Oryza sativa]
MAAKPVTVGDLIHRVASSCLSNRLPCNHTFRDSVDSDFDDDDDDDDPFADAVSSSEKCQRSPPAAEVEEEEEEDEKLKIWEEREQEKERLAAASKGAERARDADALMAEVFDAVSGVRRAYAALQDAHCPWDPDKMRTADAAVVAELRHLARLRDRFRRSAAVGHIPRPKPSAPPLREAVAPYEAALDDLQRQLQSRQAEVDALKEKLAAATSRRNGRHHHVPPSKQNGGAPTAELFTTCAEQARAATRAFAGHLAHLMRAAGLELAAATRSLTKIPVSSPQLAKHALEAHATRALLGGFEHESFYLDGSLSSLLDPAAFRRERYAQFRDMRGMEPAELLGVLPTCAFGRYAAAKFAALLPPRVEEAVLGDAEHRRVVNAGAHPRTPFYGEFLRAAKAVWMLHLLAFALEPPPSHFDAGRGAEFHQEYMESVTGAPPHGGAGLVVGFAVAPGFRLGNGAVVRARVYLVPRGGRP

SEQ ID NO: 16007 - protein, 424 aa, Zea mays subsp. mays
  peptide (1)..(424): Ceres Seq. ID no. 12407511
  misc_feature (146)..(421): Pfam Name: Progesterone receptor Pfam Description: Progesterone receptor
  misc_feature (76)..(369): Homolog of NCBI NO: 23012311 NR Description: hypothetical protein [Magnetospirillum
  misc_feature (1)..(246): Homolog of NCBI NO: 23018055 NR Description: hypothetical protein [Thermobifida fusca]
  misc_feature (1)..(316): Homolog of NCBI NO: 23893582 NR Description: EBNA-LP protein [Human herpesvirus 4]
  misc_feature (1)..(358): Homolog of NCBI NO: 25989119 NR Description: unknown [Streptomyces aureofaciens]
  misc_feature (1)..(423): Homolog of NCBI NO: 23106243 NR Description: hypothetical protein [Azotobacter vinelandii]
  misc_feature (1)..(424): Homolog of NCBI NO: 29247944 NR Description: GLP_26_54603_52153 [Giardia lamblia ATCC 50803]
  misc_feature (1)..(404): Homolog of NCBI NO: 23104656 NR Description: hypothetical protein [Azotobacter vinelandii]
  misc_feature (5)..(414): Homolog of NCBI NO: 25989121 NR Description: putative PHA synthase [Streptomyces aureofaciens]
  misc_feature (1)..(420): Homolog of NCBI NO: 29247944 NR Description: GLP_26_54603_52153 [Giardia lamblia ATCC 50803]
  misc_feature (1)..(410): Homolog of NCBI NO: 79833 NR Description: hypothetical 119.5K protein (uvrA region) -
MPAVPARCGGRGRGGGGREAQDLGGEGAGEGEAGRRVQGRRARPRRGRADGGGVRRRLRGAPRLRRAPGRALPLGPRQDADRGRGRGRRAPPPRAPPRPLPPLRSRGPHPAPETVRAAAARGRGAVRGGARRPPAPAPVQAGRGGRAQREARGGHQPPQRAPPPRPALQAERRRADGGALHHLRRASPRGDAGLRGAPRAPDARGGAGARGGHPVAHQDPGVLPAAGQARAGGARHARPPRRLRARVLLPGRLPLVAAGPRRVPAGAVRAVPGHARDGARGAAGRAPDLRLRPLRRRQVRGAPAAARGGGRPGRRRAPEGGQRRRPPADALLRGVPARGQGRVDAAPASLRAGAAAQPLRCRTRCGVPPGVHGERDRRATARRRGPGRRVRRRARVPAGERRRRARPGLPGAAWWPTVTDPCMA

SEQ ID NO: 16008 - protein, 368 aa, Zea mays subsp. mays
  peptide (1)..(368): Ceres Seq. ID no. 12407512
  misc_feature (1)..(113): Pfam Name: Plant protein of unknown function (DUF641) Pfam Description: Plant protein of unknown function (DUF641)
  misc_feature (1)..(202): Homolog of NCBI NO: 22327960 NR Description: putative protein
  misc_feature (1)..(361): Homolog of NCBI NO: 8777470 NR Description: gb|AAB82637.1~gene_id:K15M2.1~similar to unknown
  misc_feature (1)..(154): Homolog of NCBI NO: 34897362 NR Description: hypothetical protein [Oryza sativa]
  misc_feature (1)..(202): Homolog of NCBI NO: 26452122 NR Description: unknown protein [Arabidopsis thaliana]
  misc_feature (1)..(202): Homolog of NCBI NO: 30697152 NR Description: expressed protein [Arabidopsis thaliana]
  misc_feature (162)..(364): Homolog of NCBI NO: 22327960 NR Description: putative protein
  misc_feature (162)..(364): Homolog of NCBI NO: 30697152 NR Description: expressed protein [Arabidopsis thaliana]
  misc_feature (162)..(364): Homolog of NCBI NO: 26452122 NR Description: unknown protein [Arabidopsis thaliana]
  misc_feature (1)..(361): Homolog of NCBI NO: 37535904 NR Description: hypothetical protein [Oryza sativa (japonica
  misc_feature (1)..(368): Homolog of NCBI NO: 34897362 NR Description: hypothetical protein [Oryza sativa]
MAEVFDAVSGVRRAYAALQDAHCPWDPDKMRTADAAVVAELRHLARLRDRFRRSAAVGHIPRPKPSAPPLREAVAPYEAALDDLQRQLQSRQAEVDALKEKLAAATSRRNGRHHHVPPSKQNGGAPTAELFTTCAEQARAATRAFAGHLAHLMRAAGLELAAATRSLTKIPVSSPQLAKHALEAHATRALLGGFEHESFYLDGSLSSLLDPAAFRRERYAQFRDMRGMEPAELLGVLPTCAFGRYAAAKFAALLPPRVEEAVLGDAEHRRVVNAGAHPRTPFYGEFLRAAKAVWMLHLLAFALEPPPSHFDAGRGAEFHQEYMESVTGAPPHGGAGLVVGFAVAPGFRLGNGAVVRARVYLVPRGGRP

SEQ ID NO: 16009 - DNA, 1477 bp, Zea mays subsp. mays
  misc_feature (1)..(1477): Ceres Seq. ID no. 13498367
  misc_feature: MA Experiment ID: 108527 Result: Down-regulated in Transcription
  misc_feature: MA Experiment 108527 PARAMETER Experiment Name: Zm_5mM_NO_P Parameter: Age (day) Value: 8
  misc_feature: MA Experiment 108527 PARAMETER Experiment Name: Zm_5mM_NO_P Parameter: Organism Value: Zea mays
  misc_feature: MA Experiment 108527 PARAMETER Experiment Name: Zm_5mM_NO_P Parameter: Plant Line Value: 35A19
  misc_feature: MA Experiment 108527 PARAMETER Experiment Name: Zm_5mM_NO_P Parameter: Timepoint (hr) Value: 6
  misc_feature: MA Experiment 108527 PARAMETER Experiment Name: Zm_5mM_NO_P Parameter: Tissue Value: Aerial
  misc_feature: MA Experiment 108527 PARAMETER Experiment Name: Zm_5mM_NO_P Parameter: Treatment Value: 5mM NO vs. No Treatment
  misc_feature: MA Experiment ID: 108528 Result: Up-regulated in Transcription
  misc_feature: MA Experiment 108528 PARAMETER Experiment Name: Zm_Imbibed_Seeds_P Parameter: Age (day) Value: 5 vs. 2
  misc_feature: MA Experiment 108528 PARAMETER Experiment Name: Zm_Imbibed_Seeds_P Parameter: Organism Value: Zea mays
  misc_feature: MA Experiment 108528 PARAMETER Experiment Name: Zm_Imbibed_Seeds_P Parameter: Plant Line Value: 35A19
  misc_feature: MA Experiment 108528 PARAMETER Experiment Name: Zm_Imbibed_Seeds_P Parameter: Tissue Value: Aerial vs. Embryo
  misc_feature: MA Experiment ID: 108530 Result: Up-regulated in Transcription
  misc_feature: MA Experiment 108530 PARAMETER Experiment Name: Zm_Imbibed_Seeds_P Parameter: Age (day) Value: 6 vs. 2
  misc_feature: MA Experiment 108530 PARAMETER Experiment Name: Zm_Imbibed_Seeds_P Parameter: Organism Value: Zea mays
  misc_feature: MA Experiment 108530 PARAMETER Experiment Name: Zm_Imbibed_Seeds_P Parameter: Plant Line Value: 35A19
  misc_feature: MA Experiment 108530 PARAMETER Experiment Name: Zm_Imbibed_Seeds_P Parameter: Tissue Value: Aerial vs. Embryo
  misc_feature: MA Experiment ID: 108545 Result: Up-regulated in Transcription
  misc_feature: MA Experiment 108545 PARAMETER Experiment Name: Zm_Imbibed_Seeds_P Parameter: Age (day) Value: 3 vs. 2
  misc_feature: MA Experiment 108545 PARAMETER Experiment Name: Zm_Imbibed_Seeds_P Parameter: Organism Value: Zea mays
  misc_feature: MA Experiment 108545 PARAMETER Experiment Name: Zm_Imbibed_Seeds_P Parameter: Plant Line Value: 35A19
  misc_feature: MA Experiment 108545 PARAMETER Experiment Name: Zm_Imbibed_Seeds_P Parameter: Tissue Value: Aerial vs. Embryo
  misc_feature: MA Experiment ID: 108546 Result: Down-regulated in Transcription
  misc_feature: MA Experiment 108546 PARAMETER Experiment Name: Zm_Imbibed_Seeds_P Parameter: Age (day) Value: 3 vs. 2
  misc_feature: MA Experiment 108546 PARAMETER Experiment Name: Zm_Imbibed_Seeds_P Parameter: Organism Value: Zea mays
  misc_feature: MA Experiment 108546 PARAMETER Experiment Name: Zm_Imbibed_Seeds_P Parameter: Plant Line Value: 35A19
  misc_feature: MA Experiment 108546 PARAMETER Experiment Name: Zm_Imbibed_Seeds_P Parameter: Tissue Value: Roots vs. Embryo
  misc_feature: MA Experiment ID: 108547 Result: Up-regulated in Transcription
  misc_feature: MA Experiment 108547 PARAMETER Experiment Name: Zm_Imbibed_Seeds_P Parameter: Age (day) Value: 4 vs. 2
  misc_feature: MA Experiment 108547 PARAMETER Experiment Name: Zm_Imbibed_Seeds_P Parameter: Organism Value: Zea mays
  misc_feature: MA Experiment 108547 PARAMETER Experiment Name: Zm_Imbibed_Seeds_P Parameter: Plant Line Value: 35A19
  misc_feature: MA Experiment 108547 PARAMETER Experiment Name: Zm_Imbibed_Seeds_P Parameter: Tissue Value: Aerial vs. Embryo
  misc_feature: MA Experiment ID: 108556 Result: Down-regulated in Transcription
  misc_feature: MA Experiment 108556 PARAMETER Experiment Name: Zm_Drought_P Parameter: Age (day) Value: 9
  misc_feature: MA Experiment 108556 PARAMETER Experiment Name: Zm_Drought_P Parameter: Organism Value: Zea mays
  misc_feature: MA Experiment 108556 PARAMETER Experiment Name: Zm_Drought_P Parameter: Plant Line Value: 35A19
  misc_feature: MA Experiment 108556 PARAMETER Experiment Name: Zm_Drought_P Parameter: Timepoint (hr) Value: 24
  misc_feature: MA Experiment 108556 PARAMETER Experiment Name: Zm_Drought_P Parameter: Tissue Value: Aerial
  misc_feature: MA Experiment 108556 PARAMETER Experiment Name: Zm_Drought_P Parameter: Treatment Value: Drought vs. No Drought
  misc_feature: MA Experiment ID: 20000630 Result: Down-regulated in Transcription
  misc_feature: MA Experiment 20000630 PARAMETER Experiment Name: Zm_Herbicide-Treatments_P Parameter: Timepoint (hr) Value: 4
  misc_feature: MA Experiment 20000630 PARAMETER Experiment Name: Zm_Herbicide-Treatments_P Parameter: Tissue Value: Aerial
  misc_feature: MA Experiment 20000630 PARAMETER Experiment Name: Zm_Herbicide-Treatments_P Parameter: Treatment Value: Roundup vs. No Treatment
aatcgaaaaattttcgagctcaagctcaatcacttcggattggcggcgggcacgcgccggacgaaatggaagcggcaccatccgcccgcgccttctccccgtcctcgtctccctccgcgggggctagacccagccttcccctcgcgggcctggnctcgcgctcgcggcgcgcccgggtgctcgcggcgccgcccccgccccgcgccgtcgcctcctcccgcgcgccgctggtggtctccagcccgccaccgccnnaggactccggcacgcacaaccccgcgcacgccaaggtcgaccgctccggccgcttctgcagcccccgcgccgcacgggaactcgcgctgtgagtcccggcgtttccccagcttcagctcctacatacttcggtttctcttcttctgtgctgcgttggagttgggcttcggctgtggttctttgctgctggaggtgaaccgctacttccgcgtctcgtgtcgcaggatgatttcctacgccgcgtgtctggagggaaccgatgtcgtccggctcttcgatcgcaggatcagcgcaagacgagaacccgggtttgttttcaacaaggcatgcctattgagttacaaccatatgagctttggcgggggaccgctcgaggttggaacggaggaggaggctgagaagctggccagtcagaacgataaggattcagccaacgaagcagatgtactttcagctcctccaaaacttgtttacaacaactatgtattacggctgtccagggaacttttagtggctgttgccagtggatgggataagcatgtggttatcatcgacaaaataattccccaggcttggaaggatgaacctgtggcaaggattcttgagctctgcattctacatattgctatggctgagatgacatcaaaaggaacaccccacaaagttgtcattaatgaggcagtagatctggcaaagcgattttgtgatggtggtgcccctcgggtaatcaacggatgccttcgaacatttgtgaaggatcatgttgatgttgcaggcacgagccaggaagctaaatcaaaatcatgattttttgcaaatactcatacaacaaaatggtggctgaagtaaagaagtacggagaaaaccttgctgtcttgagttcaggcgaataccttctgtctccaaggtttagccttcaacctaagggaatctaaaaggtaaacatgatggactcatcaaggagccacaacacgttcattcttttagaatgttcggttattaggtgaagtatacagagctgtaaactggtgatgcacattcatgcttcatctaaaacaaccgaaggttatggcttctgatagcggatagcctactcgacgcagatcgttaaatgatcagatattaagatgaccaggagttgtgtaaaagcttgatgcacatgtaaaatgttatatatacttggcattggctcattgcaatgggagaaggatattctagtttc

SEQ ID NO: 16010 - protein, 353 aa, Zea mays subsp. mays
  peptide (1)..(353): Ceres Seq. ID no. 13498368
  misc_feature (233)..(338): Homolog of NCBI NO: 20807741 NR Description: Transcription termination factor
  misc_feature (161)..(352): Homolog of NCBI NO: 18416739 NR Description: expressed protein [Arabidopsis thaliana]
  misc_feature (161)..(352): Homolog of NCBI NO: 7486786 NR Description: hypothetical protein M3E9.200 - Arabidopsis
  misc_feature (161)..(330): Homolog of NCBI NO: 18483231 NR Description: hypothetical protein M3E9.200 [Sorghum bicolor]
  misc_feature (52)..(52): Xaa is any aa, unknown or other
  misc_feature (85)..(85): Xaa is any aa, unknown or other
NRKIFELKLNHFGLAAGTRRTKWKRHHPPAPSPRPRLPPRGLDPAFPSRAWXRARGAPGCSRRRPRPAPSPPPARRWWSPARHRXRTPARTTPRTPRSTAPAASAAPAPHGNSRCESRRFPSFSSYILRFLFFCAALELGFGCGSLLLEVNRYFRVSCRRMISYAACLEGTDVVRLFDRRISARREPGFVFNKACLLSYNHMSFGGGPLEVGTEEEAEKLASQNDKDSANEADVLSAPPKLVYNNYVLRLSRELLVAVASGWDKHVVIIDKIIPQAWKDEPVARILELCILHIAMAEMTSKGTPHKVVINEAVDLAKRFCDGGAPRVINGCLRTFVKDHVDVAGTSQEAKSKS

SEQ ID NO: 16011 - protein, 193 aa, Zea mays subsp. mays
  peptide (1)..(193): Ceres Seq. ID no. 13498369
  misc_feature (73)..(178): Homolog of NCBI NO: 20807741 NR Description: Transcription termination factor
  misc_feature (1)..(192): Homolog of NCBI NO: 18416739 NR Description: expressed protein [Arabidopsis thaliana]
  misc_feature (1)..(192): Homolog of NCBI NO: 7486786 NR Description: hypothetical protein M3E9.200 - Arabidopsis
  misc_feature (1)..(170): Homolog of NCBI NO: 18483231 NR Description: hypothetical protein M3E9.200 [Sorghum bicolor]
MISYAACLEGTDVVRLFDRRISARREPGFVFNKACLLSYNHMSFGGGPLEVGTEEEAEKLASQNDKDSANEADVLSAPPKLVYNNYVLRLSRELLVAVASGWDKHVVIIDKIIPQAWKDEPVARILELCILHIAMAEMTSKGTPHKVVINEAVDLAKRFCDGGAPRVINGCLRTFVKDHVDVAGTSQEAKSKS

SEQ ID NO: 16012 - DNA, 1989 bp, Zea mays subsp. mays
  misc_feature (1)..(1989): Ceres Seq. ID no. 12405971
  misc_feature: MA Experiment ID: 108535 Result: Up-regulated in Transcription
  misc_feature: MA Experiment 108535 PARAMETER Experiment Name: Zm_Meristem_P Parameter: Age (day) Value: 8
  misc_feature: MA Experiment 108535 PARAMETER Experiment Name: Zm_Meristem_P Parameter: Organism Value: Zea mays
  misc_feature: MA Experiment 108535 PARAMETER Experiment Name: Zm_Meristem_P Parameter: Plant Line Value: 35A19
  misc_feature: MA Experiment 108535 PARAMETER Experiment Name: Zm_Meristem_P Parameter: Tissue Value: Root Meristem vs. Above Root Meristem
  misc_feature: MA Experiment ID: 108543 Result: Up-regulated in Transcription
  misc_feature: MA Experiment ID: 108546 Result: Down-regulated in Transcription
  misc_feature: MA Experiment 108546 PARAMETER Experiment Name: Zm_Imbibed_Seeds_P Parameter: Age (day) Value: 3 vs. 2
  misc_feature: MA Experiment 108546 PARAMETER Experiment Name: Zm_Imbibed_Seeds_P Parameter: Organism Value: Zea mays
  misc_feature: MA Experiment 108546 PARAMETER Experiment Name: Zm_Imbibed_Seeds_P Parameter: Plant Line Value: 35A19
  misc_feature: MA Experiment 108546 PARAMETER Experiment Name: Zm_Imbibed_Seeds_P Parameter: Tissue Value: Roots vs. Embryo
  misc_feature: MA Experiment ID: 108556 Result: Down-regulated in Transcription
  misc_feature: MA Experiment 108556 PARAMETER Experiment Name: Zm_Drought_P Parameter: Age (day) Value: 9
  misc_feature: MA Experiment 108556 PARAMETER Experiment Name: Zm_Drought_P Parameter: Organism Value: Zea mays
  misc_feature: MA Experiment 108556 PARAMETER Experiment Name: Zm_Drought_P Parameter: Plant Line Value: 35A19
  misc_feature: MA Experiment 108556 PARAMETER Experiment Name: Zm_Drought_P Parameter: Timepoint (hr) Value: 24
  misc_feature: MA Experiment 108556 PARAMETER Experiment Name: Zm_Drought_P Parameter: Tissue Value: Aerial
  misc_feature: MA Experiment 108556 PARAMETER Experiment Name: Zm_Drought_P Parameter: Treatment Value: Drought vs. No Drought
  misc_feature: MA Experiment ID: 108597 Result: Down-regulated in Transcription
  misc_feature: MA Experiment 108597 PARAMETER Experiment Name: Zm_100uM_ABA_P Parameter: Age (day) Value: 9
  misc_feature: MA Experiment 108597 PARAMETER Experiment Name: Zm_100uM_ABA_P Parameter: Organism Value: Zea mays
  misc_feature: MA Experiment 108597 PARAMETER Experiment Name: Zm_100uM_ABA_P Parameter: Plant Line Value: 35A19
  misc_feature: MA Experiment 108597 PARAMETER Experiment Name: Zm_100uM_ABA_P Parameter: Timepoint (hr) Value: 24
  misc_feature: MA Experiment 108597 PARAMETER Experiment Name: Zm_100uM_ABA_P Parameter: Tissue Value: Aerial
  misc_feature: MA Experiment 108597 PARAMETER Experiment Name: Zm_100uM_ABA_P Parameter: Treatment Value: 100uM ABA vs. No Treatment
  misc_feature: MA Experiment ID: 20000479 Result: Down-regulated in Transcription
  misc_feature: MA Experiment 20000479 PARAMETER Experiment Name: Zm_Drought_P Parameter: Age (day) Value: 10
  misc_feature: MA Experiment 20000479 PARAMETER Experiment Name: Zm_Drought_P Parameter: Organism Value: Zea mays
  misc_feature: MA Experiment 20000479 PARAMETER Experiment Name: Zm_Drought_P Parameter: Plant Line Value: 35A19
  misc_feature: MA Experiment 20000479 PARAMETER Experiment Name: Zm_Drought_P Parameter: Timepoint (hr) Value: 48
  misc_feature: MA Experiment 20000479 PARAMETER Experiment Name: Zm_Drought_P Parameter: Tissue Value: Aerial
  misc_feature: MA Experiment 20000479 PARAMETER Experiment Name: Zm_Drought_P Parameter: Treatment Value: Drought vs. No Drought
  misc_feature: MA Experiment ID: 20000632 Result: Down-regulated in Transcription
  misc_feature: MA Experiment 20000632 PARAMETER Experiment Name: Zm_Herbicide-Treatments_P Parameter: Timepoint (hr) Value: 4
  misc_feature: MA Experiment 20000632 PARAMETER Experiment Name: Zm_Herbicide-Treatments_P Parameter: Tissue Value: Aerial
  misc_feature: MA Experiment 20000632 PARAMETER Experiment Name: Zm_Herbicide-Treatments_P Parameter: Treatment Value: Glean vs. No Treatment
gcacgagaccttacctagaacatcctaatcgaaaaggaaacatctcgtcgacccaaacccatccacccacaaggcggaatacacgatccagtccgatcctcgccccgcgcgctgctccaaaccctggcgatgtcgacggcggcggccgcgaagactccgatcaaggccctgggctccgcggccgcgggtgccatgactccgaccaaatctcagccccccgcggcggccaagacgccctgtacctctcgcgcgcggtcctcccacgcatccgagaattccaaccccaacatcccgggcacgccgcctcccccgcagtcgacgccgtccaagcccagcctgaactccccggcgggcgcgggagccaggtccgccaccgcgaagaaaaagccctccacgcccgcgcccgccgcgccaccgctggagcgggagcggcgattcctcgtggcgaagaagggcgcgcggcggaggcgcaacgtcgggaccatgggacgcggcgggggcggccgcgggggagagatcgacttcgacaagtgccgcgaggcccgctcgcgaggcgctacgcgcgtcgcagggggagttcttccgcaaggagctcgccgcatccacagccaccggagaggatcaattgggacaggaggaggaggggaagccgctggctgaagaggatgtgaaaggtggagcattcgaggagcggcaggaggaggagaccgacgcggagctggaggggagcagcaaggttagggcgatgaggacgaaggcgatggctaaggcgatgagcagcgttccgaatcctggctctggccgcgtcaagcacatggtgcaggccttcgagagcctgctcaacatctccggcgccacctccgacgctgaaagggccggtgagggctcatgggcgctgcccgggttgcagctatggaaggaggatgataagggtgatctggggttcccaccagtgtcggtgttctcttctgctgatttccagaatgcagggtctaatcgactctgctcgtcactagatggaaacaccgtcaggtcgagctgggacagcagaacatcgactggcgagtgcagcaggagaaattcatctgagtcactaaggagaagaacatcggctggcggggcgcagaagcaggagaaactcatctgagtcactaaggagcagctggaacaaaaagctcaaggtcaccagccagcatccattcaagttgaggacagagcaaaggggaaagtttaaggaacagcagttcgtccaaaaggtgcaagagatgcttgcagaggaagagaagaagcgtattcatattgcgcaaggattgccatggactaccgatgaacccgagtgcttgataaagcctgcagtcaaagaaagaactgagcctatagaccttgttttgcatagcgatgtgcgtgctcttgaacgtgcagaatttgatcagcatgttttggataggaacaagttcgctgagcaacaaagattagaatgggaaaggcaacaggaattagacgaacaagaaaggataaggcaactgaggagaaccgagctgattcctaaagctcagcccatgccatactttgaccgcccattcatccccaaaaggtccacaaaacctgctacagttcccatggaaccgaaattctacctcaggccagaaaagctatcctgttactatcgacagcaatgtatggagcttggaaagctgaatccacaacatcagtgccaacatccgctcgcaatcgagaaatgcagagcatcgacacacatgatcaaacaactgtttccatttcctggcatcgtcttattcattcttgattcgtcttcttccatgtgcgaagaaattgctatcaagcgtgtttttgtagctttgcttggatcgccttgcctccaagttctgttaatcgctggctctgtgcttcagatgcaatcccaccgaggtttgaaatttgtcgttcaagaaactgataaggaaattcaaggatgaattttctgtggtc

SEQ ID NO: 16013 - protein, 236 aa, Zea mays subsp. mays
  peptide (1)..(236): Ceres Seq. ID no. 12405972
  misc_feature (1)..(123): Homolog of NCBI NO: 8926136 NR Description: targeting protein for Xklp2; TPX2 [Xenopus laevis]
  misc_feature (1)..(132): Homolog of NCBI NO: 15232025 NR Description: hypothetical protein; protein id: At3g01015.1
  misc_feature (1)..(151): Homolog of NCBI NO: 11358122 NR Description: hypothetical protein T20K14_120 - Arabidopsis
  misc_feature (1)..(151): Homolog of NCBI NO: 30685394 NR Description: expressed protein [Arabidopsis thaliana]
MLAEEEKKRIHIAQGLPWTTDEPECLIKPAVKERTEPIDLVLHSDVRALERAEFDQHVLDRNKFAEQQRLEWERQQELDEQERIRQLRRTELIPKAQPMPYFDRPFIPKRSTKPATVPMEPKFYLRPEKLSCYYRQQCMELGKLNPQHQCQHPLAIEKCRASTHMIKQLFPFPGIVLFILDSSSSMCEEIAIKRVFVALLGSPCLQVLLIAGSVLQMQSHRGLKFVVQETDKEIQG

SEQ ID NO: 16014 - protein, 222 aa, Zea mays subsp. mays
  peptide (1)..(222): Ceres Seq. ID no. 12405973
TRPYLEHPNRKGNISSTQTHPPTRRNTRSSPILAPRAAPNPGDVDGGGREDSDQGPGLRGRGCHDSDQISAPRGGQDALYLSRAVLPRIREFQPQHPGHAASPAVDAVQAQPELPGGRGSQVRHREEKALHARARRATAGAGAAIPRGEEGRAAEAQRRDHGTRRGRPRGRDRLRQVPRGPLARRYARRRGSSSARSSPHPQPPERINWDRRRRGSRWLKRM

SEQ ID NO: 16015 - protein, 176 aa, Zea mays subsp. mays
  peptide (1)..(176): Ceres Seq. ID no. 12405974
MSTAAAAKTPIKALGSAAAGAMTPTKSQPPAAAKTPCTSRARSSHASENSNPNIPGTPPPPQSTPSKPSLNSPAGAGARSATAKKKPSTPAPAAPPLERERRFLVAKKGARRRRNVGTMGRGGGGRGGEIDFDKCREARSRGATRVAGGVLPQGARRIHSHRRGSIGTGGGGEAAG

SEQ ID NO: 16016 - DNA, 1396 bp, Zea mays subsp. mays
  misc_feature (1)..(1396): Ceres Seq. ID no. 12376528
  misc_feature: MA Experiment ID: 108528 Result: Down-regulated in Transcription
  misc_feature: MA Experiment 108528 PARAMETER Experiment Name: Zm_Imbibed_Seeds_P Parameter: Age (day) Value: 5 vs. 2
  misc_feature: MA Experiment 108528 PARAMETER Experiment Name: Zm_Imbibed_Seeds_P Parameter: Organism Value: Zea mays
  misc_feature: MA Experiment 108528 PARAMETER Experiment Name: Zm_Imbibed_Seeds_P Parameter: Plant Line Value: 35A19
  misc_feature: MA Experiment 108528 PARAMETER Experiment Name: Zm_Imbibed_Seeds_P Parameter: Tissue Value: Aerial vs. Embryo
  misc_feature: MA Experiment ID: 108530 Result: Down-regulated in Transcription
  misc_feature: MA Experiment 108530 PARAMETER Experiment Name: Zm_Imbibed_Seeds_P Parameter: Age (day) Value: 6 vs. 2
  misc_feature: MA Experiment 108530 PARAMETER Experiment Name: Zm_Imbibed_Seeds_P Parameter: Organism Value: Zea mays
  misc_feature: MA Experiment 108530 PARAMETER Experiment Name: Zm_Imbibed_Seeds_P Parameter: Plant Line Value: 35A19
  misc_feature: MA Experiment 108530 PARAMETER Experiment Name: Zm_Imbibed_Seeds_P Parameter: Tissue Value: Aerial vs. Embryo
  misc_feature: MA Experiment ID: 108545 Result: Down-regulated in Transcription
  misc_feature: MA Experiment 108545 PARAMETER Experiment Name: Zm_Imbibed_Seeds_P Parameter: Age (day) Value: 3 vs. 2
  misc_feature: MA Experiment 108545 PARAMETER Experiment Name: Zm_Imbibed_Seeds_P Parameter: Organism Value: Zea mays
  misc_feature: MA Experiment 108545 PARAMETER Experiment Name: Zm_Imbibed_Seeds_P Parameter: Plant Line Value: 35A19
  misc_feature: MA Experiment 108545 PARAMETER Experiment Name: Zm_Imbibed_Seeds_P Parameter: Tissue Value: Aerial vs. Embryo
  misc_feature: MA Experiment ID: 108689 Result: Down-regulated in Transcription
  misc_feature: MA Experiment 108689 PARAMETER Experiment Name: Zm_Drought_Roots_P Parameter: Age (day) Value: 9
  misc_feature: MA Experiment 108689 PARAMETER Experiment Name: Zm_Drought_Roots_P Parameter: Organism Value: Zea mays
  misc_feature: MA Experiment 108689 PARAMETER Experiment Name: Zm_Drought_Roots_P Parameter: Plant Line Value: 35A19
  misc_feature: MA Experiment 108689 PARAMETER Experiment Name: Zm_Drought_Roots_P Parameter: Timepoint (hr) Value: 24
  misc_feature: MA Experiment 108689 PARAMETER Experiment Name: Zm_Drought_Roots_P Parameter: Tissue Value: Roots
  misc_feature: MA Experiment 108689 PARAMETER Experiment Name: Zm_Drought_Roots_P Parameter: Treatment Value: Drought vs. No Drought
  misc_feature: MA Experiment ID: 20000492 Result: Up-regulated in Transcription
  misc_feature: MA Experiment 20000492 PARAMETER Experiment Name: Zm_Hybrid_Seed_Dev_P Parameter: DAP Value: 12
  misc_feature: MA Experiment 20000492 PARAMETER Experiment Name: Zm_Hybrid_Seed_Dev_P Parameter: Organism Value: Zea mays
  misc_feature: MA Experiment 20000492 PARAMETER Experiment Name: Zm_Hybrid_Seed_Dev_P Parameter: Plant Line Value: 35A19
  misc_feature: MA Experiment 20000492 PARAMETER Experiment Name: Zm_Hybrid_Seed_Dev_P Parameter: Tissue Value: Fert Kernel vs. Unfert Floret
  misc_feature: MA Experiment ID: 20000535 Result: Up-regulated in Transcription
  misc_feature: MA Experiment 20000535 PARAMETER Experiment Name: Zm_Hybrid_Seed_Dev_P Parameter: DAP Value: 30 vs. 12
  misc_feature: MA Experiment 20000535 PARAMETER Experiment Name: Zm_Hybrid_Seed_Dev_P Parameter: Organism Value: Zea mays
  misc_feature: MA Experiment 20000535 PARAMETER Experiment Name: Zm_Hybrid_Seed_Dev_P Parameter: Plant Line Value: 35A19
  misc_feature: MA Experiment 20000535 PARAMETER Experiment Name: Zm_Hybrid_Seed_Dev_P Parameter: Tissue Value: Embryo vs. Unfert Floret
caaacccacctcgcctcctagtcccccccttcgccttctctcccgagtcccatcggagcccggagctctctcgcctcccgcgaggctgtgtggtgaggcgcggacgagatgaacgagcaggggctcggtggtctcggcgggggccgcggggccgtgcaggggcacgggcgggaggcgatggcgctcttgcagcaccagcagcttcaacagcaacggcggcagctggaggaggaggatgaggtgcggcgccagatgttcggcggggtggcggcgttcccggcagcgctgggccacggccagcaggtggactacggggaggacgccggcgggctcggggacagcgacgcgggcgggtcggagcccgagccaccaccggagcggacgcgcggggggtccggcggcggcggcaagcggagccgcgctgccgaggtgcacaacctctccgagaagaggaggaagagcaagatcaacgagaagatgaaagcgctgcagagcctgatacccaactccaacaagaccgacaaggcatccatgcttgacgaggccattgagtatctgaagcaactgcagctccaagtgcagatgctgtctatgagaaatggtgtttacttgaaccctccatatttgtctggcacaattgagcctgcacaagcatcacaaatgtttgctgcagttggtgggggcaacattacagcgtcaagctctggggcagtgatgccaccagtaaaccaaagttcaggacttcaagtatttgatccattaaatcctccacgagaccaaccactgtcttttgtattaccaaatgtagacaaaaccattcaagaagctccctttcacttggaatcatcgcagttccaccctcgaccatttcgaatgcctgaatcttctgagatgatgcttccaggtgaggtagtggcaaagcaccagctaacttcaattcaaggaagagttagtatgccaggaattggtatgaaccccattaggcaagaatcatccactgtaaaagctgatcagtttgatggttgctcacataacaaagagtgactacaagatatggtgccacaaaatgcatgaaagttcaggacagcttaggaaatggcaaccgatgaggaccgaaggcaggatgacacagttcagtaacccagctgacagcctggcacgcaggcttcccctttattttcctctgttactgcaatagtaacttaaatttttaggcttcccctttattttcctctgttactgcaatagtaacttaattttttttaggcttcacctttcctttttgtttgaaaattagcagggcagtattaattaatagtacaaaaccatgtatcagcaagatttcaggggttgaaacttgaaatgccaatattcaccaagctttcgtttttttttc

SEQ ID NO: 16017 - protein, 311 aa, Zea mays subsp. mays
  peptide (1)..(311): Ceres Seq. ID no. 12376529
  misc_feature (105)..(154): Pfam Name: Helix-loop-helix DNA-binding domain Pfam Description: Helix-loop-helix DNA-binding domain
  misc_feature (84)..(166): Homolog of NCBI NO: 30680903 NR Description: (bHLH015) putative bHLH transcription factor
  misc_feature (36)..(225): Homolog of NCBI NO: 34899612 NR Description: putative phytochrome interacting factor 4
  misc_feature (72)..(259): Homolog of NCBI NO: 31043851 NR Description: BP-5 protein [Oryza sativa]
  misc_feature (74)..(170): Homolog of NCBI NO: 21536863 NR Description: unknown [Arabidopsis thaliana]
  misc_feature (74)..(170): Homolog of NCBI NO: 15240202 NR Description: putative protein
  misc_feature (64)..(213): Homolog of NCBI NO: 4093153 NR Description: phytochrome-associated protein 3 [Arabidopsis
  misc_feature (64)..(213): Homolog of NCBI NO: 15217533 NR Description: putative phytochrome-associated protein 3
  misc_feature (77)..(185): Homolog of NCBI NO: 25407777 NR Description: hypothetical protein AT4g36930 [imported] -
  misc_feature (77)..(185): Homolog of NCBI NO: 18419937 NR Description: bHLH protein, SPATULA; protein id: At4g36930.1
  misc_feature (81)..(311): Homolog of NCBI NO: 15451582 NR Description: Putative SPATULA [Oryza sativa]
MNEQGLGGLGGGRGAVQGHGREAMALLQHQQLQQQRRQLEEEDEVRRQMFGGVAAFPAALGHGQQVDYGEDAGGLGDSDAGGSEPEPPPERTRGGSGGGGKRSRAAEVHNLSEKRRKSKINEKMKALQSLIPNSNKTDKASMLDEAIEYLKQLQLQVQMLSMRNGVYLNPPYLSGTIEPAQASQMFAAVGGGNITASSSGAVMPPVNQSSGLQVFDPLNPPRDQPLSFVLPNVDKTIQEAPFHLESSQFHPRPFRMPESSEMMLPGEVVAKHQLTSIQGRVSMPGIGMNPIRQESSTVKADQFDGCSHNKE

SEQ ID NO: 16018 - protein, 288 aa, Zea mays subsp. mays
  peptide (1)..(288): Ceres Seq. ID no. 12376530
  misc_feature (82)..(131): Pfam Name: Helix-loop-helix DNA-binding domain Pfam Description: Helix-loop-helix DNA-binding domain
  misc_feature (61)..(143): Homolog of NCBI NO: 30680903 NR Description: (bHLH015) putative bHLH transcription factor
  misc_feature (13)..(202): Homolog of NCBI NO: 34899612 NR Description: putative phytochrome interacting factor 4
  misc_feature (49)..(236): Homolog of NCBI NO: 31043851 NR Description: BP-5 protein [Oryza sativa]
  misc_feature (51)..(147): Homolog of NCBI NO: 21536863 NR Description: unknown [Arabidopsis thaliana]
  misc_feature (51)..(147): Homolog of NCBI NO: 15240202 NR Description: putative protein
  misc_feature (41)..(190): Homolog of NCBI NO: 4093153 NR Description: phytochrome-associated protein 3 [Arabidopsis
  misc_feature (41)..(190): Homolog of NCBI NO: 15217533 NR Description: putative phytochrome-associated protein 3
  misc_feature (54)..(162): Homolog of NCBI NO: 25407777 NR Description: hypothetical protein AT4g36930 [imported] -
  misc_feature (54)..(162): Homolog of NCBI NO: 18419937 NR Description: bHLH protein, SPATULA; protein id: At4g36930.1
  misc_feature (58)..(288): Homolog of NCBI NO: 15451582 NR Description: Putative SPATULA [Oryza sativa]
MALLQHQQLQQQRRQLEEEDEVRRQMFGGVAAFPAALGHGQQVDYGEDAGGLGDSDAGGSEPEPPPERTRGGSGGGGKRSRAAEVHNLSEKRRKSKINEKMKALQSLIPNSNKTDKASMLDEAIEYLKQLQLQVQMLSMRNGVYLNPPYLSGTIEPAQASQMFAAVGGGNITASSSGAVMPPVNQSSGLQVFDPLNPPRDQPLSFVLPNVDKTIQEAPFHLESSQFHPRPFRMPESSEMMLPGEVVAKHQLTSIQGRVSMPGIGMNPIRQESSTVKADQFDGCSHNKE

SEQ ID NO: 16019 - protein, 263 aa, Zea mays subsp. mays
  peptide (1)..(263): Ceres Seq. ID no. 12376531
  misc_feature (57)..(106): Pfam Name: Helix-loop-helix DNA-binding domain Pfam Description: Helix-loop-helix DNA-binding domain
  misc_feature (36)..(118): Homolog of NCBI NO: 30680903 NR Description: (bHLH015) putative bHLH transcription factor
  misc_feature (1)..(177): Homolog of NCBI NO: 34899612 NR Description: putative phytochrome interacting factor 4
  misc_feature (24)..(211): Homolog of NCBI NO: 31043851 NR Description: BP-5 protein [Oryza sativa]
  misc_feature (26)..(122): Homolog of NCBI NO: 21536863 NR Description: unknown [Arabidopsis thaliana]
  misc_feature (26)..(122): Homolog of NCBI NO: 15240202 NR Description: putative protein
  misc_feature (16)..(165): Homolog of NCBI NO: 4093153 NR Description: phytochrome-associated protein 3 [Arabidopsis
  misc_feature (16)..(165): Homolog of NCBI NO: 15217533 NR Description: putative phytochrome-associated protein 3
  misc_feature (29)..(137): Homolog of NCBI NO: 25407777 NR Description: hypothetical protein AT4g36930 [imported] -
  misc_feature (29)..(137): Homolog of NCBI NO: 18419937 NR Description: bHLH protein, SPATULA; protein id: At4g36930.1
  misc_feature (33)..(263): Homolog of NCBI NO: 15451582 NR Description: Putative SPATULA [Oryza sativa]
MFGGVAAFPAALGHGQQVDYGEDAGGLGDSDAGGSEPEPPPERTRGGSGGGGKRSRAAEVHNLSEKRRKSKINEKMKALQSLIPNSNKTDKASMLDEAIEYLKQLQLQVQMLSMRNGVYLNPPYLSGTIEPAQASQMFAAVGGGNITASSSGAVMPPVNQSSGLQVFDPLNPPRDQPLSFVLPNVDKTIQEAPFHLESSQFHPRPFRMPESSEMMLPGEVVAKHQLTSIQGRVSMPGIGMNPIRQESSTVKADQFDGCSHNKE

SEQ ID NO: 16020 - DNA, 1795 bp, Zea mays subsp. mays
  misc_feature (1)..(1795): Ceres Seq. ID no. 12366666
  misc_feature: MA Experiment ID: 108534 Result: Down-regulated in Transcription
  misc_feature: MA Experiment 108534 PARAMETER Experiment Name: Zm_4deg_Cold_P Parameter: Age (hr) Value: 8
  misc_feature: MA Experiment 108534 PARAMETER Experiment Name: Zm_4deg_Cold_P Parameter: Organism Value: Zea mays
  misc_feature: MA Experiment 108534 PARAMETER Experiment Name: Zm_4deg_Cold_P Parameter: Plant Line Value: 35A19
  misc_feature: MA Experiment 108534 PARAMETER Experiment Name: Zm_4deg_Cold_P Parameter: Temperature (deg C) Value: 4 vs. 22
  misc_feature: MA Experiment 108534 PARAMETER Experiment Name: Zm_4deg_Cold_P Parameter: Timepoint (hr) Value: 6
  misc_feature: MA Experiment 108534 PARAMETER Experiment Name: Zm_4deg_Cold_P Parameter: Tissue Value: Aerial
  misc_feature: MA Experiment ID: 108544 Result: Up-regulated in Transcription
  misc_feature: MA Experiment ID: 20000480 Result: Down-regulated in Transcription
  misc_feature: MA Experiment 20000480 PARAMETER Experiment Name: Zm_Drought_P Parameter: Age (day) Value: 11
  misc_feature: MA Experiment 20000480 PARAMETER Experiment Name: Zm_Drought_P Parameter: Organism Value: Zea mays
  misc_feature: MA Experiment 20000480 PARAMETER Experiment Name: Zm_Drought_P Parameter: Plant Line Value: 35A19
  misc_feature: MA Experiment 20000480 PARAMETER Experiment Name: Zm_Drought_P Parameter: Timepoint (hr) Value: 72
  misc_feature: MA Experiment 20000480 PARAMETER Experiment Name: Zm_Drought_P Parameter: Tissue Value: Aerial
  misc_feature: MA Experiment 20000480 PARAMETER Experiment Name: Zm_Drought_P Parameter: Treatment Value: Drought vs. No Drought
agtttttccctgtctgtcttcacttcatgtgtctttgtttagagaccttgccttgttggggcaggggacttgggacgacagagaggggagggcggagttggtgagcgagcacgggatcagctggtgacctcagaggctgtttgcctcggggggcgggggaattctttagcaccccatcttccacatgtctttcgactggctgctgctctttcggttggtaatatccttggatctctgactctagaccgttccacgaaatctccagtcctttcttcctcttggaggaggagggctgcggcttgagcaggagacgggagacatgggtagcttcgttaagctggcgaggagggcggtggagacggacgcgccggtcatggtcaagatacaagaactgcttcgaggggccaaggatgtcatgtcgcttgcgcagggagttgtttactggcaacctcctgagtcagcaatggctaaggtcgaaaaaataattagggaaccaacgcttagtaaatatggctctgatgatggtcttcccgagcttcgagaagcacttcttgaaaagttacgcagagagaataagcttactaagtcatcagttatggtcactgctggtgcaaatcaagcttttgtgaacttggtcctcactctttgcgatgctggtgattctgttgtcatgtttgcaccatattatttcaatgcctacatgtcattccagatgacaggtgttactgacatattagttggtggttctgatcacaagacacttcatcctgatgttgattggttggagaaggttctgaaagaaaatgaccctatccctaaacttgttaccgttgtgaatccggggaacccctctggagcttttattcccaggcctatgcttgagaggatttcagatctgtgcaaaaacgctggtgcatggcttgtggttgacaatacctatgaatactttatgtatgatggaatgaagcactattgcttagaaggcactcatattgtcaacctcttctcattctcaaaggcttatggaatgatggggtggcgtgtaggatacatcgcatttccaaacgaagtcgatggcttccacgaccagctcctcaaagtgcaggacaacatacccatctgcgcctccatcatcgggcagcgcctggcgctctactcgctggaggccggccccgagtggatcaaagaaagggtgagagacctggtgaaaaaccgcgcgctgctcgtggacgcgctgtccccgctcggtgacggcaacgtcaggggcgggcagggcgccatctacctctgggcgaagctgccggacacctgctccgacgatttcgaggtcgtcaggtggctcgcgaacaggcacggcgtcgccgtgatccctggcagcgccagcggaggccccgggcacatccgcgtctccttcggagggctcaaggaggaagacaccaggctggccgctgagaggctacggcgcggcttgcaggaactggtggctgatggaacggtacagtaacggctccattggtgtaggtaaaaaacacagcattgtagttttacacaacgactccgattttccaatggcataactccgccgggattgattctagagaagaactggaccttgttatgaagaataaaaggcatccggtctgcagtcacctttgttataaaatatgagtactacatattataatcagcagtaagtatttgtttttgtttggttttcagttatctatattactgatggcacccatttgtacttttgtacagagtcaaaagcataagcaagaaagtccttgatgtc

SEQ ID NO: 16021 - protein, 394 aa, Zea mays subsp. mays
  peptide (1)..(394): Ceres Seq. ID no. 12366667
  misc_feature (79)..(384): Pfam Name: Aminotransferase class I and II Pfam Description: Aminotransferase class I and II
  misc_feature (7)..(384): Homolog of NCBI NO: 34809903 NR Description: Chain A, Thermus Thermophilus Aspartate
  misc_feature (7)..(384): Homolog of NCBI NO: 17942613 NR Description: Chain A, Thermus Thermophilus Aspartate
  misc_feature (7)..(384): Homolog of NCBI NO: 15826454 NR Description: Chain A, Thermus Thermophilus Aspartate
  misc_feature (7)..(384): Homolog of NCBI NO: 34810106 NR Description: Chain A, Thermus Thermophilus Aspartate
  misc_feature (17)..(391): Homolog of NCBI NO: 33863300 NR Description: Aminotransferases class-I [Prochlorococcus
  misc_feature (16)..(387): Homolog of NCBI NO: 16331997 NR Description: aspartate aminotransferase [Synechocystis sp. PCC
  misc_feature (10)..(391): Homolog of NCBI NO: 17228534 NR Description: probable aspartate aminotransferase [Nostoc sp.
  misc_feature (7)..(388): Homolog of NCBI NO: 23123920 NR Description: hypothetical protein [Nostoc punctiforme]
  misc_feature (1)..(394): Homolog of NCBI NO: 15220119 NR Description: putative aspartate aminotransferase
  misc_feature (1)..(394): Homolog of NCBI NO: 34906130 NR Description: putative aspartate transaminase
MGSFVKLARRAVETDAPVMVKIQELLRGAKDVMSLAQGVVYWQPPESAMAKVEKIIREPTLSKYGSDDGLPELREALLEKLRRENKLTKSSVMVTAGANQAFVNLVLTLCDAGDSVVMFAPYYFNAYMSFQMTGVTDILVGGSDHKTLHPDVDWLEKVLKENDPIPKLVTVVNPGNPSGAFIPRPMLERISDLCKNAGAWLVVDNTYEYFMYDGMKHYCLEGTHIVNLFSFSKAYGMMGWRVGYIAFPNEVDGFHDQLLKVQDNIPICASIIGQRLALYSLEAGPEWIKERVRDLVKNRALLVDALSPLGDGNVRGGQGAIYLWAKLPDTCSDDFEVVRWLANRHGVAVIPGSASGGPGHIRVSFGGLKEEDTRLAAERLRRGLQELVADGTVQ

SEQ ID NO: 16022 - protein, 376 aa, Zea mays subsp. mays
  peptide (1)..(376): Ceres Seq. ID no. 12366668
  misc_feature (61)..(366): Pfam Name: Aminotransferase class I and II Pfam Description: Aminotransferase class I and II
  misc_feature (1)..(366): Homolog of NCBI NO: 34809903 NR Description: Chain A, Thermus Thermophilus Aspartate
  misc_feature (1)..(366): Homolog of NCBI NO: 17942613 NR Description: Chain A, Thermus Thermophilus Aspartate
  misc_feature (1)..(366): Homolog of NCBI NO: 15826454 NR Description: Chain A, Thermus Thermophilus Aspartate
  misc_feature (1)..(366): Homolog of NCBI NO: 34810106 NR Description: Chain A, Thermus Thermophilus Aspartate
  misc_feature (1)..(373): Homolog of NCBI NO: 33863300 NR Description: Aminotransferases class-I [Prochlorococcus
  misc_feature (1)..(369): Homolog of NCBI NO: 16331997 NR Description: aspartate aminotransferase [Synechocystis sp. PCC
  misc_feature (1)..(373): Homolog of NCBI NO: 17228534 NR Description: probable aspartate aminotransferase [Nostoc sp.
  misc_feature (1)..(370): Homolog of NCBI NO: 23123920 NR Description: hypothetical protein [Nostoc punctiforme]
  misc_feature (1)..(376): Homolog of NCBI NO: 15220119 NR Description: putative aspartate aminotransferase
  misc_feature (1)..(376): Homolog of NCBI NO: 34906130 NR Description: putative aspartate transaminase
MVKIQELLRGAKDVMSLAQGVVYWQPPESAMAKVEKIIREPTLSKYGSDDGLPELREALLEKLRRENKLTKSSVMVTAGANQAFVNLVLTLCDAGDSVVMFAPYYFNAYMSFQMTGVTDILVGGSDHKTLHPDVDWLEKVLKENDPIPKLVTVVNPGNPSGAFIPRPMLERISDLCKNAGAWLVVDNTYEYFMYDGMKHYCLEGTHIVNLFSFSKAYGMMGWRVGYIAFPNEVDGFHDQLLKVQDNIPICASIIGQRLALYSLEAGPEWIKERVRDLVKNRALLVDALSPLGDGNVRGGQGAIYLWAKLPDTCSDDFEVVRWLANRHGVAVIPGSASGGPGHIRVSFGGLKEEDTRLAAERLRRGLQELVADGTVQ

SEQ ID NO: 16023 - protein, 362 aa, Zea mays subsp. mays
  peptide (1)..(362): Ceres Seq. ID no. 12366669
  misc_feature (47)..(352): Pfam Name: Aminotransferase class I and II Pfam Description: Aminotransferase class I and II
  misc_feature (1)..(352): Homolog of NCBI NO: 15826454 NR Description: Chain A, Thermus Thermophilus Aspartate
  misc_feature (1)..(352): Homolog of NCBI NO: 34810106 NR Description: Chain A, Thermus Thermophilus Aspartate
  misc_feature (1)..(359): Homolog of NCBI NO: 33863300 NR Description: Aminotransferases class-I [Prochlorococcus
  misc_feature (1)..(355): Homolog of NCBI NO: 16331997 NR Description: aspartate aminotransferase [Synechocystis sp. PCC
  misc_feature (1)..(352): Homolog of NCBI NO: 34809903 NR Description: Chain A, Thermus Thermophilus Aspartate
  misc_feature (1)..(352): Homolog of NCBI NO: 17942613 NR Description: Chain A, Thermus Thermophilus Aspartate
  misc_feature (1)..(359): Homolog of NCBI NO: 17228534 NR Description: probable aspartate aminotransferase [Nostoc sp.
  misc_feature (1)..(356): Homolog of NCBI NO: 23123920 NR Description: hypothetical protein [Nostoc punctiforme]
  misc_feature (1)..(362): Homolog of NCBI NO: 15220119 NR Description: putative aspartate aminotransferase
  misc_feature (1)..(362): Homolog of NCBI NO: 34906130 NR Description: putative aspartate transaminase
MSLAQGVVYWQPPESAMAKVEKIIREPTLSKYGSDDGLPELREALLEKLRRENKLTKSSVMVTAGANQAFVNLVLTLCDAGDSVVMFAPYYFNAYMSFQMTGVTDILVGGSDHKTLHPDVDWLEKVLKENDPIPKLVTVVNPGNPSGAFIPRPMLERISDLCKNAGAWLVVDNTYEYFMYDGMKHYCLEGTHIVNLFSFSKAYGMMGWRVGYIAFPNEVDGFHDQLLKVQDNIPICASIIGQRLALYSLEAGPEWIKERVRDLVKNRALLVDALSPLGDGNVRGGQGAIYLWAKLPDTCSDDFEVVRWLANRHGVAVIPGSASGGPGHIRVSFGGLKEEDTRLAAERLRRGLQELVADGTVQ

SEQ ID NO: 16024 - DNA, 504 bp, Zea mays subsp. mays
  misc_feature (1)..(504): Ceres Seq. ID no. 1555481
  misc_feature: MA Experiment ID: 108689 Result: Down-regulated in Transcription
  misc_feature: MA Experiment 108689 PARAMETER Experiment Name: Zm_Drought_Roots_P Parameter: Age (day) Value: 9
  misc_feature: MA Experiment 108689 PARAMETER Experiment Name: Zm_Drought_Roots_P Parameter: Organism Value: Zea mays
  misc_feature: MA Experiment 108689 PARAMETER Experiment Name: Zm_Drought_Roots_P Parameter: Plant Line Value: 35A19
  misc_feature: MA Experiment 108689 PARAMETER Experiment Name: Zm_Drought_Roots_P Parameter: Timepoint (hr) Value: 24
  misc_feature: MA Experiment 108689 PARAMETER Experiment Name: Zm_Drought_Roots_P Parameter: Tissue Value: Roots
  misc_feature: MA Experiment 108689 PARAMETER Experiment Name: Zm_Drought_Roots_P Parameter: Treatment Value: Drought vs. No Drought
ctaatcataaaaaatcgaagacgtttgattcccgcaccacgagtccacggcacaagcaaatgaaacaatccacgcggaacgccgccgccgccattcccatggttttccatgctcggcaattccatttcagtgtcctccctcgtctcgtgaccttgccccatccagcccaacgctccgtccatcaactgaatagcttggcggtgtaaccctgtcgtgtgcgatgagctcctcgccgttgatcaccgccgcggcgtcggctgccgtggtggcgctggctgtcgccaaccgcgtgctctacaagctcgcgcttgtgcctctcaaggcgtaccccttcttcctcgcccagctcaccaccttcgggtacgttgccgtgtacttctcgatgctctacacgaggtaccgcactgggttggtgactcagagacatgctggcgctccccaagcaccggttcgtcgctatcggttyggctggaggcacttggagtcgctgctggcatgtctgct

SEQ ID NO: 16025 - protein, 67 aa, Zea mays subsp. mays
  peptide (1)..(67): Ceres Seq. ID no. 1555482
NHKKSKTFDSRTTSPRHKQMKQSTRNAAAAIPMVFHARQFHFSVLPRLVTLPHPAQRSVHQLNSLAV

SEQ ID NO: 16026 - protein, 48 aa, Zea mays subsp. mays
  peptide (1)..(48): Ceres Seq. ID no. 1555483
MKQSTRNAAAAIPMVFHARQFHFSVLPRLVTLPHPAQRSVHQLNSLAV

SEQ ID NO: 16027 - protein, 94 aa, Zea mays subsp. mays
  peptide (1)..(94): Ceres Seq. ID no. 1555484
  misc_feature (12)..(47): Homolog of NCBI NO: 15239886 NR Description: putative protein; protein id: At5g12160.1
  misc_feature (12)..(76): Homolog of NCBI NO: 21536591 NR Description: unknown [Arabidopsis thaliana]
  misc_feature (12)..(76): Homolog of NCBI NO: 20260240 NR Description: unknown protein [Arabidopsis thaliana]
  misc_feature (6)..(76): Homolog of NCBI NO: 21553716 NR Description: unknown [Arabidopsis thaliana]
  misc_feature (6)..(76): Homolog of NCBI NO: 18419900 NR Description: putative protein
  misc_feature (3)..(76): Homolog of NCBI NO: 20161872 NR Description: B1139B11.13 [Oryza sativa (japonica
  misc_feature (1)..(74): Homolog of NCBI NO: 30686536 NR Description: expressed protein [Arabidopsis thaliana]
  misc_feature (1)..(74): Homolog of NCBI NO: 7487326 NR Description: hypothetical protein T22A6.290 - Arabidopsis
  misc_feature (1)..(74): Homolog of NCBI NO: 28973717 NR Description: unknown protein [Arabidopsis thaliana]
  misc_feature (82)..(82): Xaa is any aa, unknown or other
MSSSPLITAAASAAVVALAVANRVLYKLALVPLKAYPFFLAQLTTFGYVAVYFSMLYTRYRTGLVTQRHAGAPQAPVRRYRXGWRHLESLLACL

SEQ ID NO: 16028 - DNA, 1385 bp, Zea mays subsp. mays
  misc_feature (1)..(1385): Ceres Seq. ID no. 12406409
  misc_feature: MA Experiment ID: 108529 Result: Up-regulated in Transcription
  misc_feature: MA Experiment 108529 PARAMETER Experiment Name: Zm_Imbibed_Seeds_P Parameter: Age (day) Value: 5 vs. 2
  misc_feature: MA Experiment 108529 PARAMETER Experiment Name: Zm_Imbibed_Seeds_P Parameter: Organism Value: Zea mays
  misc_feature: MA Experiment 108529 PARAMETER Experiment Name: Zm_Imbibed_Seeds_P Parameter: Plant Line Value: 35A19
  misc_feature: MA Experiment 108529 PARAMETER Experiment Name: Zm_Imbibed_Seeds_P Parameter: Tissue Value: Roots vs. Embryo
  misc_feature: MA Experiment ID: 108535 Result: Down-regulated in Transcription
  misc_feature: MA Experiment 108535 PARAMETER Experiment Name: Zm_Meristem_P Parameter: Age (day) Value: 8
  misc_feature: MA Experiment 108535 PARAMETER Experiment Name: Zm_Meristem_P Parameter: Organism Value: Zea mays
  misc_feature: MA Experiment 108535 PARAMETER Experiment Name: Zm_Meristem_P Parameter: Plant Line Value: 35A19
  misc_feature: MA Experiment 108535 PARAMETER Experiment Name: Zm_Meristem_P Parameter: Tissue Value: Root Meristem vs. Above Root Meristem
  misc_feature: MA Experiment ID: 108543 Result: Down-regulated in Transcription
gcacgagaccattacctagaacatcctaatcaaaagagggggcaaagagcgatggacgccgcggtgcggaaggccgcgggcgccggcatcgcgcgcgcgccggcgctggtgctagcgctggtggcggcgggggcgttcctgatctcctacaacttcttcaccatgctgttccacggcggcggcggaataggcgcggcggtgaccgctgggacgagggaccctgtggtggccatgccagcgtggatgcgcgcggcggcggacaccgaggcgcgacggcggccgttccatgtggcgctcacggccacggacgcgccctacagccggtggcagtgccgggtcatgtacttctggtacaagcggatgcaggcgcggccgggcggagaggccatgggcgggttcacgcgcgtgctgcactcggggaagcccgacgggctcatggacgagatccccaccttcgtcgtcgacccgctgcccgctggcaaggaccacggatatgtggtcctaaataggccgtgggcatttgtgcagtggcttcagaaagcaaagattgaagaagagtatatactaatggcagaaccagaccatatatttgtgaaacctctaccaaatttggcccatgacgatgacccagcagcatttcccttcttttacattacaccatcagaacatgaaaaaattatcaggaaatactatgctaaagaaagaggtcctgtcacagatatcgatccgattgggaattctcctgtgatcattaagaagacaattcttgagaagattgcccccacatggatgaatgtgtcaattcaaatgaaagaggatgaagagacagataaagtttttggatgggtgttggaaatgtatgcatacgctgttgctagcgcattgcatggagttcatcatatccttcgtaaagatttcatgatccagccaccttttgatacaaagctccagaatacatttataatccacttcacttatggatgtgactactcactaaagggtgaactgacctatggtaaagttggtgaatggcgatttgacaaaagatcattcccagataggccaccaccaagaaatcttacattgccccctcctggagtaccagaaagtgtggttactctagtgaaaatggtcaatgaagctagtgcaaaccttcctcggtgggatgatggaatataaactttggatgatgtcaattatatcttaggttcctttgatctgcccttgtatatggggaatatcaaagtatcaggtgcagtcggttgtttggtttacatccaaaatagctgcttacacttgcacaccatacctgatagaagaagatacataattttctcattgtactttttaggaaaagaaaagaaatgaaagtaaagttagcatcg

SEQ ID NO: 16029 - protein, 392 aa, Zea mays subsp. mays
  peptide (1)..(392): Ceres Seq. ID no. 12406410
  misc_feature (96)..(357): Homolog of NCBI NO: 22330795 NR Description: unknown protein
  misc_feature (18)..(189): Homolog of NCBI NO: 34903224 NR Description: unnamed protein product [Oryza sativa (japonica
  misc_feature (92)..(165): Homolog of NCBI NO: 25371351 NR Description: hypothetical protein At2g25260 [imported] -
  misc_feature (222)..(386): Homolog of NCBI NO: 25371351 NR Description: hypothetical protein At2g25260 [imported] -
  misc_feature (92)..(165): Homolog of NCBI NO: 30682704 NR Description: expressed protein [Arabidopsis thaliana]
  misc_feature (222)..(389): Homolog of NCBI NO: 30682704 NR Description: expressed protein [Arabidopsis thaliana]
  misc_feature (74)..(389): Homolog of NCBI NO: 24413996 NR Description: hypothetical protein~similar to Arabidopsis
  misc_feature (40)..(388): Homolog of NCBI NO: 22327055 NR Description: Expressed protein
  misc_feature (30)..(389): Homolog of NCBI NO: 15240642 NR Description: putative protein
ARDHYLEHPNQKRGQRAMDAAVRKAAGAGIARAPALVLALVAAGAFLISYNFFTMLFHGGGGIGAAVTAGTRDPVVAMPAWMRAAADTEARRRPFHVALTATDAPYSRWQCRVMYFWYKRMQARPGGEAMGGFTRVLHSGKPDGLMDEIPTFVVDPLPAGKDHGYVVLNRPWAFVQWLQKAKIEEEYILMAEPDHIFVKPLPNLAHDDDPAAFPFFYITPSEHEKIIRKYYAKERGPVTDIDPIGNSPVIIKKTILEKIAPTWMNVSIQMKEDEETDKVFGWVLEMYAYAVASALHGVHHILRKDFMIQPPFDTKLQNTFIIHFTYGCDYSLKGELTYGKVGEWRFDKRSFPDRPPPRNLTLPPPGVPESVVTLVKMVNEASANLPRWDDGI

SEQ ID NO: 16030 - protein, 375 aa, Zea mays subsp. mays
  peptide (1)..(375): Ceres Seq. ID no. 12406411
  misc_feature (79)..(340): Homolog of NCBI NO: 22330795 NR Description: unknown protein
  misc_feature (1)..(172): Homolog of NCBI NO: 34903224 NR Description: unnamed protein product [Oryza sativa (japonica
  misc_feature (75)..(148): Homolog of NCBI NO: 25371351 NR Description: hypothetical protein At2g25260 [imported] -
  misc_feature (205)..(369): Homolog of NCBI NO: 25371351 NR Description: hypothetical protein At2g25260 [imported] -
  misc_feature (75)..(148): Homolog of NCBI NO: 30682704 NR Description: expressed protein [Arabidopsis thaliana]
  misc_feature (205)..(372): Homolog of NCBI NO: 30682704 NR Description: expressed protein [Arabidopsis thaliana]
  misc_feature (57)..(372): Homolog of NCBI NO: 24413996 NR Description: hypothetical protein~similar to Arabidopsis
  misc_feature (23)..(371): Homolog of NCBI NO: 22327055 NR Description: Expressed protein
  misc_feature (13)..(372): Homolog of NCBI NO: 15240642 NR Description: putative protein
MDAAVRKAAGAGIARAPALVLALVAAGAFLISYNFFTMLFHGGGGIGAAVTAGTRDPVVAMPAWMRAAADTEARRRPFHVALTATDAPYSRWQCRVMYFWYKRMQARPGGEAMGGFTRVLHSGKPDGLMDEIPTFVVDPLPAGKDHGYVVLNRPWAFVQWLQKAKIEEEYILMAEPDHIFVKPLPNLAHDDDPAAFPFFYITPSEHEKIIRKYYAKERGPVTDIDPIGNSPVIIKKTILEKIAPTWMNVSIQMKEDEETDKVFGWVLEMYAYAVASALHGVHHILRKDFMIQPPFDTKLQNTFIIHFTYGCDYSLKGELTYGKVGEWRFDKRSFPDRPPPRNLTLPPPGVPESVVTLVKMVNEASANLPRWDDGI

SEQ ID NO: 16031 - protein, 338 aa, Zea mays subsp. mays
  peptide (1)..(338): Ceres Seq. ID no. 12406412
  misc_feature (42)..(303): Homolog of NCBI NO: 22330795 NR Description: unknown protein
  misc_feature (1)..(135): Homolog of NCBI NO: 34903224 NR Description: unnamed protein product [Oryza sativa (japonica
  misc_feature (38)..(111): Homolog of NCBI NO: 25371351 NR Description: hypothetical protein At2g25260 [imported] -
  misc_feature (168)..(332): Homolog of NCBI NO: 25371351 NR Description: hypothetical protein At2g25260 [imported] -
  misc_feature (38)..(111): Homolog of NCBI NO: 30682704 NR Description: expressed protein [Arabidopsis thaliana]
  misc_feature (168)..(335): Homolog of NCBI NO: 30682704 NR Description: expressed protein [Arabidopsis thaliana]
  misc_feature (20)..(335): Homolog of NCBI NO: 24413996 NR Description: hypothetical protein~similar to Arabidopsis
  misc_feature (1)..(334): Homolog of NCBI NO: 22327055 NR Description: Expressed protein
  misc_feature (1)..(335): Homolog of NCBI NO: 15240642 NR Description: putative protein
MLFHGGGGIGAAVTAGTRDPVVAMPAWMRAAADTEARRRPFHVALTATDAPYSRWQCRVMYFWYKRMQARPGGEAMGGFTRVLHSGKPDGLMDEIPTFVVDPLPAGKDHGYVVLNRPWAFVQWLQKAKIEEEYILMAEPDHIFVKPLPNLAHDDDPAAFPFFYITPSEHEKIIRKYYAKERGPVTDIDPIGNSPVIIKKTILEKIAPTWMNVSIQMKEDEETDKVFGWVLEMYAYAVASALHGVHHILRKDFMIQPPFDTKLQNTFIIHFTYGCDYSLKGELTYGKVGEWRFDKRSFPDRPPPRNLTLPPPGVPESVVTLVKMVNEASANLPRWDDGI

SEQ ID NO: 16032 - DNA, 1430 bp, Zea mays subsp. mays
  misc_feature (1)..(1430): Ceres Seq. ID no. 12434895
  misc_feature: MA Experiment ID: 108527 Result: Up-regulated in Transcription
  misc_feature: MA Experiment 108527 PARAMETER Experiment Name: Zm_5mM_NO_P Parameter: Age (day) Value: 8
  misc_feature: MA Experiment 108527 PARAMETER Experiment Name: Zm_5mM_NO_P Parameter: Organism Value: Zea mays
  misc_feature: MA Experiment 108527 PARAMETER Experiment Name: Zm_5mM_NO_P Parameter: Plant Line Value: 35A19
  misc_feature: MA Experiment 108527 PARAMETER Experiment Name: Zm_5mM_NO_P Parameter: Timepoint (hr) Value: 6
  misc_feature: MA Experiment 108527 PARAMETER Experiment Name: Zm_5mM_NO_P Parameter: Tissue Value: Aerial
  misc_feature: MA Experiment 108527 PARAMETER Experiment Name: Zm_5mM_NO_P Parameter: Treatment Value: 5mM NO vs. No Treatment
  misc_feature: MA Experiment ID: 108535 Result: Up-regulated in Transcription
  misc_feature: MA Experiment 108535 PARAMETER Experiment Name: Zm_Meristem_P Parameter: Age (day) Value: 8
  misc_feature: MA Experiment 108535 PARAMETER Experiment Name: Zm_Meristem_P Parameter: Organism Value: Zea mays
  misc_feature: MA Experiment 108535 PARAMETER Experiment Name: Zm_Meristem_P Parameter: Plant Line Value: 35A19
  misc_feature: MA Experiment 108535 PARAMETER Experiment Name: Zm_Meristem_P Parameter: Tissue Value: Root Meristem vs. Above Root Meristem
  misc_feature: MA Experiment ID: 108559 Result: Up-regulated in Transcription
  misc_feature: MA Experiment 108559 PARAMETER Experiment Name: Zm_5mM_NO_P Parameter: Age (day) Value: 8
  misc_feature: MA Experiment 108559 PARAMETER Experiment Name: Zm_5mM_NO_P Parameter: Organism Value: Zea mays
  misc_feature: MA Experiment 108559 PARAMETER Experiment Name: Zm_5mM_NO_P Parameter: Plant Line Value: 35A19
  misc_feature: MA Experiment 108559 PARAMETER Experiment Name: Zm_5mM_NO_P Parameter: Timepoint (hr) Value: 12
  misc_feature: MA Experiment 108559 PARAMETER Experiment Name: Zm_5mM_NO_P Parameter: Tissue Value: Aerial
  misc_feature: MA Experiment 108559 PARAMETER Experiment Name: Zm_5mM_NO_P Parameter: Treatment Value: 5mM NO vs. No Treatment
  misc_feature: MA Experiment ID: 108687 Result: Up-regulated in Transcription
  misc_feature: MA Experiment 108687 PARAMETER Experiment Name: Zm_Embryos-Flowers__P Parameter: Tissue Value: Embryo vs. Aerial+
  misc_feature: MA Experiment ID: 108689 Result: Down-regulated in Transcription
  misc_feature: MA Experiment 108689 PARAMETER Experiment Name: Zm_Drought_Roots_P Parameter: Age (day) Value: 9
  misc_feature: MA Experiment 108689 PARAMETER Experiment Name: Zm_Drought_Roots_P Parameter: Organism Value: Zea mays
  misc_feature: MA Experiment 108689 PARAMETER Experiment Name: Zm_Drought_Roots_P Parameter: Plant Line Value: 35A19
  misc_feature: MA Experiment 108689 PARAMETER Experiment Name: Zm_Drought_Roots_P Parameter: Timepoint (hr) Value: 24
  misc_feature: MA Experiment 108689 PARAMETER Experiment Name: Zm_Drought_Roots_P Parameter: Tissue Value: Roots
  misc_feature: MA Experiment 108689 PARAMETER Experiment Name: Zm_Drought_Roots_P Parameter: Treatment Value: Drought vs. No Drought
  misc_feature: MA Experiment ID: 20000480 Result: Down-regulated in Transcription
  misc_feature: MA Experiment 20000480 PARAMETER Experiment Name: Zm_Drought_P Parameter: Age (day) Value: 11
  misc_feature: MA Experiment 20000480 PARAMETER Experiment Name: Zm_Drought_P Parameter: Organism Value: Zea mays
  misc_feature: MA Experiment 20000480 PARAMETER Experiment Name: Zm_Drought_P Parameter: Plant Line Value: 35A19
  misc_feature: MA Experiment 20000480 PARAMETER Experiment Name: Zm_Drought_P Parameter: Timepoint (hr) Value: 72
  misc_feature: MA Experiment 20000480 PARAMETER Experiment Name: Zm_Drought_P Parameter: Tissue Value: Aerial
  misc_feature: MA Experiment 20000480 PARAMETER Experiment Name: Zm_Drought_P Parameter: Treatment Value: Drought vs. No Drought
  misc_feature: MA Experiment ID: 20000488 Result: Down-regulated in Transcription
  misc_feature: MA Experiment 20000488 PARAMETER Experiment Name: Zm_50mM_NH4NO3_L_to_H_P Parameter: Organism Value: Zea mays
  misc_feature: MA Experiment 20000488 PARAMETER Experiment Name: Zm_50mM_NH4NO3_L_to_H_P Parameter: Timepoint (hr) Value: 8
  misc_feature: MA Experiment 20000488 PARAMETER Experiment Name: Zm_50mM_NH4NO3_L_to_H_P Parameter: Tissue Value: Leaves
  misc_feature: MA Experiment 20000488 PARAMETER Experiment Name: Zm_50mM_NH4NO3_L_to_H_P Parameter: Treatment Value: 50mM NH4NO3 vs. 100mM Mannitol
  misc_feature: MA Experiment ID: 20000534 Result: Down-regulated in Transcription
  misc_feature: MA Experiment 20000534 PARAMETER Experiment Name: Zm_Hybrid_Pollen_P Parameter: Age (day) Value: 8
  misc_feature: MA Experiment 20000534 PARAMETER Experiment Name: Zm_Hybrid_Pollen_P Parameter: Organism Value: Zea mays
  misc_feature: MA Experiment 20000534 PARAMETER Experiment Name: Zm_Hybrid_Pollen_P Parameter: Plant Line Value: 35A19
  misc_feature: MA Experiment 20000534 PARAMETER Experiment Name: Zm_Hybrid_Pollen_P Parameter: Tissue Value: Pollen vs. Aerial
  misc_feature: MA Experiment ID: 20001614 Result: Up-regulated in Transcription
  misc_feature: MA Experiment 20001614 PARAMETER Experiment Name: Zm_50ppm_KNO3_L-to-H_P Parameter: Age (day) Value: 21
  misc_feature: MA Experiment 20001614 PARAMETER Experiment Name: Zm_50ppm_KNO3_L-to-H_P Parameter: Organism Value: Zea mays
  misc_feature: MA Experiment 20001614 PARAMETER Experiment Name: Zm_50ppm_KNO3_L-to-H_P Parameter: Plant Line Value: 35A19
  misc_feature: MA Experiment 20001614 PARAMETER Experiment Name: Zm_50ppm_KNO3_L-to-H_P Parameter: Timepoint (hr) Value: 48
  misc_feature: MA Experiment 20001614 PARAMETER Experiment Name: Zm_50ppm_KNO3_L-to-H_P Parameter: Tissue Value: Roots
  misc_feature: MA Experiment 20001614 PARAMETER Experiment Name: Zm_50ppm_KNO3_L-to-H_P Parameter: Treatment Value: 50ppm KNO3 vs. 50ppm KCl
aggagacttggcttgtactgcatcgcaaaccgcaatcgcacgcggcacttgcccccgcgatcataacctcacaccgcccgccaccagctgcgcagcgctcgacagcctcaccagccgccatcactcgcggcagtacacggccgctgggactgggagagtgggagtgagacgctgctgttgccgagtgcgaggagacactactactcactctcaagactcgagagcagcaggggcgaccgagctctgcgtgcgtggggagaaccggagaaggcagcagaggagggagggagcgcgtggacgggctaggcgcagcagcatgggcgccgggatcagggtcctggcggcgctcttggcggcgctcgcggcagccaccgccggcgtgacggcgcagctgcggcaggactactacgcggcggtgtgcccggacctggagagcatcgtgcgcgccgcggtgtccaagaaggtgcaggcgcagcccgtcgccgtgggcgccaccatccgcctcttcttccacgactgcttcgtcgagggctgngacgcgtcggtgatcctggtgtccacggggaacaacacggcggagaaggaccacccgagcaacctctccctggccggcgacggcttcgacaccgtcatccaggccaaggcggccgtggacgccgtgccggcgtgcgccaaccaggtgtcgtgcgccgacatcctggcgctggccacccgggacgtcattgagctggctggcgggccgtcgtacgcggtggagctggggaggctggacgggctggtgtccatgtccaccaacgtcgacggcaagctgccgccgccgtccttcaacctggaccagctcacgagcattttcgccctcaacaacctgtcgcaggccgacatgattgctttatctgcggcgcacacggtggggttcgcgcactgcagcacgttctcggaccggatccagccgcagtcggtggacccgacgatgaacgcgacgtacgcggaggacctgcaggcggcgtgcccggcgggggtggaccccaacatcgcgctgcagctggaccccgtgacgccgcaggccttcgacaaccagtacttcgccaacctggtggaacggccgggggctgttcgcctccgaccaggtgctcttctccgacgcgcggtcgcagcccaccgtggtggcgtgggcgcagaacgccaccgccttcgagcaggccttcgtcgacgccatcaccaggctcggccgcgtcggcgtcaagaccgacccgtcgctgggggacgtccgccgcgactgcgccttcctcaactgaaaaggatggacatggagagctggtttatatctcacacaagtgttcatacacaatctagagtaaagtttttttgttgttgttattattatcatgtcaggtatgagcacaaggttgaattaatggttaatgcgattg

SEQ ID NO: 16033 - protein, 476 aa, Zea mays subsp. mays
  peptide (1)..(476): Ceres Seq. ID no. 12434896
  misc_feature (147)..(369): Pfam Name: Peroxidase Pfam Description: Peroxidase
  misc_feature (113)..(369): Homolog of NCBI NO: 17979440 NR Description: putative peroxidase [Arabidopsis thaliana]
  misc_feature (113)..(369): Homolog of NCBI NO: 15235600 NR Description: peroxidase, putative
  misc_feature (115)..(369): Homolog of NCBI NO: 4138647 NR Description: peroxidase [Trifolium repens]
  misc_feature (110)..(369): Homolog of NCBI NO: 15229646 NR Description: peroxidase, putative; protein id: At3g49960.1
  misc_feature (129)..(369): Homolog of NCBI NO: 13992528 NR Description: peroxidase2 [Medicago sativa]
  misc_feature (129)..(369): Homolog of NCBI NO: 2117624 NR Description: peroxidase (EC 1.11.1.7) 2 precursor - alfalfa
  misc_feature (129)..(369): Homolog of NCBI NO: 28629828 NR Description: peroxidase 1 [Artemisia annua]
  misc_feature (127)..(369): Homolog of NCBI NO: 14485511 NR Description: putative peroxidase [Solanum tuberosum]
  misc_feature (111)..(364): Homolog of NCBI NO: 34915320 NR Description: putative peroxidase [Oryza sativa (japonica
  misc_feature (106)..(369): Homolog of NCBI NO: 17027274 NR Description: putative peroxidase [Oryza sativa (japonica
  misc_feature (178)..(178): Xaa is any aa, unknown or other
GDLACTASQTAIARGTCPRDHNLTPPATSCAALDSLTSRHHSRQYTAAGTGRVGVRRCCCRVRGDTTTHSQDSRAAGATELCVRGENRRRQQRREGARGRARRSSMGAGIRVLAALLAALAAATAGVTAQLRQDYYAAVCPDLESIVRAAVSKKVQAQPVAVGATIRLFFHDCFVEGXDASVILVSTGNNTAEKDHPSNLSLAGDGFDTVIQAKAAVDAVPACANQVSCADILALATRDVIELAGGPSYAVELGRLDGLVSMSTNVDGKLPPPSFNLDQLTSIFALNNLSQADMIALSAAHTVGFAHCSTFSDRIQPQSVDPTMNATYAEDLQAACPAGVDPNIALQLDPVTPQAFDNQYFANLVERPGAVRLRPGALLRRAVAAHRGGVGAERHRLRAGLRRRHHQARPRRRQDRPVAGGRPPRLRLPQLKRMDMESWFISHTSVHTQSRVKFFCCCYYYHVRYEHKVELMVNAI

SEQ ID NO: 16034 - protein, 371 aa, Zea mays subsp. mays
  peptide (1)..(371): Ceres Seq. ID no. 12434897
  misc_feature (42)..(264): Pfam Name: Peroxidase Pfam Description: Peroxidase
  misc_feature (8)..(264): Homolog of NCBI NO: 17979440 NR Description: putative peroxidase [Arabidopsis thaliana]
  misc_feature (8)..(264): Homolog of NCBI NO: 15235600 NR Description: peroxidase, putative
  misc_feature (10)..(264): Homolog of NCBI NO: 4138647 NR Description: peroxidase [Trifolium repens]
  misc_feature (5)..(264): Homolog of NCBI NO: 15229646 NR Description: peroxidase, putative; protein id: At3g49960.1
  misc_feature (24)..(264): Homolog of NCBI NO: 13992528 NR Description: peroxidase2 [Medicago sativa]
  misc_feature (24)..(264): Homolog of NCBI NO: 2117624 NR Description: peroxidase (EC 1.11.1.7) 2 precursor - alfalfa
  misc_feature (24)..(264): Homolog of NCBI NO: 28629828 NR Description: peroxidase 1 [Artemisia annua]
  misc_feature (22)..(264): Homolog of NCBI NO: 14485511 NR Description: putative peroxidase [Solanum tuberosum]
  misc_feature (6)..(259): Homolog of NCBI NO: 34915320 NR Description: putative peroxidase [Oryza sativa (japonica
  misc_feature (1)..(264): Homolog of NCBI NO: 17027274 NR Description: putative peroxidase [Oryza sativa (japonica
  misc_feature (73)..(73): Xaa is any aa, unknown or other
MGAGIRVLAALLAALAAATAGVTAQLRQDYYAAVCPDLESIVRAAVSKKVQAQPVAVGATIRLFFHDCFVEGXDASVILVSTGNNTAEKDHPSNLSLAGDGFDTVIQAKAAVDAVPACANQVSCADILALATRDVIELAGGPSYAVELGRLDGLVSMSTNVDGKLPPPSFNLDQLTSIFALNNLSQADMIALSAAHTVGFAHCSTFSDRIQPQSVDPTMNATYAEDLQAACPAGVDPNIALQLDPVTPQAFDNQYFANLVERPGAVRLRPGALLRRAVAAHRGGVGAERHRLRAGLRRRHHQARPRRRQDRPVAGGRPPRLRLPQLKRMDMESWFISHTSVHTQSRVKFFCCCYYYHVRYEHKVELMVNAI

SEQ ID NO: 16035 - DNA, 678 bp, Zea mays subsp. mays
  misc_feature (1)..(678): Ceres Seq. ID no. 12341959
  misc_feature: MA Experiment ID: 108522 Result: Down-regulated in Transcription
  misc_feature: MA Experiment 108522 PARAMETER Experiment Name: Zm_42deg_Heat_P Parameter: Age (day) Value: 8
  misc_feature: MA Experiment 108522 PARAMETER Experiment Name: Zm_42deg_Heat_P Parameter: Organism Value: Zea mays
  misc_feature: MA Experiment 108522 PARAMETER Experiment Name: Zm_42deg_Heat_P Parameter: Plant Line Value: 35A19
  misc_feature: MA Experiment 108522 PARAMETER Experiment Name: Zm_42deg_Heat_P Parameter: Temperature (deg C) Value: 42 vs. 22
  misc_feature: MA Experiment 108522 PARAMETER Experiment Name: Zm_42deg_Heat_P Parameter: Timepoint (hr) Value: 1
  misc_feature: MA Experiment 108522 PARAMETER Experiment Name: Zm_42deg_Heat_P Parameter: Tissue Value: Aerial
  misc_feature: MA Experiment ID: 108529 Result: Down-regulated in Transcription
  misc_feature: MA Experiment 108529 PARAMETER Experiment Name: Zm_Imbibed_Seeds_P Parameter: Age (day) Value: 5 vs. 2
  misc_feature: MA Experiment 108529 PARAMETER Experiment Name: Zm_Imbibed_Seeds_P Parameter: Organism Value: Zea mays
  misc_feature: MA Experiment 108529 PARAMETER Experiment Name: Zm_Imbibed_Seeds_P Parameter: Plant Line Value: 35A19
  misc_feature: MA Experiment 108529 PARAMETER Experiment Name: Zm_Imbibed_Seeds_P Parameter: Tissue Value: Roots vs. Embryo
  misc_feature: MA Experiment ID: 108543 Result: Up-regulated in Transcription
  misc_feature: MA Experiment ID: 108546 Result: Down-regulated in Transcription
  misc_feature: MA Experiment 108546 PARAMETER Experiment Name: Zm_Imbibed_Seeds_P Parameter: Age (day) Value: 3 vs. 2
  misc_feature: MA Experiment 108546 PARAMETER Experiment Name: Zm_Imbibed_Seeds_P Parameter: Organism Value: Zea mays
  misc_feature: MA Experiment 108546 PARAMETER Experiment Name: Zm_Imbibed_Seeds_P Parameter: Plant Line Value: 35A19
  misc_feature: MA Experiment 108546 PARAMETER Experiment Name: Zm_Imbibed_Seeds_P Parameter: Tissue Value: Roots vs. Embryo
  misc_feature: MA Experiment ID: 20000630 Result: Down-regulated in Transcription
  misc_feature: MA Experiment 20000630 PARAMETER Experiment Name: Zm_Herbicide-Treatments_P Parameter: Timepoint (hr) Value: 4
  misc_feature: MA Experiment 20000630 PARAMETER Experiment Name: Zm_Herbicide-Treatments_P Parameter: Tissue Value: Aerial
  misc_feature: MA Experiment 20000630 PARAMETER Experiment Name: Zm_Herbicide-Treatments_P Parameter: Treatment Value: Roundup vs. No Treatment
  misc_feature: MA Experiment ID: 20000633 Result: Up-regulated in Transcription
  misc_feature: MA Experiment 20000633 PARAMETER Experiment Name: Zm_Herbicide-Treatments_P Parameter: Timepoint (hr) Value: 4
  misc_feature: MA Experiment 20000633 PARAMETER Experiment Name: Zm_Herbicide-Treatments_P Parameter: Tissue Value: Aerial
  misc_feature: MA Experiment 20000633 PARAMETER Experiment Name: Zm_Herbicide-Treatments_P Parameter: Treatment Value: Trimec vs. No Treatment
atcggcaagcgaagcactccactccactccactccacctgttagaaacaagctagctcaagttctctcaacttcttgccaggaaagcgcgcaggaggtcgacgggaacgaccatggtcagcgccaagagacttgtgcaaatggccaagaagtggcagaggatggccgccacggcaaggaggcggatcgcactggcgccgccggcaaaaggagccgccgagggatcgtcgccgccgtgcagcacctcgcgtgtagctgtagccggcaagggccactgcgtggtgtactcggcggacggcaggcggttcgaggtcccgctgccgtacctcgacaccgccgtcttcggcgtgctcctcggcatgtcgcgggaggagttcgggttcgccggtggcgacggcaggatcacggtgccctgtgacgccgccgtcatggagtacgtcatgtgtttgcttcggaganacgcgtcggaanaggtggtgagggcgttcctgagctccgtggtgagccggccttgcagccactgtggaaatggctcgctggtgcagtccaccacgggagttcgccagcaagctgctgtttctagcttntgagctgaggattaattagcacttagctagattgttttattattattattattattattattattattattattattattattattattatt

SEQ ID NO: 16036 - protein, 158 aa, Zea mays subsp. mays
  peptide (1)..(158): Ceres Seq. ID no. 12341960
  misc_feature (1)..(110): Pfam Name: Auxin responsive protein Pfam Description: Auxin responsive protein
  misc_feature (1)..(151): Homolog of NCBI NO: 26452170 NR Description: putative auxin-induced protein [Arabidopsis
  misc_feature (1)..(151): Homolog of NCBI NO: 18397123 NR Description: auxin-induced protein, putative
  misc_feature (1)..(137): Homolog of NCBI NO: 15218924 NR Description: auxin-induced protein, putative
  misc_feature (1)..(137): Homolog of NCBI NO: 26452075 NR Description: putative auxin-induced protein [Arabidopsis
  misc_feature (1)..(135): Homolog of NCBI NO: 18397101 NR Description: auxin-induced protein, putative
  misc_feature (1)..(135): Homolog of NCBI NO: 21592571 NR Description: auxin-induced protein, putative [Arabidopsis
  misc_feature (1)..(135): Homolog of NCBI NO: 18397103 NR Description: auxin-induced protein, putative
  misc_feature (1)..(135): Homolog of NCBI NO: 21553494 NR Description: auxin-induced protein, putative [Arabidopsis
  misc_feature (1)..(135): Homolog of NCBI NO: 20149052 NR Description: auxin-induced SAUR-like protein [Capsicum annuum]
  misc_feature (1)..(155): Homolog of NCBI NO: 32187718 NR Description: auxin induced protein [Zea mays]
  misc_feature (116)..(116): Xaa is any aa, unknown or other
  misc_feature (120)..(120): Xaa is any aa, unknown or other
  misc_feature (158)..(158): Xaa is any aa, unknown or other
MVSAKRLVQMAKKWQRMAATARRRIALAPPAKGAAEGSSPPCSTSRVAVAGKGHCVVYSADGRRFEVPLPYLDTAVFGVLLGMSREEFGFAGGDGRITVPCDAAVMEYVMCLLRRXASEXVVRAFLSSVVSRPCSHCGNGSLVQSTTGVRQQAAVSSX

SEQ ID NO: 16037 - protein, 149 aa, Zea mays subsp. mays
  peptide (1)..(149): Ceres Seq. ID no. 12341961
  misc_feature (1)..(101): Pfam Name: Auxin responsive protein Pfam Description: Auxin responsive protein
  misc_feature (1)..(142): Homolog of NCBI NO: 26452170 NR Description: putative auxin-induced protein [Arabidopsis
  misc_feature (1)..(142): Homolog of NCBI NO: 18397123 NR Description: auxin-induced protein, putative
  misc_feature (1)..(128): Homolog of NCBI NO: 15218924 NR Description: auxin-induced protein, putative
  misc_feature (1)..(128): Homolog of NCBI NO: 26452075 NR Description: putative auxin-induced protein [Arabidopsis
  misc_feature (1)..(126): Homolog of NCBI NO: 18397101 NR Description: auxin-induced protein, putative
  misc_feature (1)..(126): Homolog of NCBI NO: 21592571 NR Description: auxin-induced protein, putative [Arabidopsis
  misc_feature (1)..(126): Homolog of NCBI NO: 18397103 NR Description: auxin-induced protein, putative
  misc_feature (1)..(126): Homolog of NCBI NO: 21553494 NR Description: auxin-induced protein, putative [Arabidopsis
  misc_feature (1)..(126): Homolog of NCBI NO: 20149052 NR Description: auxin-induced SAUR-like protein [Capsicum annuum]
  misc_feature (1)..(146): Homolog of NCBI NO: 32187718 NR Description: auxin induced protein [Zea mays]
  misc_feature (107)..(107): Xaa is any aa, unknown or other
  misc_feature (111)..(111): Xaa is any aa, unknown or other
  misc_feature (149)..(149): Xaa is any aa, unknown or other
MAKKWQRMAATARRRIALAPPAKGAAEGSSPPCSTSRVAVAGKGHCVVYSADGRRFEVPLPYLDTAVFGVLLGMSREEFGFAGGDGRITVPCDAAVMEYVMCLLRRXASEXVVRAFLSSVVSRPCSHCGNGSLVQSTTGVRQQAAVSSX

SEQ ID NO: 16038 - protein, 142 aa, Zea mays subsp. mays
  peptide (1)..(142): Ceres Seq. ID no. 12341962
  misc_feature (1)..(94): Pfam Name: Auxin responsive protein Pfam Description: Auxin responsive protein
  misc_feature (1)..(135): Homolog of NCBI NO: 26452170 NR Description: putative auxin-induced protein [Arabidopsis
  misc_feature (1)..(135): Homolog of NCBI NO: 18397123 NR Description: auxin-induced protein, putative
  misc_feature (1)..(121): Homolog of NCBI NO: 15218924 NR Description: auxin-induced protein, putative
  misc_feature (1)..(121): Homolog of NCBI NO: 26452075 NR Description: putative auxin-induced protein [Arabidopsis
  misc_feature (1)..(119): Homolog of NCBI NO: 18397101 NR Description: auxin-induced protein, putative
  misc_feature (1)..(119): Homolog of NCBI NO: 21592571 NR Description: auxin-induced protein, putative [Arabidopsis
  misc_feature (1)..(119): Homolog of NCBI NO: 18397103 NR Description: auxin-induced protein, putative
  misc_feature (1)..(119): Homolog of NCBI NO: 21553494 NR Description: auxin-induced protein, putative [Arabidopsis
  misc_feature (1)..(119): Homolog of NCBI NO: 20149052 NR Description: auxin-induced SAUR-like protein [Capsicum annuum]
  misc_feature (1)..(139): Homolog of NCBI NO: 32187718 NR Description: auxin induced protein [Zea mays]
  misc_feature (100)..(100): Xaa is any aa, unknown or other
  misc_feature (104)..(104): Xaa is any aa, unknown or other
  misc_feature (142)..(142): Xaa is any aa, unknown or other
MAATARRRIALAPPAKGAAEGSSPPCSTSRVAVAGKGHCVVYSADGRRFEVPLPYLDTAVFGVLLGMSREEFGFAGGDGRITVPCDAAVMEYVMCLLRRXASEXVVRAFLSSVVSRPCSHCGNGSLVQSTTGVRQQAAVSSX

SEQ ID NO: 16039 - DNA, 1484 bp, Zea mays subsp. mays
  misc_feature (1)..(1484): Ceres Seq. ID no. 12362339
  misc_feature: MA Experiment ID: 108523 Result: Up-regulated in Transcription
  misc_feature: MA Experiment 108523 PARAMETER Experiment Name: Zm_42deg_Heat_P Parameter: Age (day) Value: 8
  misc_feature: MA Experiment 108523 PARAMETER Experiment Name: Zm_42deg_Heat_P Parameter: Organism Value: Zea mays
  misc_feature: MA Experiment 108523 PARAMETER Experiment Name: Zm_42deg_Heat_P Parameter: Plant Line Value: 35A19
  misc_feature: MA Experiment 108523 PARAMETER Experiment Name: Zm_42deg_Heat_P Parameter: Temperature (deg C) Value: 42 vs. 22
  misc_feature: MA Experiment 108523 PARAMETER Experiment Name: Zm_42deg_Heat_P Parameter: Timepoint (hr) Value: 6
  misc_feature: MA Experiment 108523 PARAMETER Experiment Name: Zm_42deg_Heat_P Parameter: Tissue Value: Aerial
aaaaatcgtccgactgtagcctagtcgacggatttgatcccgcaggccgcagcgcagcggccgtgtccgctgccgccaccagccaccggccacagccaggcagccagctcgcgtcgaagaagacgacgtggcccgccaagctcccctgccaaaagaaacaggagggcccgcgtcgtcgcctagtcggcgcgtggtgggagtggtatggagaggggcgccgccacggccgccgcggcgctcggctgcgccctccgctccccttccccctccgcgtccccggctccccggtggccgccgctccaccgctgcccacggcgcggcccgcccgggcctccccgctccctcctgccgcccgcgcggcgtttcaggcccctagacatgaagaagggacatagtaggaactcaccgaagaccttcagctcatctggacactcgggggttagactaaacaacgaaggtctcgtcaacgacaggctcctaatagattgtggagaggatcaagattgtgtgctcggtggcatagttgccctgggaaaagtttgatgctctccacattggtcatcgggaattggcaatgcatgcttctaaagcagggactccttttcttctttcttttgtgggaatggccgaagtacttggctggacatataggccacctatagttgctcattgtgatcgcaagcgggtcctttcatcttgggctccatactgtaggaatgtggtaccacttgaatatcaagttgaattttcaaaggtcaggtccctgtctccacgacaatttgttgaaaggttatcaaaggatcttagaataaaaggtgtcgtggcaggtgaaaattacaggtttggttacaaagcatctggtgacgcaactgagttagtgaaactatgtgaggaatttggtttaagtgcattcattgtacgctctgtcatggacacagcaaaaagatctcttaatggattttcaggcgctataaattcgagtgataaaggacaggtttcttccagccgtgtccgccatgcattggctatgggtgacatggaatacgtctctgaattactagggaggaaacaccgtcttttgctaatggttaaccaacactgccttcatgaaaagaaaagcattgtactccctaattcttgcatgctgaacatgccaccagctgaaggtctctatgaaaactgcgaccttgttaatggagggtatcttggaccatgtagagtgatcatcaactctgatactatcatcattgagatgaaagatgataacagtttatccctaaatcctattcaagaagttcagttagggattgagtttggatgaagttatatactttttgcatctgccatcttgtggagattattgctgaaagaagacattggggggaatactgcaaggggaagtcgaagactttgttcaagcgtgcagtacgcctcatcgtgattgagttcaggagcattttgtagtctcacaagaatgctttatt

SEQ ID NO: 16040 - protein, 248 aa, Zea mays subsp. mays
  peptide (1)..(248): Ceres Seq. ID no. 12362340
  misc_feature (1)..(200): Homolog of NCBI NO: 21224059 NR Description: probable riboflavin kinase (FAD synthetase)
  misc_feature (50)..(164): Homolog of NCBI NO: 18310664 NR Description: riboflavin biosynthesis protein [Clostridium
  misc_feature (1)..(230): Homolog of NCBI NO: 10178276 NR Description: putative protein [Arabidopsis thaliana]
  misc_feature (1)..(248): Homolog of NCBI NO: 22326656 NR Description: putative protein
  misc_feature (1)..(248): Homolog of NCBI NO: 21553715 NR Description: unknown [Arabidopsis thaliana]
  misc_feature (1)..(248): Homolog of NCBI NO: 18420664 NR Description: expressed protein
  misc_feature (1)..(248): Homolog of NCBI NO: 29150370 NR Description: unknow protein [Oryza sativa (japonica
MHASKAGTPFLLSFVGMAEVLGWTYRPPIVAHCDRKRVLSSWAPYCRNVVPLEYQVEFSKVRSLSPRQFVERLSKDLRIKGVVAGENYRFGYKASGDATELVKLCEEFGLSAFIVRSVMDTAKRSLNGFSGAINSSDKGQVSSSRVRHALAMGDMEYVSELLGRKHRLLLMVNQHCLHEKKSIVLPNSCMLNMPPAEGLYENCDLVNGGYLGPCRVIINSDTIIIEMKDDNSLSLNPIQEVQLGIEFG

SEQ ID NO: 16041 - protein, 232 aa, Zea mays subsp. mays
  peptide (1)..(232): Ceres Seq. ID no. 12362341
  misc_feature (1)..(232): Homolog of NCBI NO: 21553715 NR Description: unknown [Arabidopsis thaliana]
  misc_feature (1)..(232): Homolog of NCBI NO: 18420664 NR Description: expressed protein
  misc_feature (1)..(232): Homolog of NCBI NO: 29150370 NR Description: unknow protein [Oryza sativa (japonica
  misc_feature (1)..(184): Homolog of NCBI NO: 21224059 NR Description: probable riboflavin kinase (FAD synthetase)
  misc_feature (34)..(148): Homolog of NCBI NO: 18310664 NR Description: riboflavin biosynthesis protein [Clostridium
  misc_feature (1)..(214): Homolog of NCBI NO: 10178276 NR Description: putative protein [Arabidopsis thaliana]
  misc_feature (1)..(232): Homolog of NCBI NO: 22326656 NR Description: putative protein
MAEVLGWTYRPPIVAHCDRKRVLSSWAPYCRNVVPLEYQVEFSKVRSLSPRQFVERLSKDLRIKGVVAGENYRFGYKASGDATELVKLCEEFGLSAFIVRSVMDTAKRSLNGFSGAINSSDKGQVSSSRVRHALAMGDMEYVSELLGRKHRLLLMVNQHCLHEKKSIVLPNSCMLNMPPAEGLYENCDLVNGGYLGPCRVIINSDTIIIEMKDDNSLSLNPIQEVQLGIEFG

SEQ ID NO: 16042 - protein, 130 aa, Zea mays subsp. mays
  peptide (1)..(130): Ceres Seq. ID no. 12362342
KSSDCSLVDGFDPAGRSAAAVSAAATSHRPQPGSQLASKKTTWPAKLPCQKKQEGPRRRLVGAWWEWYGEGRRHGRRGARLRPPLPFPLRVPGSPVAAAPPLPTARPARASPLPPAARAAFQAPRHEEGT

SEQ ID NO: 16043 - DNA, 1253 bp, Zea mays subsp. mays
  misc_feature (1)..(1253): Ceres Seq. ID no. 12358734
  misc_feature: MA Experiment ID: 108504 Result: Down-regulated in Transcription
  misc_feature: MA Experiment 108504 PARAMETER Experiment Name: Zm_Drought_P Parameter: Age (day) Value: 8
  misc_feature: MA Experiment 108504 PARAMETER Experiment Name: Zm_Drought_P Parameter: Organism Value: Zea mays
  misc_feature: MA Experiment 108504 PARAMETER Experiment Name: Zm_Drought_P Parameter: Plant Line Value: 35A19
  misc_feature: MA Experiment 108504 PARAMETER Experiment Name: Zm_Drought_P Parameter: Timepoint (hr) Value: 12
  misc_feature: MA Experiment 108504 PARAMETER Experiment Name: Zm_Drought_P Parameter: Tissue Value: Aerial
  misc_feature: MA Experiment 108504 PARAMETER Experiment Name: Zm_Drought_P Parameter: Treatment Value: Drought vs. No Drought
  misc_feature: MA Experiment ID: 108513 Result: Down-regulated in Transcription
  misc_feature: MA Experiment 108513 PARAMETER Experiment Name: Zm_100uM_ABA_P Parameter: Age (day) Value: 8
  misc_feature: MA Experiment 108513 PARAMETER Experiment Name: Zm_100uM_ABA_P Parameter: Organism Value: Zea mays
  misc_feature: MA Experiment 108513 PARAMETER Experiment Name: Zm_100uM_ABA_P Parameter: Plant Line Value: 35A19
  misc_feature: MA Experiment 108513 PARAMETER Experiment Name: Zm_100uM_ABA_P Parameter: Timepoint (hr) Value: 6
  misc_feature: MA Experiment 108513 PARAMETER Experiment Name: Zm_100uM_ABA_P Parameter: Tissue Value: Aerial
  misc_feature: MA Experiment 108513 PARAMETER Experiment Name: Zm_100uM_ABA_P Parameter: Treatment Value: 100uM ABA vs. No Treatment
  misc_feature: MA Experiment ID: 108522 Result: Down-regulated in Transcription
  misc_feature: MA Experiment 108522 PARAMETER Experiment Name: Zm_42deg_Heat_P Parameter: Age (day) Value: 8
  misc_feature: MA Experiment 108522 PARAMETER Experiment Name: Zm_42deg_Heat_P Parameter: Organism Value: Zea mays
  misc_feature: MA Experiment 108522 PARAMETER Experiment Name: Zm_42deg_Heat_P Parameter: Plant Line Value: 35A19
  misc_feature: MA Experiment 108522 PARAMETER Experiment Name: Zm_42deg_Heat_P Parameter: Temperature (deg C) Value: 42 vs. 22
  misc_feature: MA Experiment 108522 PARAMETER Experiment Name: Zm_42deg_Heat_P Parameter: Timepoint (hr) Value: 1
  misc_feature: MA Experiment 108522 PARAMETER Experiment Name: Zm_42deg_Heat_P Parameter: Tissue Value: Aerial
  misc_feature: MA Experiment ID: 108523 Result: Down-regulated in Transcription
  misc_feature: MA Experiment 108523 PARAMETER Experiment Name: Zm_42deg_Heat_P Parameter: Age (day) Value: 8
  misc_feature: MA Experiment 108523 PARAMETER Experiment Name: Zm_42deg_Heat_P Parameter: Organism Value: Zea mays
  misc_feature: MA Experiment 108523 PARAMETER Experiment Name: Zm_42deg_Heat_P Parameter: Plant Line Value: 35A19
  misc_feature: MA Experiment 108523 PARAMETER Experiment Name: Zm_42deg_Heat_P Parameter: Temperature (deg C) Value: 42 vs. 22
  misc_feature: MA Experiment 108523 PARAMETER Experiment Name: Zm_42deg_Heat_P Parameter: Timepoint (hr) Value: 6
  misc_feature: MA Experiment 108523 PARAMETER Experiment Name: Zm_42deg_Heat_P Parameter: Tissue Value: Aerial
  misc_feature: MA Experiment ID: 108527 Result: Down-regulated in Transcription
  misc_feature: MA Experiment 108527 PARAMETER Experiment Name: Zm_5mM_NO_P Parameter: Age (day) Value: 8
  misc_feature: MA Experiment 108527 PARAMETER Experiment Name: Zm_5mM_NO_P Parameter: Organism Value: Zea mays
  misc_feature: MA Experiment 108527 PARAMETER Experiment Name: Zm_5mM_NO_P Parameter: Plant Line Value: 35A19
  misc_feature: MA Experiment 108527 PARAMETER Experiment Name: Zm_5mM_NO_P Parameter: Timepoint (hr) Value: 6
  misc_feature: MA Experiment 108527 PARAMETER Experiment Name: Zm_5mM_NO_P Parameter: Tissue Value: Aerial
  misc_feature: MA Experiment 108527 PARAMETER Experiment Name: Zm_5mM_NO_P Parameter: Treatment Value: 5mM NO vs. No Treatment
  misc_feature: MA Experiment ID: 108528 Result: Up-regulated in Transcription
  misc_feature: MA Experiment 108528 PARAMETER Experiment Name: Zm_Imbibed_Seeds_P Parameter: Age (day) Value: 5 vs. 2
  misc_feature: MA Experiment 108528 PARAMETER Experiment Name: Zm_Imbibed_Seeds_P Parameter: Organism Value: Zea mays
  misc_feature: MA Experiment 108528 PARAMETER Experiment Name: Zm_Imbibed_Seeds_P Parameter: Plant Line Value: 35A19
  misc_feature: MA Experiment 108528 PARAMETER Experiment Name: Zm_Imbibed_Seeds_P Parameter: Tissue Value: Aerial vs. Embryo
  misc_feature: MA Experiment ID: 108530 Result: Up-regulated in Transcription
  misc_feature: MA Experiment 108530 PARAMETER Experiment Name: Zm_Imbibed_Seeds_P Parameter: Age (day) Value: 6 vs. 2
  misc_feature: MA Experiment 108530 PARAMETER Experiment Name: Zm_Imbibed_Seeds_P Parameter: Organism Value: Zea mays
  misc_feature: MA Experiment 108530 PARAMETER Experiment Name: Zm_Imbibed_Seeds_P Parameter: Plant Line Value: 35A19
  misc_feature: MA Experiment 108530 PARAMETER Experiment Name: Zm_Imbibed_Seeds_P Parameter: Tissue Value: Aerial vs. Embryo
  misc_feature: MA Experiment ID: 108535 Result: Up-regulated in Transcription
  misc_feature: MA Experiment 108535 PARAMETER Experiment Name: Zm_Meristem_P Parameter: Age (day) Value: 8
  misc_feature: MA Experiment 108535 PARAMETER Experiment Name: Zm_Meristem_P Parameter: Organism Value: Zea mays
  misc_feature: MA Experiment 108535 PARAMETER Experiment Name: Zm_Meristem_P Parameter: Plant Line Value: 35A19
  misc_feature: MA Experiment 108535 PARAMETER Experiment Name: Zm_Meristem_P Parameter: Tissue Value: Root Meristem vs. Above Root Meristem
  misc_feature: MA Experiment ID: 108542 Result: Down-regulated in Transcription
  misc_feature: MA Experiment 108542 PARAMETER Experiment Name: Zm_150mM_NaCl_P Parameter: Age (day) Value: 8
  misc_feature: MA Experiment 108542 PARAMETER Experiment Name: Zm_150mM_NaCl_P Parameter: Organism Value: Zea mays
  misc_feature: MA Experiment 108542 PARAMETER Experiment Name: Zm_150mM_NaCl_P Parameter: Plant Line Value: 35A19
  misc_feature: MA Experiment 108542 PARAMETER Experiment Name: Zm_150mM_NaCl_P Parameter: Timepoint (hr) Value: 6
  misc_feature: MA Experiment 108542 PARAMETER Experiment Name: Zm_150mM_NaCl_P Parameter: Tissue Value: Aerial
  misc_feature: MA Experiment 108542 PARAMETER Experiment Name: Zm_150mM_NaCl_P Parameter: Treatment Value: 150mM NaCl vs. No Treatment
  misc_feature: MA Experiment ID: 108543 Result: Down-regulated in Transcription
  misc_feature: MA Experiment ID: 108544 Result: Down-regulated in Transcription
  misc_feature: MA Experiment ID: 108545 Result: Down-regulated in Transcription
  misc_feature: MA Experiment 108545 PARAMETER Experiment Name: Zm_Imbibed_Seeds_P Parameter: Age (day) Value: 3 vs. 2
  misc_feature: MA Experiment 108545 PARAMETER Experiment Name: Zm_Imbibed_Seeds_P Parameter: Organism Value: Zea mays
  misc_feature: MA Experiment 108545 PARAMETER Experiment Name: Zm_Imbibed_Seeds_P Parameter: Plant Line Value: 35A19
  misc_feature: MA Experiment 108545 PARAMETER Experiment Name: Zm_Imbibed_Seeds_P Parameter: Tissue Value: Aerial vs. Embryo
  misc_feature: MA Experiment ID: 108556 Result: Down-regulated in Transcription
  misc_feature: MA Experiment 108556 PARAMETER Experiment Name: Zm_Drought_P Parameter: Age (day) Value: 9
  misc_feature: MA Experiment 108556 PARAMETER Experiment Name: Zm_Drought_P Parameter: Organism Value: Zea mays
  misc_feature: MA Experiment 108556 PARAMETER Experiment Name: Zm_Drought_P Parameter: Plant Line Value: 35A19
  misc_feature: MA Experiment 108556 PARAMETER Experiment Name: Zm_Drought_P Parameter: Timepoint (hr) Value: 24
  misc_feature: MA Experiment 108556 PARAMETER Experiment Name: Zm_Drought_P Parameter: Tissue Value: Aerial
  misc_feature: MA Experiment 108556 PARAMETER Experiment Name: Zm_Drought_P Parameter: Treatment Value: Drought vs. No Drought
  misc_feature: MA Experiment ID: 108559 Result: Down-regulated in Transcription
  misc_feature: MA Experiment 108559 PARAMETER Experiment Name: Zm_5mM_NO_P Parameter: Age (day) Value: 8
  misc_feature: MA Experiment 108559 PARAMETER Experiment Name: Zm_5mM_NO_P Parameter: Organism Value: Zea mays
  misc_feature: MA Experiment 108559 PARAMETER Experiment Name: Zm_5mM_NO_P Parameter: Plant Line Value: 35A19
  misc_feature: MA Experiment 108559 PARAMETER Experiment Name: Zm_5mM_NO_P Parameter: Timepoint (hr) Value: 12
  misc_feature: MA Experiment 108559 PARAMETER Experiment Name: Zm_5mM_NO_P Parameter: Tissue Value: Aerial
  misc_feature: MA Experiment 108559 PARAMETER Experiment Name: Zm_5mM_NO_P Parameter: Treatment Value: 5mM NO vs. No Treatment
  misc_feature: MA Experiment ID: 108597 Result: Down-regulated in Transcription
  misc_feature: MA Experiment 108597 PARAMETER Experiment Name: Zm_100uM_ABA_P Parameter: Age (day) Value: 9
  misc_feature: MA Experiment 108597 PARAMETER Experiment Name: Zm_100uM_ABA_P Parameter: Organism Value: Zea mays
  misc_feature: MA Experiment 108597 PARAMETER Experiment Name: Zm_100uM_ABA_P Parameter: Plant Line Value: 35A19
  misc_feature: MA Experiment 108597 PARAMETER Experiment Name: Zm_100uM_ABA_P Parameter: Timepoint (hr) Value: 24
  misc_feature: MA Experiment 108597 PARAMETER Experiment Name: Zm_100uM_ABA_P Parameter: Tissue Value: Aerial
  misc_feature: MA Experiment 108597 PARAMETER Experiment Name: Zm_100uM_ABA_P Parameter: Treatment Value: 100uM ABA vs. No Treatment
  misc_feature: MA Experiment ID: 108687 Result: Down-regulated in Transcription
  misc_feature: MA Experiment 108687 PARAMETER Experiment Name: Zm_Embryos-Flowers__P Parameter: Tissue Value: Embryo vs. Aerial+
  misc_feature: MA Experiment ID: 20000477 Result: Down-regulated in Transcription
  misc_feature: MA Experiment 20000477 PARAMETER Experiment Name: Zm_5mM_SA_P Parameter: Age (day) Value: 10
  misc_feature: MA Experiment 20000477 PARAMETER Experiment Name: Zm_5mM_SA_P Parameter: Organism Value: Zea mays
  misc_feature: MA Experiment 20000477 PARAMETER Experiment Name: Zm_5mM_SA_P Parameter: Plant Line Value: 35A19
  misc_feature: MA Experiment 20000477 PARAMETER Experiment Name: Zm_5mM_SA_P Parameter: Timepoint (hr) Value: 48
  misc_feature: MA Experiment 20000477 PARAMETER Experiment Name: Zm_5mM_SA_P Parameter: Tissue Value: Aerial
  misc_feature: MA Experiment 20000477 PARAMETER Experiment Name: Zm_5mM_SA_P Parameter: Treatment Value: 5mM SA vs. No Treatment
  misc_feature: MA Experiment ID: 20000478 Result: Down-regulated in Transcription
  misc_feature: MA Experiment 20000478 PARAMETER Experiment Name: Zm_5mM_SA_P Parameter: Age (day) Value: 11
  misc_feature: MA Experiment 20000478 PARAMETER Experiment Name: Zm_5mM_SA_P Parameter: Organism Value: Zea mays
  misc_feature: MA Experiment 20000478 PARAMETER Experiment Name: Zm_5mM_SA_P Parameter: Plant Line Value: 35A19
  misc_feature: MA Experiment 20000478 PARAMETER Experiment Name: Zm_5mM_SA_P Parameter: Timepoint (hr) Value: 72
  misc_feature: MA Experiment 20000478 PARAMETER Experiment Name: Zm_5mM_SA_P Parameter: Tissue Value: Aerial
  misc_feature: MA Experiment 20000478 PARAMETER Experiment Name: Zm_5mM_SA_P Parameter: Treatment Value: 5mM SA vs. No Treatment
  misc_feature: MA Experiment ID: 20000479 Result: Down-regulated in Transcription
  misc_feature: MA Experiment 20000479 PARAMETER Experiment Name: Zm_Drought_P Parameter: Age (day) Value: 10
  misc_feature: MA Experiment 20000479 PARAMETER Experiment Name: Zm_Drought_P Parameter: Organism Value: Zea mays
  misc_feature: MA Experiment 20000479 PARAMETER Experiment Name: Zm_Drought_P Parameter: Plant Line Value: 35A19
  misc_feature: MA Experiment 20000479 PARAMETER Experiment Name: Zm_Drought_P Parameter: Timepoint (hr) Value: 48
  misc_feature: MA Experiment 20000479 PARAMETER Experiment Name: Zm_Drought_P Parameter: Tissue Value: Aerial
  misc_feature: MA Experiment 20000479 PARAMETER Experiment Name: Zm_Drought_P Parameter: Treatment Value: Drought vs. No Drought
  misc_feature: MA Experiment ID: 20000480 Result: Down-regulated in Transcription
  misc_feature: MA Experiment 20000480 PARAMETER Experiment Name: Zm_Drought_P Parameter: Age (day) Value: 11
  misc_feature: MA Experiment 20000480 PARAMETER Experiment Name: Zm_Drought_P Parameter: Organism Value: Zea mays
  misc_feature: MA Experiment 20000480 PARAMETER Experiment Name: Zm_Drought_P Parameter: Plant Line Value: 35A19
  misc_feature: MA Experiment 20000480 PARAMETER Experiment Name: Zm_Drought_P Parameter: Timepoint (hr) Value: 72
  misc_feature: MA Experiment 20000480 PARAMETER Experiment Name: Zm_Drought_P Parameter: Tissue Value: Aerial
  misc_feature: MA Experiment 20000480 PARAMETER Experiment Name: Zm_Drought_P Parameter: Treatment Value: Drought vs. No Drought
  misc_feature: MA Experiment ID: 20000488 Result: Up-regulated in Transcription
  misc_feature: MA Experiment 20000488 PARAMETER Experiment Name: Zm_50mM_NH4NO3_L_to_H_P Parameter: Organism Value: Zea mays
  misc_feature: MA Experiment 20000488 PARAMETER Experiment Name: Zm_50mM_NH4NO3_L_to_H_P Parameter: Timepoint (hr) Value: 8
  misc_feature: MA Experiment 20000488 PARAMETER Experiment Name: Zm_50mM_NH4NO3_L_to_H_P Parameter: Tissue Value: Leaves
  misc_feature: MA Experiment 20000488 PARAMETER Experiment Name: Zm_50mM_NH4NO3_L_to_H_P Parameter: Treatment Value: 50mM NH4NO3 vs. 100mM Mannitol
  misc_feature: MA Experiment ID: 20000535 Result: Down-regulated in Transcription
  misc_feature: MA Experiment 20000535 PARAMETER Experiment Name: Zm_Hybrid_Seed_Dev_P Parameter: DAP Value: 30 vs. 12
  misc_feature: MA Experiment 20000535 PARAMETER Experiment Name: Zm_Hybrid_Seed_Dev_P Parameter: Organism Value: Zea mays
  misc_feature: MA Experiment 20000535 PARAMETER Experiment Name: Zm_Hybrid_Seed_Dev_P Parameter: Plant Line Value: 35A19
  misc_feature: MA Experiment 20000535 PARAMETER Experiment Name: Zm_Hybrid_Seed_Dev_P Parameter: Tissue Value: Embryo vs. Unfert Floret
  misc_feature: MA Experiment ID: 20000627 Result: Down-regulated in Transcription
  misc_feature: MA Experiment 20000627 PARAMETER Experiment Name: Zm_Herbicide-Treatments_P Parameter: Timepoint (hr) Value: 12
  misc_feature: MA Experiment 20000627 PARAMETER Experiment Name: Zm_Herbicide-Treatments_P Parameter: Tissue Value: Aerial
  misc_feature: MA Experiment 20000627 PARAMETER Experiment Name: Zm_Herbicide-Treatments_P Parameter: Treatment Value: Finale vs. No Treatment
  misc_feature: MA Experiment ID: 20001606 Result: Up-regulated in Transcription
  misc_feature: MA Experiment 20001606 PARAMETER Experiment Name: Zm_50ppm_KNO3_L-to-H_P Parameter: Age (day) Value: 19
  misc_feature: MA Experiment 20001606 PARAMETER Experiment Name: Zm_50ppm_KNO3_L-to-H_P Parameter: Organism Value: Zea mays
  misc_feature: MA Experiment 20001606 PARAMETER Experiment Name: Zm_50ppm_KNO3_L-to-H_P Parameter: Plant Line Value: 35A19
  misc_feature: MA Experiment 20001606 PARAMETER Experiment Name: Zm_50ppm_KNO3_L-to-H_P Parameter: Timepoint (hr) Value: 8
  misc_feature: MA Experiment 20001606 PARAMETER Experiment Name: Zm_50ppm_KNO3_L-to-H_P Parameter: Tissue Value: Shoots
  misc_feature: MA Experiment 20001606 PARAMETER Experiment Name: Zm_50ppm_KNO3_L-to-H_P Parameter: Treatment Value: 50ppm KNO3 vs. 50ppm KCl
  misc_feature: MA Experiment ID: 20001614 Result: Up-regulated in Transcription
  misc_feature: MA Experiment 20001614 PARAMETER Experiment Name: Zm_50ppm_KNO3_L-to-H_P Parameter: Age (day) Value: 21
  misc_feature: MA Experiment 20001614 PARAMETER Experiment Name: Zm_50ppm_KNO3_L-to-H_P Parameter: Organism Value: Zea mays
  misc_feature: MA Experiment 20001614 PARAMETER Experiment Name: Zm_50ppm_KNO3_L-to-H_P Parameter: Plant Line Value: 35A19
  misc_feature: MA Experiment 20001614 PARAMETER Experiment Name: Zm_50ppm_KNO3_L-to-H_P Parameter: Timepoint (hr) Value: 48
  misc_feature: MA Experiment 20001614 PARAMETER Experiment Name: Zm_50ppm_KNO3_L-to-H_P Parameter: Tissue Value: Roots
  misc_feature: MA Experiment 20001614 PARAMETER Experiment Name: Zm_50ppm_KNO3_L-to-H_P Parameter: Treatment Value: 50ppm KNO3 vs. 50ppm KCl
ctcacaccatcggaacacatagcagctggcaggaacgactgccaagcaagtccatcggtcgaggtcctagctagcgcaacgacgatggccaccgcgctctcctgcaaggccctcgcagtggccgcgctcctgtccgtggtgtccgtcgtcacctacggcgctcgcgcccagcagcagcccagccacaacgcctccgactccgagtcgtcgcaggacaggtccttgctgtcctacagcagtggctggctgcccgccaaggccacctggtacggcgcgcccaccggcgccggccccgacgacaacggtggtgcgtgcgggttcaagggcaccaaccagtacccgttctcgtccatgacgtcctgtggcaacgagcccatcttcaaggacggcaagggctgcggctcatgctatcagatacgggtgcctccggagcaaccacccggcctgctccggcgtgccgcagacggtgatcataaccgacatgaactactacccggtggccaagtaccacttcgacctgagcggcacggcgttcggcgccatggcgagttccggcctgaacgacaggctccggcacgccgggatcatcgacatgcagttccggagggtgccgtgcgacttcccgggcctgaccgtcaccttccgcgtgcagcacggctccaaccccatgtacctggccgtgctcatcgagcacgccaacatggacggcgacgtggtgcaggccgacatcatgcagaacaactccgggtactgggagcccttgcacgagtcctggggcgccgtctggcggatcgaccccagccgcccgctctgcggccccttctcggtgcgcatcaccaacgagtccggcaagcagctggtggcccagaacgtcatcccggccaactacatcgccgacgtcgactaccgctccttcgtccagtatacgaattaacccgaccggccgggcggggcgcccactgcatgagctagctcgatcggtcacctctgcgaccgtcgtacgtccgagatagctcgttgcttaagtgttcgtgtttagtggctgccgtcggcaaccgccggactgaggatttttaaacctcaattccggcgtggggtgtgtgttggtgtgtgtcttgaanatgtgtgggaaattagaggaggcgagcatcaatgcgctctcccgcccacggtcactctatcattaccggtgtgcggtgtgtaaccagcagaccatggatattggttaatactacatcagtgtgatgttgttt

SEQ ID NO: 16044 - protein, 323 aa, Zea mays subsp. mays
  peptide (1)..(323): Ceres Seq. ID no. 12358735
  misc_feature (39)..(140): Homolog of NCBI NO: 14193775 NR Description: beta-expansin 8 [Zea mays]
  misc_feature (78)..(140): Homolog of NCBI NO: 7489455 NR Description: beta-expansin - rice
  misc_feature (78)..(140): Homolog of NCBI NO: 37536758 NR Description: beta-expansin EXPB2 [Oryza sativa (japonica
  misc_feature (77)..(159): Homolog of NCBI NO: 4099919 NR Description: pollen allergen homolog [Triticum aestivum]
  misc_feature (29)..(140): Homolog of NCBI NO: 14193773 NR Description: beta-expansin 7 [Zea mays]
  misc_feature (31)..(140): Homolog of NCBI NO: 14330330 NR Description: beta expansin B3 [Festuca pratensis]
  misc_feature (29)..(140): Homolog of NCBI NO: 14330328 NR Description: beta expansin B2 [Festuca pratensis]
  misc_feature (29)..(140): Homolog of NCBI NO: 37536756 NR Description: beta-expansin EXPB6 [Oryza sativa (japonica
  misc_feature (29)..(140): Homolog of NCBI NO: 37536760 NR Description: beta-expansin EXPB3 [Oryza sativa (japonica
  misc_feature (29)..(140): Homolog of NCBI NO: 14193771 NR Description: beta-expansin 6 [Zea mays]
LTPSEHIAAGRNDCQASPSVEVLASATTMATALSCKALAVAALLSVVSVVTYGARAQQQPSHNASDSESSQDRSLLSYSSGWLPAKATWYGAPTGAGPDDNGGACGFKGTNQYPFSSMTSCGNEPIFKDGKGCGSCYQIRVPPEQPPGLLRRAADGDHNRHELLPGGQVPLRPERHGVRRHGEFRPERQAPARRDHRHAVPEGAVRLPGPDRHLPRAARLQPHVPGRAHRARQHGRRRGAGRHHAEQLRVLGALARVLGRRLADRPQPPALRPLLGAHHQRVRQAAGGPERHPGQLHRRRRLPLLRPVYELTRPAGRGAHCMS

SEQ ID NO: 16045 - protein, 295 aa, Zea mays subsp. mays
  peptide (1)..(295): Ceres Seq. ID no. 12358736
  misc_feature (11)..(112): Homolog of NCBI NO: 14193775 NR Description: beta-expansin 8 [Zea mays]
  misc_feature (50)..(112): Homolog of NCBI NO: 7489455 NR Description: beta-expansin - rice
  misc_feature (50)..(112): Homolog of NCBI NO: 37536758 NR Description: beta-expansin EXPB2 [Oryza sativa (japonica
  misc_feature (49)..(131): Homolog of NCBI NO: 4099919 NR Description: pollen allergen homolog [Triticum aestivum]
  misc_feature (1)..(112): Homolog of NCBI NO: 14193773 NR Description: beta-expansin 7 [Zea mays]
  misc_feature (3)..(112): Homolog of NCBI NO: 14330330 NR Description: beta expansin B3 [Festuca pratensis]
  misc_feature (1)..(112): Homolog of NCBI NO: 14330328 NR Description: beta expansin B2 [Festuca pratensis]
  misc_feature (1)..(112): Homolog of NCBI NO: 37536756 NR Description: beta-expansin EXPB6 [Oryza sativa (japonica
  misc_feature (1)..(112): Homolog of NCBI NO: 37536760 NR Description: beta-expansin EXPB3 [Oryza sativa (japonica
  misc_feature (1)..(112): Homolog of NCBI NO: 14193771 NR Description: beta-expansin 6 [Zea mays]
MATALSCKALAVAALLSVVSVVTYGARAQQQPSHNASDSESSQDRSLLSYSSGWLPAKATWYGAPTGAGPDDNGGACGFKGTNQYPFSSMTSCGNEPIFKDGKGCGSCYQIRVPPEQPPGLLRRAADGDHNRHELLPGGQVPLRPERHGVRRHGEFRPERQAPARRDHRHAVPEGAVRLPGPDRHLPRAARLQPHVPGRAHRARQHGRRRGAGRHHAEQLRVLGALARVLGRRLADRPQPPALRPLLGAHHQRVRQAAGGPERHPGQLHRRRRLPLLRPVYELTRPAGRGAHCMS

SEQ ID NO: 16046 - protein, 206 aa, Zea mays subsp. mays
  peptide (1)..(206): Ceres Seq. ID no. 12358737
  misc_feature (1)..(23): Homolog of NCBI NO: 14193775 NR Description: beta-expansin 8 [Zea mays]
  misc_feature (1)..(23): Homolog of NCBI NO: 7489455 NR Description: beta-expansin - rice
  misc_feature (1)..(23): Homolog of NCBI NO: 37536758 NR Description: beta-expansin EXPB2 [Oryza sativa (japonica
  misc_feature (1)..(42): Homolog of NCBI NO: 4099919 NR Description: pollen allergen homolog [Triticum aestivum]
  misc_feature (1)..(23): Homolog of NCBI NO: 14193773 NR Description: beta-expansin 7 [Zea mays]
  misc_feature (1)..(23): Homolog of NCBI NO: 14330330 NR Description: beta expansin B3 [Festuca pratensis]
  misc_feature (1)..(23): Homolog of NCBI NO: 14330328 NR Description: beta expansin B2 [Festuca pratensis]
  misc_feature (1)..(23): Homolog of NCBI NO: 37536756 NR Description: beta-expansin EXPB6 [Oryza sativa (japonica
  misc_feature (1)..(23): Homolog of NCBI NO: 37536760 NR Description: beta-expansin EXPB3 [Oryza sativa (japonica
  misc_feature (1)..(23): Homolog of NCBI NO: 14193771 NR Description: beta-expansin 6 [Zea mays]
MTSCGNEPIFKDGKGCGSCYQIRVPPEQPPGLLRRAADGDHNRHELLPGGQVPLRPERHGVRRHGEFRPERQAPARRDHRHAVPEGAVRLPGPDRHLPRAARLQPHVPGRAHRARQHGRRRGAGRHHAEQLRVLGALARVLGRRLADRPQPPALRPLLGAHHQRVRQAAGGPERHPGQLHRRRRLPLLRPVYELTRPAGRGAHCMS

SEQ ID NO: 16047 - DNA, 1180 bp, Zea mays subsp. mays
  misc_feature (1)..(1180): Ceres Seq. ID no. 12366064
  misc_feature: MA Experiment ID: 108527 Result: Up-regulated in Transcription
  misc_feature: MA Experiment 108527 PARAMETER Experiment Name: Zm_5mM_NO_P Parameter: Age (day) Value: 8
  misc_feature: MA Experiment 108527 PARAMETER Experiment Name: Zm_5mM_NO_P Parameter: Organism Value: Zea mays
  misc_feature: MA Experiment 108527 PARAMETER Experiment Name: Zm_5mM_NO_P Parameter: Plant Line Value: 35A19
  misc_feature: MA Experiment 108527 PARAMETER Experiment Name: Zm_5mM_NO_P Parameter: Timepoint (hr) Value: 6
  misc_feature: MA Experiment 108527 PARAMETER Experiment Name: Zm_5mM_NO_P Parameter: Tissue Value: Aerial
  misc_feature: MA Experiment 108527 PARAMETER Experiment Name: Zm_5mM_NO_P Parameter: Treatment Value: 5mM NO vs. No Treatment
  misc_feature: MA Experiment ID: 108535 Result: Down-regulated in Transcription
  misc_feature: MA Experiment 108535 PARAMETER Experiment Name: Zm_Meristem_P Parameter: Age (day) Value: 8
  misc_feature: MA Experiment 108535 PARAMETER Experiment Name: Zm_Meristem_P Parameter: Organism Value: Zea mays
  misc_feature: MA Experiment 108535 PARAMETER Experiment Name: Zm_Meristem_P Parameter: Plant Line Value: 35A19
  misc_feature: MA Experiment 108535 PARAMETER Experiment Name: Zm_Meristem_P Parameter: Tissue Value: Root Meristem vs. Above Root Meristem
  misc_feature: MA Experiment ID: 20000108 Result: Down-regulated in Transcription
  misc_feature: MA Experiment 20000108 PARAMETER Experiment Name: Zm_Root-Tips_P Parameter: Age (day) Value: 12
  misc_feature: MA Experiment 20000108 PARAMETER Experiment Name: Zm_Root-Tips_P Parameter: Organism Value: Zea mays
  misc_feature: MA Experiment 20000108 PARAMETER Experiment Name: Zm_Root-Tips_P Parameter: Tissue Value: Root tips vs. Root mid region    35
  misc_feature: MA Experiment 20000108 PARAMETER Experiment Name: Zm_Root-Tips_P Parameter: Tissue Value: Root tips vs. Root mid region   Sequence Listing-Misc Features (4)
  misc_feature: MA Experiment ID: 20000535 Result: Up-regulated in Transcription
  misc_feature: MA Experiment 20000535 PARAMETER Experiment Name: Zm_Hybrid_Seed_Dev_P Parameter: DAP Value: 30 vs. 12
  misc_feature: MA Experiment 20000535 PARAMETER Experiment Name: Zm_Hybrid_Seed_Dev_P Parameter: Organism Value: Zea mays
  misc_feature: MA Experiment 20000535 PARAMETER Experiment Name: Zm_Hybrid_Seed_Dev_P Parameter: Plant Line Value: 35A19
  misc_feature: MA Experiment 20000535 PARAMETER Experiment Name: Zm_Hybrid_Seed_Dev_P Parameter: Tissue Value: Embryo vs. Unfert Floret
  misc_feature: MA Experiment ID: 20000629 Result: Up-regulated in Transcription
  misc_feature: MA Experiment 20000629 PARAMETER Experiment Name: Zm_Herbicide-Treatments_P Parameter: Timepoint (hr) Value: 12
  misc_feature: MA Experiment 20000629 PARAMETER Experiment Name: Zm_Herbicide-Treatments_P Parameter: Tissue Value: Aerial
  misc_feature: MA Experiment 20000629 PARAMETER Experiment Name: Zm_Herbicide-Treatments_P Parameter: Treatment Value: Trimec vs. No Treatment
cccctctgccttttccttttccttccccgctttctccttccttcctccccactccccgctcccctcgcccagccactggccatgtcggtggagacggagcggagctccaccgagtcctccggggcttccgggctcgacttcgaggacaccgcgctcacgctcaccctccgcctcccgggctccgcgccttccgccgccgccgccgccgcggcctccctgtccctctcctcctcgtcgtcctccgccttccccgaccccgaccgcaagcgcgcgtcctccgacgccgaccccggccgctcctccccgctcgccgcgtcctccgacgctgcaccggcacccaaggctcgtgtggtgggctggccgccggtgaggtcgtaccgcaagaacgcgctcgccgacgccgcgggctccagcaaggccgccaagttcgtcaaggtggccgtcgacggcgcgccctacctgcggaaggtggacctgcaggcgtacgccggctacgaccagctgctccgcgcgctccaggacaagttcttctcccacttcaccatcaggaagttcgccgacgacgagaggaagctggtggacgcggtgaacgggacggagtacgtgcccacgtacgaggacaaggatggcgactggatcctcgtcggcgacgtcccctggaagatgttcgtggaaacctgccagcgccttcgtctgatgaaaggttcagaggccgtgaacttggcaccgagagccgcccgatgaggcacactagctccgttgggcgttggcacgcacgcacgcactggcgtcttgaaggaaagcgggaactctgctggtcttgatgaggatcttcacgtgagataggaacgtgtgtacagttgtcgccttatggtattgagttgaggaaacttggaagttccattacttgtctgtagtctctactttatatagatgcgaagaagcttgagatacacattgcctacaatgtctttttgatgaataagaccagacagcaccgaaccgaactcgtccttccacatctccacacggttgctttgccatctcggtggttttgtggtggtggtggtggtggtggtcgtgcttcctataggtgtgaggctgatggcgtggctgccatttatacaatctttaatcctgttttgttgagctttattatatggttttgttttgagagtcc

SEQ ID NO: 16048 - protein, 273 aa, Zea mays subsp. mays
  peptide (1)..(273): Ceres Seq. ID no. 12366065
PLPFPFPSPLSPSFLPTPRSPRPATGHVGGDGAELHRVLRGFRARLRGHRAHAHPPPPGLRAFRRRRRRGLPVPLLLVVLRLPRPRPQARVLRRRPRPLLPARRVLRRCTGTQGSCGGLAAGEVVPQERARRRRGLQQGRQVRQGGRRRRALPAEGGPAGVRRLRPAAPRAPGQVLLPLHHQEVRRRREEAGGRGERDGVRAHVRGQGWRLDPRRRRPLEDVRGNLPAPSSDERFRGRELGTESRPMRHTSSVGRWHARTHWRLEGKRELCWS

SEQ ID NO: 16049 - protein, 247 aa, Zea mays subsp. mays
  peptide (1)..(247): Ceres Seq. ID no. 12366066
  misc_feature (70)..(221): Pfam Name: AUX/IAA family Pfam Description: AUX/IAA family
  misc_feature (9)..(245): Homolog of NCBI NO: 29465672 NR Description: Aux/IAA protein [Vitis vinifera]
  misc_feature (51)..(246): Homolog of NCBI NO: 22531416 NR Description: IAA16 protein [Gossypium hirsutum]
  misc_feature (85)..(245): Homolog of NCBI NO: 2921758 NR Description: IAA17/AXR3-1 protein [Arabidopsis thaliana]
  misc_feature (87)..(245): Homolog of NCBI NO: 20269051 NR Description: aux/IAA protein [Populus tremula x Populus
  misc_feature (103)..(245): Homolog of NCBI NO: 4887020 NR Description: Nt-iaa28 deduced protein [Nicotiana tabacum]
  misc_feature (85)..(245): Homolog of NCBI NO: 21592887 NR Description: putative auxin-induced protein, IAA17/AXR3-1
  misc_feature (85)..(245): Homolog of NCBI NO: 15219694 NR Description: putative auxin-induced protein, IAA17/AXR3-1
  misc_feature (19)..(245): Homolog of NCBI NO: 17976835 NR Description: putative auxin induced transcription factor
  misc_feature (77)..(245): Homolog of NCBI NO: 4887022 NR Description: Nt-iaa4.1 deduced protein [Nicotiana tabacum]
  misc_feature (70)..(221): Homolog of NCBI NO: 34906138 NR Description: P0509B06.6 [Oryza sativa (japonica
PLCLFLFLPRFLLPSSPLPAPLAQPLAMSVETERSSTESSGASGLDFEDTALTLTLRLPGSAPSAAAAAAASLSLSSSSSSAFPDPDRKRASSDADPGRSSPLAASSDAAPAPKARVVGWPPVRSYRKNALADAAGSSKAAKFVKVAVDGAPYLRKVDLQAYAGYDQLLRALQDKFFSHFTIRKFADDERKLVDAVNGTEYVPTYEDKDGDWILVGDVPWKMFVETCQRLRLMKGSEAVNLAPRAAR

SEQ ID NO: 16050 - protein, 220 aa, Zea mays subsp. mays
  peptide (1)..(220): Ceres Seq. ID no. 12366067
  misc_feature (43)..(194): Pfam Name: AUX/IAA family Pfam Description: AUX/IAA family
  misc_feature (1)..(218): Homolog of NCBI NO: 29465672 NR Description: Aux/IAA protein [Vitis vinifera]
  misc_feature (24)..(219): Homolog of NCBI NO: 22531416 NR Description: IAA16 protein [Gossypium hirsutum]
  misc_feature (58)..(218): Homolog of NCBI NO: 2921758 NR Description: IAA17/AXR3-1 protein [Arabidopsis thaliana]
  misc_feature (60)..(218): Homolog of NCBI NO: 20269051 NR Description: aux/IAA protein [Populus tremula x Populus
  misc_feature (76)..(218): Homolog of NCBI NO: 4887020 NR Description: Nt-iaa28 deduced protein [Nicotiana tabacum]
  misc_feature (58)..(218): Homolog of NCBI NO: 21592887 NR Description: putative auxin-induced protein, IAA17/AXR3-1
  misc_feature (58)..(218): Homolog of NCBI NO: 15219694 NR Description: putative auxin-induced protein, IAA17/AXR3-1
  misc_feature (1)..(218): Homolog of NCBI NO: 17976835 NR Description: putative auxin induced transcription factor
  misc_feature (50)..(218): Homolog of NCBI NO: 4887022 NR Description: Nt-iaa4.1 deduced protein [Nicotiana tabacum]
  misc_feature (43)..(194): Homolog of NCBI NO: 34906138 NR Description: P0509B06.6 [Oryza sativa (japonica
MSVETERSSTESSGASGLDFEDTALTLTLRLPGSAPSAAAAAAASLSLSSSSSSAFPDPDRKRASSDADPGRSSPLAASSDAAPAPKARVVGWPPVRSYRKNALADAAGSSKAAKFVKVAVDGAPYLRKVDLQAYAGYDQLLRALQDKFFSHFTIRKFADDERKLVDAVNGTEYVPTYEDKDGDWILVGDVPWKMFVETCQRLRLMKGSEAVNLAPRAAR

SEQ ID NO: 16051 - DNA, 1658 bp, Zea mays subsp. mays
  misc_feature (1)..(1658): Ceres Seq. ID no. 12357029
  misc_feature: MA Experiment ID: 108544 Result: Down-regulated in Transcription
aattttggcgtgctttacttccgcttccaatataccttttttctgcgacaaaaatcatttttgttaattgcgaaaaggaaagagcccgtgtgaacaggaggggtgaggagaagagggggaaaagagagagaaatcggagggcattagcaagaaaccatgagttctaggttcgcaatccctagtcgtcttgtcctgatcttacttgagtgctcgtgagctctttccagtggctaaagactgcagatttgagttctggcccaagaaccgcgtgctagcccgccatggaggtgaggtccgagcaagggctgatggcggggagggatctattcggcatgccgaagagcccgccggcgcccgcgcccgccgtcgtccgccgccatgcagagcgtgcgcatggcgtacaccgcggacggcaccgccgtgttcgctccggtgagctcttcgcctgcgacgccgtcttaccagccgcagggcgcagcccacggcgctagcatgtccgcggcgacggtcgttggaggcaatggcgctccagctgcgccgagcatgggtgagccgctggccaagaagaagcgcggacgaccaaggaagtacgggcccgacgggtccatggcgctggcaatggtgcctgcttcggcggcttcagggtcgccggcgacagggcagggtttttctgggccgttctcaccgcctgcgttaaatccggcgagctctctggtggtggcgtcgccagacggattcaagaagcggggccggcctaagggttctaccaacaggccacgcgtggacgctgctgggtcatcaggagctggatttacacctcatgttatcacagttcaagctggggaggacgtggcatcaaagattatgtcattttcccagcatggaacacacggagtttgtgttctttcaggcaaatggctccatatcaaatgtaacgcttcgtcagactgctacatcaggcagaactgtaacatacgagggtcaattcgagatactgtcgctgtcggggtcattcttcctggctgaggatggtgtccagcgcagccgaaacggaggcctcagcgtgtcgctggctggtcctgatggccgtctgttgggtggtggggtcgcaggacttctagtagcggcttcaccggttcagatagtactgggaagcttcaattctggaggcggaaaggagccacaaaagcaggctccttcagaacctacatcggctccaccgagggttgctccgacagctgggatgggaggacccagcagcccttcttcaagaggcacattgagcgagtcatccggtggcgctggaagcccaccgccactgcatcgagccatggctgctagtgctagcaatagtaaccagccaccgttcttgtccagcatgccttggagatgagtttgcagcttgcattctcttggccaattccaggcaggatgtagcaatctgcgctttcagtagcgcccgttgtgtgagtagctgtgtgcagtacaagccagaagcttgggtgggaatataattgcgtctggtaaatctgtagctctgttgtaggttccaccctgaattcctgtgctaggtgtgttgagctgtgtaagcaatgtaatcctttcagcgttatcaaatgctatttagttaaatgtttctaccaaggcatgtcgatttg

SEQ ID NO: 16052 - protein, 215 aa, Zea mays subsp. mays
  peptide (1)..(215): Ceres Seq. ID no. 12357030
  misc_feature (11)..(94): Homolog of NCBI NO: 14326504 NR Description: At2g33620/F4P9.39 [Arabidopsis thaliana]
  misc_feature (11)..(94): Homolog of NCBI NO: 18403332 NR Description: AT-hook DNA-binding protein (AHP1)
  misc_feature (11)..(94): Homolog of NCBI NO: 2598227 NR Description: AT-hook protein 1 [Arabidopsis thaliana]
  misc_feature (72)..(203): Homolog of NCBI NO: 14326504 NR Description: At2g33620/F4P9.39 [Arabidopsis thaliana]
  misc_feature (72)..(203): Homolog of NCBI NO: 25408293 NR Description: AT-hook DNA-binding protein (AHP1)
  misc_feature (72)..(203): Homolog of NCBI NO: 18403332 NR Description: AT-hook DNA-binding protein (AHP1)
  misc_feature (1)..(177): Homolog of NCBI NO: 32352210 NR Description: hypothetical protein [Oryza sativa (japonica
  misc_feature (72)..(203): Homolog of NCBI NO: 2598227 NR Description: AT-hook protein 1 [Arabidopsis thaliana]
  misc_feature (1)..(177): Homolog of NCBI NO: 38346715 NR Description: OSJNBa0086O06.13 [Oryza sativa (japonica
  misc_feature (1)..(177): Homolog of NCBI NO: 37537056 NR Description: putative AT-Hook DNA-binding protein
MQSVRMAYTADGTAVFAPVSSSPATPSYQPQGAAHGASMSAATVVGGNGAPAAPSMGEPLAKKKRGRPRKYGPDGSMALAMVPASAASGSPATGQGFSGPFSPPALNPASSLVVASPDGFKKRGRPKGSTNRPRVDAAGSSGAGFTPHVITVQAGEDVASKIMSFSQHGTHGVCVLSGKWLHIKCNASSDCYIRQNCNIRGSIRDTVAVGVILPG

SEQ ID NO: 16053 - protein, 210 aa, Zea mays subsp. mays
  peptide (1)..(210): Ceres Seq. ID no. 12357031
  misc_feature (6)..(89): Homolog of NCBI NO: 14326504 NR Description: At2g33620/F4P9.39 [Arabidopsis thaliana]
  misc_feature (6)..(89): Homolog of NCBI NO: 18403332 NR Description: AT-hook DNA-binding protein (AHP1)
  misc_feature (6)..(89): Homolog of NCBI NO: 2598227 NR Description: AT-hook protein 1 [Arabidopsis thaliana]
  misc_feature (67)..(198): Homolog of NCBI NO: 14326504 NR Description: At2g33620/F4P9.39 [Arabidopsis thaliana]
  misc_feature (67)..(198): Homolog of NCBI NO: 25408293 NR Description: AT-hook DNA-binding protein (AHP1)
  misc_feature (67)..(198): Homolog of NCBI NO: 18403332 NR Description: AT-hook DNA-binding protein (AHP1)
  misc_feature (1)..(172): Homolog of NCBI NO: 32352210 NR Description: hypothetical protein [Oryza sativa (japonica
  misc_feature (67)..(198): Homolog of NCBI NO: 2598227 NR Description: AT-hook protein 1 [Arabidopsis thaliana]
  misc_feature (1)..(172): Homolog of NCBI NO: 38346715 NR Description: OSJNBa0086O06.13 [Oryza sativa (japonica
  misc_feature (1)..(172): Homolog of NCBI NO: 37537056 NR Description: putative AT-Hook DNA-binding protein
MAYTADGTAVFAPVSSSPATPSYQPQGAAHGASMSAATVVGGNGAPAAPSMGEPLAKKKRGRPRKYGPDGSMALAMVPASAASGSPATGQGFSGPFSPPALNPASSLVVASPDGFKKRGRPKGSTNRPRVDAAGSSGAGFTPHVITVQAGEDVASKIMSFSQHGTHGVCVLSGKWLHIKCNASSDCYIRQNCNIRGSIRDTVAVGVILPG

SEQ ID NO: 16054 - protein, 190 aa, Zea mays subsp. mays
  peptide (1)..(190): Ceres Seq. ID no. 12357032
  misc_feature (9)..(158): Homolog of NCBI NO: 7485570 NR Description: hypothetical protein F16J13.150 - Arabidopsis
  misc_feature (31)..(181): Homolog of NCBI NO: 15242131 NR Description: putative protein; protein id: At5g51590.1
  misc_feature (31)..(158): Homolog of NCBI NO: 22328578 NR Description: putative DNA-binding protein
  misc_feature (31)..(190): Homolog of NCBI NO: 14326504 NR Description: At2g33620/F4P9.39 [Arabidopsis thaliana]
  misc_feature (31)..(190): Homolog of NCBI NO: 25408293 NR Description: AT-hook DNA-binding protein (AHP1)
  misc_feature (31)..(190): Homolog of NCBI NO: 18403332 NR Description: AT-hook DNA-binding protein (AHP1)
  misc_feature (31)..(164): Homolog of NCBI NO: 32352210 NR Description: hypothetical protein [Oryza sativa (japonica
  misc_feature (31)..(190): Homolog of NCBI NO: 2598227 NR Description: AT-hook protein 1 [Arabidopsis thaliana]
  misc_feature (31)..(188): Homolog of NCBI NO: 38346715 NR Description: OSJNBa0086O06.13 [Oryza sativa (japonica
  misc_feature (6)..(180): Homolog of NCBI NO: 37537056 NR Description: putative AT-Hook DNA-binding protein
MLSQFKLGRTWHQRLCHFPSMEHTEFVFFQANGSISNVTLRQTATSGRTVTYEGQFEILSLSGSFFLAEDGVQRSRNGGLSVSLAGPDGRLLGGGVAGLLVAASPVQIVLGSFNSGGGKEPQKQAPSEPTSAPPRVAPTAGMGGPSSPSSRGTLSESSGGAGSPPPLHRAMAASASNSNQPPFLSSMPWR

SEQ ID NO: 16055 - DNA, 1442 bp, Zea mays subsp. mays
  misc_feature (1)..(1442): Ceres Seq. ID no. 12406568
  misc_feature: MA Experiment ID: 108504 Result: Down-regulated in Transcription
  misc_feature: MA Experiment 108504 PARAMETER Experiment Name: Zm_Drought_P Parameter: Age (day) Value: 8
  misc_feature: MA Experiment 108504 PARAMETER Experiment Name: Zm_Drought_P Parameter: Organism Value: Zea mays
  misc_feature: MA Experiment 108504 PARAMETER Experiment Name: Zm_Drought_P Parameter: Plant Line Value: 35A19
  misc_feature: MA Experiment 108504 PARAMETER Experiment Name: Zm_Drought_P Parameter: Timepoint (hr) Value: 12
  misc_feature: MA Experiment 108504 PARAMETER Experiment Name: Zm_Drought_P Parameter: Tissue Value: Aerial
  misc_feature: MA Experiment 108504 PARAMETER Experiment Name: Zm_Drought_P Parameter: Treatment Value: Drought vs. No Drought
  misc_feature: MA Experiment ID: 108515 Result: Up-regulated in Transcription
  misc_feature: MA Experiment 108515 PARAMETER Experiment Name: Zm_2mM_SA_P Parameter: Age (day) Value: 8
  misc_feature: MA Experiment 108515 PARAMETER Experiment Name: Zm_2mM_SA_P Parameter: Organism Value: Zea mays
  misc_feature: MA Experiment 108515 PARAMETER Experiment Name: Zm_2mM_SA_P Parameter: Plant Line Value: 35A19
  misc_feature: MA Experiment 108515 PARAMETER Experiment Name: Zm_2mM_SA_P Parameter: Timepoint (hr) Value: 12
  misc_feature: MA Experiment 108515 PARAMETER Experiment Name: Zm_2mM_SA_P Parameter: Tissue Value: Aerial
  misc_feature: MA Experiment 108515 PARAMETER Experiment Name: Zm_2mM_SA_P Parameter: Treatment Value: 2mM SA vs. No Treatment
  misc_feature: MA Experiment ID: 108523 Result: Down-regulated in Transcription
  misc_feature: MA Experiment 108523 PARAMETER Experiment Name: Zm_42deg_Heat_P Parameter: Age (day) Value: 8
  misc_feature: MA Experiment 108523 PARAMETER Experiment Name: Zm_42deg_Heat_P Parameter: Organism Value: Zea mays
  misc_feature: MA Experiment 108523 PARAMETER Experiment Name: Zm_42deg_Heat_P Parameter: Plant Line Value: 35A19
  misc_feature: MA Experiment 108523 PARAMETER Experiment Name: Zm_42deg_Heat_P Parameter: Temperature (deg C) Value: 42 vs. 22
  misc_feature: MA Experiment 108523 PARAMETER Experiment Name: Zm_42deg_Heat_P Parameter: Timepoint (hr) Value: 6
  misc_feature: MA Experiment 108523 PARAMETER Experiment Name: Zm_42deg_Heat_P Parameter: Tissue Value: Aerial
  misc_feature: MA Experiment ID: 108526 Result: Up-regulated in Transcription
  misc_feature: MA Experiment 108526 PARAMETER Experiment Name: Zm_5mM_NO_P Parameter: Age (day) Value: 8
  misc_feature: MA Experiment 108526 PARAMETER Experiment Name: Zm_5mM_NO_P Parameter: Organism Value: Zea mays
  misc_feature: MA Experiment 108526 PARAMETER Experiment Name: Zm_5mM_NO_P Parameter: Plant Line Value: 35A19
  misc_feature: MA Experiment 108526 PARAMETER Experiment Name: Zm_5mM_NO_P Parameter: Timepoint (hr) Value: 1
  misc_feature: MA Experiment 108526 PARAMETER Experiment Name: Zm_5mM_NO_P Parameter: Tissue Value: Aerial
  misc_feature: MA Experiment 108526 PARAMETER Experiment Name: Zm_5mM_NO_P Parameter: Treatment Value: 5mM NO vs. No Treatment
  misc_feature: MA Experiment ID: 108527 Result: Up-regulated in Transcription
  misc_feature: MA Experiment 108527 PARAMETER Experiment Name: Zm_5mM_NO_P Parameter: Age (day) Value: 8
  misc_feature: MA Experiment 108527 PARAMETER Experiment Name: Zm_5mM_NO_P Parameter: Organism Value: Zea mays
  misc_feature: MA Experiment 108527 PARAMETER Experiment Name: Zm_5mM_NO_P Parameter: Plant Line Value: 35A19
  misc_feature: MA Experiment 108527 PARAMETER Experiment Name: Zm_5mM_NO_P Parameter: Timepoint (hr) Value: 6
  misc_feature: MA Experiment 108527 PARAMETER Experiment Name: Zm_5mM_NO_P Parameter: Tissue Value: Aerial
  misc_feature: MA Experiment 108527 PARAMETER Experiment Name: Zm_5mM_NO_P Parameter: Treatment Value: 5mM NO vs. No Treatment
  misc_feature: MA Experiment ID: 108528 Result: Down-regulated in Transcription
  misc_feature: MA Experiment 108528 PARAMETER Experiment Name: Zm_Imbibed_Seeds_P Parameter: Age (day) Value: 5 vs. 2
  misc_feature: MA Experiment 108528 PARAMETER Experiment Name: Zm_Imbibed_Seeds_P Parameter: Organism Value: Zea mays
  misc_feature: MA Experiment 108528 PARAMETER Experiment Name: Zm_Imbibed_Seeds_P Parameter: Plant Line Value: 35A19
  misc_feature: MA Experiment 108528 PARAMETER Experiment Name: Zm_Imbibed_Seeds_P Parameter: Tissue Value: Aerial vs. Embryo
  misc_feature: MA Experiment ID: 108533 Result: Down-regulated in Transcription
  misc_feature: MA Experiment 108533 PARAMETER Experiment Name: Zm_4deg_Cold_P Parameter: Age (hr) Value: 8
  misc_feature: MA Experiment 108533 PARAMETER Experiment Name: Zm_4deg_Cold_P Parameter: Organism Value: Zea mays
  misc_feature: MA Experiment 108533 PARAMETER Experiment Name: Zm_4deg_Cold_P Parameter: Plant Line Value: 35A19
  misc_feature: MA Experiment 108533 PARAMETER Experiment Name: Zm_4deg_Cold_P Parameter: Temperature (deg C) Value: 4 vs. 22
  misc_feature: MA Experiment 108533 PARAMETER Experiment Name: Zm_4deg_Cold_P Parameter: Timepoint (hr) Value: 1
  misc_feature: MA Experiment 108533 PARAMETER Experiment Name: Zm_4deg_Cold_P Parameter: Tissue Value: Aerial
  misc_feature: MA Experiment ID: 108543 Result: Up-regulated in Transcription
  misc_feature: MA Experiment ID: 108556 Result: Down-regulated in Transcription
  misc_feature: MA Experiment 108556 PARAMETER Experiment Name: Zm_Drought_P Parameter: Age (day) Value: 9
  misc_feature: MA Experiment 108556 PARAMETER Experiment Name: Zm_Drought_P Parameter: Organism Value: Zea mays
  misc_feature: MA Experiment 108556 PARAMETER Experiment Name: Zm_Drought_P Parameter: Plant Line Value: 35A19
  misc_feature: MA Experiment 108556 PARAMETER Experiment Name: Zm_Drought_P Parameter: Timepoint (hr) Value: 24
  misc_feature: MA Experiment 108556 PARAMETER Experiment Name: Zm_Drought_P Parameter: Tissue Value: Aerial
  misc_feature: MA Experiment 108556 PARAMETER Experiment Name: Zm_Drought_P Parameter: Treatment Value: Drought vs. No Drought
  misc_feature: MA Experiment ID: 108597 Result: Down-regulated in Transcription
  misc_feature: MA Experiment 108597 PARAMETER Experiment Name: Zm_100uM_ABA_P Parameter: Age (day) Value: 9
  misc_feature: MA Experiment 108597 PARAMETER Experiment Name: Zm_100uM_ABA_P Parameter: Organism Value: Zea mays
  misc_feature: MA Experiment 108597 PARAMETER Experiment Name: Zm_100uM_ABA_P Parameter: Plant Line Value: 35A19
  misc_feature: MA Experiment 108597 PARAMETER Experiment Name: Zm_100uM_ABA_P Parameter: Timepoint (hr) Value: 24
  misc_feature: MA Experiment 108597 PARAMETER Experiment Name: Zm_100uM_ABA_P Parameter: Tissue Value: Aerial
  misc_feature: MA Experiment 108597 PARAMETER Experiment Name: Zm_100uM_ABA_P Parameter: Treatment Value: 100uM ABA vs. No Treatment
  misc_feature: MA Experiment ID: 20000477 Result: Up-regulated in Transcription
  misc_feature: MA Experiment 20000477 PARAMETER Experiment Name: Zm_5mM_SA_P Parameter: Age (day) Value: 10
  misc_feature: MA Experiment 20000477 PARAMETER Experiment Name: Zm_5mM_SA_P Parameter: Organism Value: Zea mays
  misc_feature: MA Experiment 20000477 PARAMETER Experiment Name: Zm_5mM_SA_P Parameter: Plant Line Value: 35A19
  misc_feature: MA Experiment 20000477 PARAMETER Experiment Name: Zm_5mM_SA_P Parameter: Timepoint (hr) Value: 48
  misc_feature: MA Experiment 20000477 PARAMETER Experiment Name: Zm_5mM_SA_P Parameter: Tissue Value: Aerial
  misc_feature: MA Experiment 20000477 PARAMETER Experiment Name: Zm_5mM_SA_P Parameter: Treatment Value: 5mM SA vs. No Treatment
  misc_feature: MA Experiment ID: 20000478 Result: Up-regulated in Transcription
  misc_feature: MA Experiment 20000478 PARAMETER Experiment Name: Zm_5mM_SA_P Parameter: Age (day) Value: 11
  misc_feature: MA Experiment 20000478 PARAMETER Experiment Name: Zm_5mM_SA_P Parameter: Organism Value: Zea mays
  misc_feature: MA Experiment 20000478 PARAMETER Experiment Name: Zm_5mM_SA_P Parameter: Plant Line Value: 35A19
  misc_feature: MA Experiment 20000478 PARAMETER Experiment Name: Zm_5mM_SA_P Parameter: Timepoint (hr) Value: 72
  misc_feature: MA Experiment 20000478 PARAMETER Experiment Name: Zm_5mM_SA_P Parameter: Tissue Value: Aerial
  misc_feature: MA Experiment 20000478 PARAMETER Experiment Name: Zm_5mM_SA_P Parameter: Treatment Value: 5mM SA vs. No Treatment
  misc_feature: MA Experiment ID: 20000479 Result: Down-regulated in Transcription
  misc_feature: MA Experiment 20000479 PARAMETER Experiment Name: Zm_Drought_P Parameter: Age (day) Value: 10
  misc_feature: MA Experiment 20000479 PARAMETER Experiment Name: Zm_Drought_P Parameter: Organism Value: Zea mays
  misc_feature: MA Experiment 20000479 PARAMETER Experiment Name: Zm_Drought_P Parameter: Plant Line Value: 35A19
  misc_feature: MA Experiment 20000479 PARAMETER Experiment Name: Zm_Drought_P Parameter: Timepoint (hr) Value: 48
  misc_feature: MA Experiment 20000479 PARAMETER Experiment Name: Zm_Drought_P Parameter: Tissue Value: Aerial
  misc_feature: MA Experiment 20000479 PARAMETER Experiment Name: Zm_Drought_P Parameter: Treatment Value: Drought vs. No Drought
  misc_feature: MA Experiment ID: 20000488 Result: Down-regulated in Transcription
  misc_feature: MA Experiment 20000488 PARAMETER Experiment Name: Zm_50mM_NH4NO3_L_to_H_P Parameter: Organism Value: Zea mays
  misc_feature: MA Experiment 20000488 PARAMETER Experiment Name: Zm_50mM_NH4NO3_L_to_H_P Parameter: Timepoint (hr) Value: 8
  misc_feature: MA Experiment 20000488 PARAMETER Experiment Name: Zm_50mM_NH4NO3_L_to_H_P Parameter: Tissue Value: Leaves
  misc_feature: MA Experiment 20000488 PARAMETER Experiment Name: Zm_50mM_NH4NO3_L_to_H_P Parameter: Treatment Value: 50mM NH4NO3 vs. 100mM Mannitol
  misc_feature: MA Experiment ID: 20000534 Result: Up-regulated in Transcription
  misc_feature: MA Experiment 20000534 PARAMETER Experiment Name: Zm_Hybrid_Pollen_P Parameter: Age (day) Value: 8
  misc_feature: MA Experiment 20000534 PARAMETER Experiment Name: Zm_Hybrid_Pollen_P Parameter: Organism Value: Zea mays
  misc_feature: MA Experiment 20000534 PARAMETER Experiment Name: Zm_Hybrid_Pollen_P Parameter: Plant Line Value: 35A19
  misc_feature: MA Experiment 20000534 PARAMETER Experiment Name: Zm_Hybrid_Pollen_P Parameter: Tissue Value: Pollen vs. Aerial
  misc_feature: MA Experiment ID: 20000627 Result: Up-regulated in Transcription
  misc_feature: MA Experiment 20000627 PARAMETER Experiment Name: Zm_Herbicide-Treatments_P Parameter: Timepoint (hr) Value: 12
  misc_feature: MA Experiment 20000627 PARAMETER Experiment Name: Zm_Herbicide-Treatments_P Parameter: Tissue Value: Aerial
  misc_feature: MA Experiment 20000627 PARAMETER Experiment Name: Zm_Herbicide-Treatments_P Parameter: Treatment Value: Finale vs. No Treatment
atgcgagactggaggcggaaccgcgcacgacaccaagctgccgcgccggactgctgcacgcaagcgcagcgcaggaccgaccgacctccgtaggcacgcacggcgccggcggcatggcggagcacctcctgtcgacggccgtgcacgacacgctgccggggagctacgtgcggccggagccggagcgcccgcgcctcgcggaggtcgtgaccggcgcgcgcatccccgtcgtggacctgggcagccccgaccgcggcgcggtcgtggccgccgtcggcgacgcctgccgctcgcacggcttcttccaggtcgtcaaccacgggatacacgccgccctggtcgcggcggtgatggccgcggggcgcggcttcttccggctgccccccgaggagaaggccaagctctactccgacgaccccgccaggaagatccggctgtccaccagcttcaacgtgcgcaaggagacggtgcacaactggcgcgactacctccgcctgcactgccatcccctcgacgagttcctgcccgattggccgtccaacccgcccgatttcaaggagaccatgggcacctactgcaaggaggtccgggagctcgggttcaggctgtacgccgcgatctcggagagcctgggcctagaggcgagctacatgaaggaagcgctgggggagcaggagcagcacatggcggtcaacttctacccgccgtgcccggagccggagctcacctacggcctcccggcgcacaccgaccccaacgcgctcaccatcctgctcatggacccggacgtcgccggcctgcaggtgctccacgccggccagtgggtcgccgtcaacccgcagcccggcgcgctcatcatcaacatcggcgaccagctgcaggcgctgagcaacgggcagtaccggagcgtgtggcaccgcgcggtggtgaactcggaccgggagcgcatgtccgtggcgtcgttcctgtgcccgtgcaaccacgtcgtgctcggccccgcgcggaagctcgtcaccgaggacaccccggccgtgtacaggaactacacgtacgacaagtactacgccaagttctggagcaggaacctggaccaggagcactgcctcgagctcttcagaacctagcgaatcggatacggatggatggatacattacatacgcgccctctgtttttctccatgacgttagaagaacacgttctgcaatgtttgtccattcaaggtggtatcaatcaaggctgtggtcgttgcaattcttccgctccatatacatgattaaatgctttgaaagaaaaagaaaaaaagaaacacaagtattatggcactactagtgtttttaggaacaaggaaagaggggttgcccctgctggctatatatattaaatataaataaaggtaaggctgtagacattggtgaataagagaaagtatttgagtttctct

SEQ ID NO: 16056 - protein, 442 aa, Zea mays subsp. mays
  peptide (1)..(442): Ceres Seq. ID no. 12406569
  misc_feature (164)..(286): Pfam Name: Herpesvirus UL87 family Pfam Description: Herpesvirus UL87 family
CETGGGTAHDTKLPRRTAARKRSAGPTDLRRHARRRRHGGAPPVDGRARHAAGELRAAGAGAPAPRGGRDRRAHPRRGPGQPRPRRGRGRRRRRLPLARLLPGRQPRDTRRPGRGGDGRGARLLPAAPRGEGQALLRRPRQEDPAVHQLQRAQGDGAQLARLPPPALPSPRRVPARLAVQPARFQGDHGHLLQGGPGARVQAVRRDLGEPGPRGELHEGSAGGAGAAHGGQLLPAVPGAGAHLRPPGAHRPQRAHHPAHGPGRRRPAGAPRRPVGRRQPAARRAHHQHRRPAAGAEQRAVPERVAPRGGELGPGAHVRGVVPVPVQPRRARPRAEARHRGHPGRVQELHVRQVLRQVLEQEPGPGALPRALQNLANRIRMDGYITYAPSVFLHDVRRTRSAMFVHSRWYQSRLWSLQFFRSIYMIKCFERKRKKETQVLWHY

SEQ ID NO: 16057 - protein, 373 aa, Zea mays subsp. mays
  peptide (1)..(373): Ceres Seq. ID no. 12406570
  misc_feature (224)..(324): Pfam Name: 2OG-Fe(II) oxygenase superfamily Pfam Description: 2OG-Fe(II) oxygenase superfamily
  misc_feature (49)..(295): Homolog of NCBI NO: 34907994 NR Description: leucoanthocyanidin dioxygenase-like protein
  misc_feature (40)..(353): Homolog of NCBI NO: 15224472 NR Description: putative anthocyanidin synthase
  misc_feature (185)..(373): Homolog of NCBI NO: 25446682 NR Description: Putative flavanone 3-hydroxylase
  misc_feature (44)..(372): Homolog of NCBI NO: 15235126 NR Description: putative Fe(II)/ascorbate oxidase; protein id:
  misc_feature (46)..(372): Homolog of NCBI NO: 15235124 NR Description: putative flavanone 3-beta-hydroxylase; protein
  misc_feature (35)..(372): Homolog of NCBI NO: 38345873 NR Description: OSJNBa0064M23.15 [Oryza sativa (japonica
  misc_feature (38)..(371): Homolog of NCBI NO: 21553527 NR Description: flavanone 3-hydroxylase-like protein [Arabidopsis
  misc_feature (38)..(371): Homolog of NCBI NO: 15238567 NR Description: flavanone 3-hydroxylase-like protein
  misc_feature (42)..(372): Homolog of NCBI NO: 38345872 NR Description: OSJNBa0064M23.14 [Oryza sativa (japonica
  misc_feature (40)..(373): Homolog of NCBI NO: 37536444 NR Description: unknown protein [Oryza sativa (japonica
ARLEAEPRTTPSCRAGLLHASAAQDRPTSVGTHGAGGMAEHLLSTAVHDTLPGSYVRPEPERPRLAEVVTGARIPVVDLGSPDRGAVVAAVGDACRSHGFFQVVNHGIHAALVAAVMAAGRGFFRLPPEEKAKLYSDDPARKIRLSTSFNVRKETVHNWRDYLRLHCHPLDEFLPDWPSNPPDFKETMGTYCKEVRELGFRLYAAISESLGLEASYMKEALGEQEQHMAVNFYPPCPEPELTYGLPAHTDPNALTILLMDPDVAGLQVLHAGQWVAVNPQPGALIINIGDQLQALSNGQYRSVWHRAVVNSDRERMSVASFLCPCNHVVLGPARKLVTEDTPAVYRNYTYDKYYAKFWSRNLDQEHCLELFRT

SEQ ID NO: 16058 - protein, 336 aa, Zea mays subsp. mays
  peptide (1)..(336): Ceres Seq. ID no. 12406571
  misc_feature (187)..(287): Pfam Name: 2OG-Fe(II) oxygenase superfamily Pfam Description: 2OG-Fe(II) oxygenase superfamily
  misc_feature (5)..(335): Homolog of NCBI NO: 38345872 NR Description: OSJNBa0064M23.14 [Oryza sativa (japonica
  misc_feature (12)..(258): Homolog of NCBI NO: 34907994 NR Description: leucoanthocyanidin dioxygenase-like protein
  misc_feature (148)..(336): Homolog of NCBI NO: 25446682 NR Description: Putative flavanone 3-hydroxylase
  misc_feature (9)..(335): Homolog of NCBI NO: 15235124 NR Description: putative flavanone 3-beta-hydroxylase; protein
  misc_feature (1)..(334): Homolog of NCBI NO: 21553527 NR Description: flavanone 3-hydroxylase-like protein [Arabidopsis
  misc_feature (1)..(334): Homolog of NCBI NO: 15238567 NR Description: flavanone 3-hydroxylase-like protein
  misc_feature (1)..(335): Homolog of NCBI NO: 38345873 NR Description: OSJNBa0064M23.15 [Oryza sativa (japonica
  misc_feature (7)..(335): Homolog of NCBI NO: 15235126 NR Description: putative Fe(II)/ascorbate oxidase; protein id:
  misc_feature (3)..(316): Homolog of NCBI NO: 15224472 NR Description: putative anthocyanidin synthase
  misc_feature (3)..(336): Homolog of NCBI NO: 37536444 NR Description: unknown protein [Oryza sativa (japonica
MAEHLLSTAVHDTLPGSYVRPEPERPRLAEVVTGARIPVVDLGSPDRGAVVAAVGDACRSHGFFQVVNHGIHAALVAAVMAAGRGFFRLPPEEKAKLYSDDPARKIRLSTSFNVRKETVHNWRDYLRLHCHPLDEFLPDWPSNPPDFKETMGTYCKEVRELGFRLYAAISESLGLEASYMKEALGEQEQHMAVNFYPPCPEPELTYGLPAHTDPNALTILLMDPDVAGLQVLHAGQWVAVNPQPGALIINIGDQLQALSNGQYRSVWHRAVVNSDRERMSVASFLCPCNHVVLGPARKLVTEDTPAVYRNYTYDKYYAKFWSRNLDQEHCLELFRT

SEQ ID NO: 16059 - DNA, 1696 bp, Zea mays subsp. mays
  misc_feature (1)..(1696): Ceres Seq. ID no. 13498363
  misc_feature: MA Experiment ID: 108504 Result: Down-regulated in Transcription
  misc_feature: MA Experiment 108504 PARAMETER Experiment Name: Zm_Drought_P Parameter: Age (day) Value: 8
  misc_feature: MA Experiment 108504 PARAMETER Experiment Name: Zm_Drought_P Parameter: Organism Value: Zea mays
  misc_feature: MA Experiment 108504 PARAMETER Experiment Name: Zm_Drought_P Parameter: Plant Line Value: 35A19
  misc_feature: MA Experiment 108504 PARAMETER Experiment Name: Zm_Drought_P Parameter: Timepoint (hr) Value: 12
  misc_feature: MA Experiment 108504 PARAMETER Experiment Name: Zm_Drought_P Parameter: Tissue Value: Aerial
  misc_feature: MA Experiment 108504 PARAMETER Experiment Name: Zm_Drought_P Parameter: Treatment Value: Drought vs. No Drought
  misc_feature: MA Experiment ID: 108527 Result: Down-regulated in Transcription
  misc_feature: MA Experiment 108527 PARAMETER Experiment Name: Zm_5mM_NO_P Parameter: Age (day) Value: 8
  misc_feature: MA Experiment 108527 PARAMETER Experiment Name: Zm_5mM_NO_P Parameter: Organism Value: Zea mays
  misc_feature: MA Experiment 108527 PARAMETER Experiment Name: Zm_5mM_NO_P Parameter: Plant Line Value: 35A19
  misc_feature: MA Experiment 108527 PARAMETER Experiment Name: Zm_5mM_NO_P Parameter: Timepoint (hr) Value: 6
  misc_feature: MA Experiment 108527 PARAMETER Experiment Name: Zm_5mM_NO_P Parameter: Tissue Value: Aerial
  misc_feature: MA Experiment 108527 PARAMETER Experiment Name: Zm_5mM_NO_P Parameter: Treatment Value: 5mM NO vs. No Treatment
  misc_feature: MA Experiment ID: 108528 Result: Up-regulated in Transcription
  misc_feature: MA Experiment 108528 PARAMETER Experiment Name: Zm_Imbibed_Seeds_P Parameter: Age (day) Value: 5 vs. 2
  misc_feature: MA Experiment 108528 PARAMETER Experiment Name: Zm_Imbibed_Seeds_P Parameter: Organism Value: Zea mays
  misc_feature: MA Experiment 108528 PARAMETER Experiment Name: Zm_Imbibed_Seeds_P Parameter: Plant Line Value: 35A19
  misc_feature: MA Experiment 108528 PARAMETER Experiment Name: Zm_Imbibed_Seeds_P Parameter: Tissue Value: Aerial vs. Embryo
  misc_feature: MA Experiment ID: 108529 Result: Up-regulated in Transcription
  misc_feature: MA Experiment 108529 PARAMETER Experiment Name: Zm_Imbibed_Seeds_P Parameter: Age (day) Value: 5 vs. 2
  misc_feature: MA Experiment 108529 PARAMETER Experiment Name: Zm_Imbibed_Seeds_P Parameter: Organism Value: Zea mays
  misc_feature: MA Experiment 108529 PARAMETER Experiment Name: Zm_Imbibed_Seeds_P Parameter: Plant Line Value: 35A19
  misc_feature: MA Experiment 108529 PARAMETER Experiment Name: Zm_Imbibed_Seeds_P Parameter: Tissue Value: Roots vs. Embryo
  misc_feature: MA Experiment ID: 108530 Result: Up-regulated in Transcription
  misc_feature: MA Experiment 108530 PARAMETER Experiment Name: Zm_Imbibed_Seeds_P Parameter: Age (day) Value: 6 vs. 2
  misc_feature: MA Experiment 108530 PARAMETER Experiment Name: Zm_Imbibed_Seeds_P Parameter: Organism Value: Zea mays
  misc_feature: MA Experiment 108530 PARAMETER Experiment Name: Zm_Imbibed_Seeds_P Parameter: Plant Line Value: 35A19
  misc_feature: MA Experiment 108530 PARAMETER Experiment Name: Zm_Imbibed_Seeds_P Parameter: Tissue Value: Aerial vs. Embryo
  misc_feature: MA Experiment ID: 108534 Result: Up-regulated in Transcription
  misc_feature: MA Experiment 108534 PARAMETER Experiment Name: Zm_4deg_Cold_P Parameter: Age (hr) Value: 8
  misc_feature: MA Experiment 108534 PARAMETER Experiment Name: Zm_4deg_Cold_P Parameter: Organism Value: Zea mays
  misc_feature: MA Experiment 108534 PARAMETER Experiment Name: Zm_4deg_Cold_P Parameter: Plant Line Value: 35A19
  misc_feature: MA Experiment 108534 PARAMETER Experiment Name: Zm_4deg_Cold_P Parameter: Temperature (deg C) Value: 4 vs. 22
  misc_feature: MA Experiment 108534 PARAMETER Experiment Name: Zm_4deg_Cold_P Parameter: Timepoint (hr) Value: 6
  misc_feature: MA Experiment 108534 PARAMETER Experiment Name: Zm_4deg_Cold_P Parameter: Tissue Value: Aerial
  misc_feature: MA Experiment ID: 108543 Result: Down-regulated in Transcription
  misc_feature: MA Experiment ID: 108547 Result: Up-regulated in Transcription
  misc_feature: MA Experiment 108547 PARAMETER Experiment Name: Zm_Imbibed_Seeds_P Parameter: Age (day) Value: 4 vs. 2
  misc_feature: MA Experiment 108547 PARAMETER Experiment Name: Zm_Imbibed_Seeds_P Parameter: Organism Value: Zea mays
  misc_feature: MA Experiment 108547 PARAMETER Experiment Name: Zm_Imbibed_Seeds_P Parameter: Plant Line Value: 35A19
  misc_feature: MA Experiment 108547 PARAMETER Experiment Name: Zm_Imbibed_Seeds_P Parameter: Tissue Value: Aerial vs. Embryo
  misc_feature: MA Experiment ID: 108556 Result: Down-regulated in Transcription
  misc_feature: MA Experiment 108556 PARAMETER Experiment Name: Zm_Drought_P Parameter: Age (day) Value: 9
  misc_feature: MA Experiment 108556 PARAMETER Experiment Name: Zm_Drought_P Parameter: Organism Value: Zea mays
  misc_feature: MA Experiment 108556 PARAMETER Experiment Name: Zm_Drought_P Parameter: Plant Line Value: 35A19
  misc_feature: MA Experiment 108556 PARAMETER Experiment Name: Zm_Drought_P Parameter: Timepoint (hr) Value: 24
  misc_feature: MA Experiment 108556 PARAMETER Experiment Name: Zm_Drought_P Parameter: Tissue Value: Aerial
  misc_feature: MA Experiment 108556 PARAMETER Experiment Name: Zm_Drought_P Parameter: Treatment Value: Drought vs. No Drought
  misc_feature: MA Experiment ID: 20000480 Result: Down-regulated in Transcription
  misc_feature: MA Experiment 20000480 PARAMETER Experiment Name: Zm_Drought_P Parameter: Age (day) Value: 11
  misc_feature: MA Experiment 20000480 PARAMETER Experiment Name: Zm_Drought_P Parameter: Organism Value: Zea mays
  misc_feature: MA Experiment 20000480 PARAMETER Experiment Name: Zm_Drought_P Parameter: Plant Line Value: 35A19
  misc_feature: MA Experiment 20000480 PARAMETER Experiment Name: Zm_Drought_P Parameter: Timepoint (hr) Value: 72
  misc_feature: MA Experiment 20000480 PARAMETER Experiment Name: Zm_Drought_P Parameter: Tissue Value: Aerial
  misc_feature: MA Experiment 20000480 PARAMETER Experiment Name: Zm_Drought_P Parameter: Treatment Value: Drought vs. No Drought
  misc_feature: MA Experiment ID: 20000488 Result: Down-regulated in Transcription
  misc_feature: MA Experiment 20000488 PARAMETER Experiment Name: Zm_50mM_NH4NO3_L_to_H_P Parameter: Organism Value: Zea mays
  misc_feature: MA Experiment 20000488 PARAMETER Experiment Name: Zm_50mM_NH4NO3_L_to_H_P Parameter: Timepoint (hr) Value: 8
  misc_feature: MA Experiment 20000488 PARAMETER Experiment Name: Zm_50mM_NH4NO3_L_to_H_P Parameter: Tissue Value: Leaves
  misc_feature: MA Experiment 20000488 PARAMETER Experiment Name: Zm_50mM_NH4NO3_L_to_H_P Parameter: Treatment Value: 50mM NH4NO3 vs. 100mM Mannitol
taatcaaaaaattattatttcttcttccagcgggcaattcctggccaccaccgggcgcgctgcaccgcgctatattactccgggctcgtggacaagcatgcagaggggcgtgtccttccctggcggaatggcggaggagtgcccgcccgccggcggcgccgagctctggctcccggacgagttcctggacgacgacttcttctccgaggaggagaaggcggcggtcgcggccaagagcgagagcgacgaggaggaagggatggacggcctctcgcgccgcgcggccgggctcgtcgtcgggggtggaggggacggttcccctgcaaaggcgcaagtgttagccggctcgccgcagtcgattctgtgcggcctgcatgcttccggggaggacagccccaacggcgcggcgtcgcaggtcagctcgccgccgtcgtcgccgnngnntaagacgccggccgacccctgggacctgctcaaagaggcggccggccaggtggcccgcatgcgcacaactagcggcatcctggtggcaacgaacgcgggcgcacatcaaagacaccccgtcccgccgctggcgcagaagctctctgcgccggccgacgctcccaaggccgcgggtgccaacctccctcaggctcagccgaagaactcgatggaacatcgccggattcagattgctcgttttaatgcgctgaagcagcagcagctcctgaagcacatgcgggagcgggagctcgccgtcgctacggcggcggcgtggggcacgagcgtcgcggggtctcatcgtgccgccgggtaccgtgcgccggcgccccatgtcctgagctcgtccgcgtggcccaccctccagaagcagcagcagcagcaaagggcggtgtccccggcgggcatgcgcgccgtcttcgtggcccctcctggcgccaagcgcgagtgcgccggcaccggcgtgttcatcccccgccaggccggcgcccccgcggagcccaagaaaaggccagcagcgtgcgcccctgtccttctcccggcgcgcgtcgtgcaggcgctcaacctcaacgtcgaggacctcggggcccgtcccatctacccgggcggcttcgtcctcgaccacgatgcactggtgagccggagcaacgctctgctggcgagccgcgcgtcccagcagctccatggcgcttcgtcgcgcgaggtgaatctcccccaggaatggacgtactgagggcgccgattcgccaccgcaccgctgcaagatgactcgacgatcactccagattaacggggggtgtcaaaaaaaaattactattgctattggtagcaataggtattataggtgttgttaggctagaagtaggaggcagcggtggtgtggcattacgcgccagcgttaggtgttcttttgtgcgggggtgatatattggttattttgggactgncggacgggttggtgatgagcaagagcgaaatcaatcatccgtggctctcgcaggtccgttgggggcggaggggagaaacagcaataataataataagtgggtgcttttgggggaggggagagaggggggtttggaactaatcctatgtttagctggttctggtactacgatggtttcccaagggaaaatcatcaagcattcagcagtctgtgaaagagatgtctcgtcactgtaagcaaataataataataataaacaggagctcc

SEQ ID NO: 16060 - protein, 404 aa, Zea mays subsp. mays
  peptide (1)..(404): Ceres Seq. ID no. 13498364
  misc_feature (261)..(404): Homolog of NCBI NO: 15235509 NR Description: expressed protein [Arabidopsis thaliana]
  misc_feature (228)..(334): Homolog of NCBI NO: 37534638 NR Description: hypothetical protein [Oryza sativa (japonica
  misc_feature (43)..(393): Homolog of NCBI NO: 20160564 NR Description: P0414E03.8 [Oryza sativa (japonica
  misc_feature (147)..(147): Xaa is any aa, unknown or other
  misc_feature (148)..(148): Xaa is any aa, unknown or other
NQKIIISSSSGQFLATTGRAAPRYITPGSWTSMQRGVSFPGGMAEECPPAGGAELWLPDEFLDDDFFSEEEKAAVAAKSESDEEEGMDGLSRRAAGLVVGGGGDGSPAKAQVLAGSPQSILCGLHASGEDSPNGAASQVSSPPSSPXXKTPADPWDLLKEAAGQVARMRTTSGILVATNAGAHQRHPVPPLAQKLSAPADAPKAAGANLPQAQPKNSMEHRRIQIARFNALKQQQLLKHMRERELAVATAAAWGTSVAGSHRAAGYRAPAPHVLSSSAWPTLQKQQQQQRAVSPAGMRAVFVAPPGAKRECAGTGVFIPRQAGAPAEPKKRPAACAPVLLPARVVQALNLNVEDLGARPIYPGGFVLDHDALVSRSNALLASRASQQLHGASSREVNLPQEWTY

SEQ ID NO: 16061 - protein, 372 aa, Zea mays subsp. mays
  peptide (1)..(372): Ceres Seq. ID no. 13498365
  misc_feature (229)..(372): Homolog of NCBI NO: 15235509 NR Description: expressed protein [Arabidopsis thaliana]
  misc_feature (196)..(302): Homolog of NCBI NO: 37534638 NR Description: hypothetical protein [Oryza sativa (japonica
  misc_feature (11)..(361): Homolog of NCBI NO: 20160564 NR Description: P0414E03.8 [Oryza sativa (japonica
  misc_feature (115)..(115): Xaa is any aa, unknown or other
  misc_feature (116)..(116): Xaa is any aa, unknown or other
MQRGVSFPGGMAEECPPAGGAELWLPDEFLDDDFFSEEEKAAVAAKSESDEEEGMDGLSRRAAGLVVGGGGDGSPAKAQVLAGSPQSILCGLHASGEDSPNGAASQVSSPPSSPXXKTPADPWDLLKEAAGQVARMRTTSGILVATNAGAHQRHPVPPLAQKLSAPADAPKAAGANLPQAQPKNSMEHRRIQIARFNALKQQQLLKHMRERELAVATAAAWGTSVAGSHRAAGYRAPAPHVLSSSAWPTLQKQQQQQRAVSPAGMRAVFVAPPGAKRECAGTGVFIPRQAGAPAEPKKRPAACAPVLLPARVVQALNLNVEDLGARPIYPGGFVLDHDALVSRSNALLASRASQQLHGASSREVNLPQEWTY

SEQ ID NO: 16062 - protein, 362 aa, Zea mays subsp. mays
  peptide (1)..(362): Ceres Seq. ID no. 13498366
  misc_feature (219)..(362): Homolog of NCBI NO: 15235509 NR Description: expressed protein [Arabidopsis thaliana]
  misc_feature (186)..(292): Homolog of NCBI NO: 37534638 NR Description: hypothetical protein [Oryza sativa (japonica
  misc_feature (1)..(351): Homolog of NCBI NO: 20160564 NR Description: P0414E03.8 [Oryza sativa (japonica
  misc_feature (105)..(105): Xaa is any aa, unknown or other
  misc_feature (106)..(106): Xaa is any aa, unknown or other
MAEECPPAGGAELWLPDEFLDDDFFSEEEKAAVAAKSESDEEEGMDGLSRRAAGLVVGGGGDGSPAKAQVLAGSPQSILCGLHASGEDSPNGAASQVSSPPSSPXXKTPADPWDLLKEAAGQVARMRTTSGILVATNAGAHQRHPVPPLAQKLSAPADAPKAAGANLPQAQPKNSMEHRRIQIARFNALKQQQLLKHMRERELAVATAAAWGTSVAGSHRAAGYRAPAPHVLSSSAWPTLQKQQQQQRAVSPAGMRAVFVAPPGAKRECAGTGVFIPRQAGAPAEPKKRPAACAPVLLPARVVQALNLNVEDLGARPIYPGGFVLDHDALVSRSNALLASRASQQLHGASSREVNLPQEWTY

SEQ ID NO: 16063 - DNA, 2056 bp, Zea mays subsp. mays
  misc_feature (1)..(2056): Ceres Seq. ID no. 12372969
  misc_feature: MA Experiment ID: 108515 Result: Up-regulated in Transcription
  misc_feature: MA Experiment 108515 PARAMETER Experiment Name: Zm_2mM_SA_P Parameter: Age (day) Value: 8
  misc_feature: MA Experiment 108515 PARAMETER Experiment Name: Zm_2mM_SA_P Parameter: Organism Value: Zea mays
  misc_feature: MA Experiment 108515 PARAMETER Experiment Name: Zm_2mM_SA_P Parameter: Plant Line Value: 35A19
  misc_feature: MA Experiment 108515 PARAMETER Experiment Name: Zm_2mM_SA_P Parameter: Timepoint (hr) Value: 12
  misc_feature: MA Experiment 108515 PARAMETER Experiment Name: Zm_2mM_SA_P Parameter: Tissue Value: Aerial
  misc_feature: MA Experiment 108515 PARAMETER Experiment Name: Zm_2mM_SA_P Parameter: Treatment Value: 2mM SA vs. No Treatment
  misc_feature: MA Experiment ID: 108523 Result: Up-regulated in Transcription
  misc_feature: MA Experiment 108523 PARAMETER Experiment Name: Zm_42deg_Heat_P Parameter: Age (day) Value: 8
  misc_feature: MA Experiment 108523 PARAMETER Experiment Name: Zm_42deg_Heat_P Parameter: Organism Value: Zea mays
  misc_feature: MA Experiment 108523 PARAMETER Experiment Name: Zm_42deg_Heat_P Parameter: Plant Line Value: 35A19
  misc_feature: MA Experiment 108523 PARAMETER Experiment Name: Zm_42deg_Heat_P Parameter: Temperature (deg C) Value: 42 vs. 22
  misc_feature: MA Experiment 108523 PARAMETER Experiment Name: Zm_42deg_Heat_P Parameter: Timepoint (hr) Value: 6
  misc_feature: MA Experiment 108523 PARAMETER Experiment Name: Zm_42deg_Heat_P Parameter: Tissue Value: Aerial
  misc_feature: MA Experiment ID: 108527 Result: Up-regulated in Transcription
  misc_feature: MA Experiment 108527 PARAMETER Experiment Name: Zm_5mM_NO_P Parameter: Age (day) Value: 8
  misc_feature: MA Experiment 108527 PARAMETER Experiment Name: Zm_5mM_NO_P Parameter: Organism Value: Zea mays
  misc_feature: MA Experiment 108527 PARAMETER Experiment Name: Zm_5mM_NO_P Parameter: Plant Line Value: 35A19
  misc_feature: MA Experiment 108527 PARAMETER Experiment Name: Zm_5mM_NO_P Parameter: Timepoint (hr) Value: 6
  misc_feature: MA Experiment 108527 PARAMETER Experiment Name: Zm_5mM_NO_P Parameter: Tissue Value: Aerial
  misc_feature: MA Experiment 108527 PARAMETER Experiment Name: Zm_5mM_NO_P Parameter: Treatment Value: 5mM NO vs. No Treatment
  misc_feature: MA Experiment ID: 108556 Result: Up-regulated in Transcription
  misc_feature: MA Experiment 108556 PARAMETER Experiment Name: Zm_Drought_P Parameter: Age (day) Value: 9
  misc_feature: MA Experiment 108556 PARAMETER Experiment Name: Zm_Drought_P Parameter: Organism Value: Zea mays
  misc_feature: MA Experiment 108556 PARAMETER Experiment Name: Zm_Drought_P Parameter: Plant Line Value: 35A19
  misc_feature: MA Experiment 108556 PARAMETER Experiment Name: Zm_Drought_P Parameter: Timepoint (hr) Value: 24
  misc_feature: MA Experiment 108556 PARAMETER Experiment Name: Zm_Drought_P Parameter: Tissue Value: Aerial
  misc_feature: MA Experiment 108556 PARAMETER Experiment Name: Zm_Drought_P Parameter: Treatment Value: Drought vs. No Drought
  misc_feature: MA Experiment ID: 108597 Result: Up-regulated in Transcription
  misc_feature: MA Experiment 108597 PARAMETER Experiment Name: Zm_100uM_ABA_P Parameter: Age (day) Value: 9
  misc_feature: MA Experiment 108597 PARAMETER Experiment Name: Zm_100uM_ABA_P Parameter: Organism Value: Zea mays
  misc_feature: MA Experiment 108597 PARAMETER Experiment Name: Zm_100uM_ABA_P Parameter: Plant Line Value: 35A19
  misc_feature: MA Experiment 108597 PARAMETER Experiment Name: Zm_100uM_ABA_P Parameter: Timepoint (hr) Value: 24
  misc_feature: MA Experiment 108597 PARAMETER Experiment Name: Zm_100uM_ABA_P Parameter: Tissue Value: Aerial
  misc_feature: MA Experiment 108597 PARAMETER Experiment Name: Zm_100uM_ABA_P Parameter: Treatment Value: 100uM ABA vs. No Treatment
  misc_feature: MA Experiment ID: 20000477 Result: Up-regulated in Transcription
  misc_feature: MA Experiment 20000477 PARAMETER Experiment Name: Zm_5mM_SA_P Parameter: Age (day) Value: 10
  misc_feature: MA Experiment 20000477 PARAMETER Experiment Name: Zm_5mM_SA_P Parameter: Organism Value: Zea mays
  misc_feature: MA Experiment 20000477 PARAMETER Experiment Name: Zm_5mM_SA_P Parameter: Plant Line Value: 35A19
  misc_feature: MA Experiment 20000477 PARAMETER Experiment Name: Zm_5mM_SA_P Parameter: Timepoint (hr) Value: 48
  misc_feature: MA Experiment 20000477 PARAMETER Experiment Name: Zm_5mM_SA_P Parameter: Tissue Value: Aerial
  misc_feature: MA Experiment 20000477 PARAMETER Experiment Name: Zm_5mM_SA_P Parameter: Treatment Value: 5mM SA vs. No Treatment
  misc_feature: MA Experiment ID: 20000478 Result: Up-regulated in Transcription
  misc_feature: MA Experiment 20000478 PARAMETER Experiment Name: Zm_5mM_SA_P Parameter: Age (day) Value: 11
  misc_feature: MA Experiment 20000478 PARAMETER Experiment Name: Zm_5mM_SA_P Parameter: Organism Value: Zea mays
  misc_feature: MA Experiment 20000478 PARAMETER Experiment Name: Zm_5mM_SA_P Parameter: Plant Line Value: 35A19
  misc_feature: MA Experiment 20000478 PARAMETER Experiment Name: Zm_5mM_SA_P Parameter: Timepoint (hr) Value: 72
  misc_feature: MA Experiment 20000478 PARAMETER Experiment Name: Zm_5mM_SA_P Parameter: Tissue Value: Aerial
  misc_feature: MA Experiment 20000478 PARAMETER Experiment Name: Zm_5mM_SA_P Parameter: Treatment Value: 5mM SA vs. No Treatment
  misc_feature: MA Experiment ID: 20000479 Result: Up-regulated in Transcription
  misc_feature: MA Experiment 20000479 PARAMETER Experiment Name: Zm_Drought_P Parameter: Age (day) Value: 10
  misc_feature: MA Experiment 20000479 PARAMETER Experiment Name: Zm_Drought_P Parameter: Organism Value: Zea mays
  misc_feature: MA Experiment 20000479 PARAMETER Experiment Name: Zm_Drought_P Parameter: Plant Line Value: 35A19
  misc_feature: MA Experiment 20000479 PARAMETER Experiment Name: Zm_Drought_P Parameter: Timepoint (hr) Value: 48
  misc_feature: MA Experiment 20000479 PARAMETER Experiment Name: Zm_Drought_P Parameter: Tissue Value: Aerial
  misc_feature: MA Experiment 20000479 PARAMETER Experiment Name: Zm_Drought_P Parameter: Treatment Value: Drought vs. No Drought
  misc_feature: MA Experiment ID: 20000480 Result: Up-regulated in Transcription
  misc_feature: MA Experiment 20000480 PARAMETER Experiment Name: Zm_Drought_P Parameter: Age (day) Value: 11
  misc_feature: MA Experiment 20000480 PARAMETER Experiment Name: Zm_Drought_P Parameter: Organism Value: Zea mays
  misc_feature: MA Experiment 20000480 PARAMETER Experiment Name: Zm_Drought_P Parameter: Plant Line Value: 35A19
  misc_feature: MA Experiment 20000480 PARAMETER Experiment Name: Zm_Drought_P Parameter: Timepoint (hr) Value: 72
  misc_feature: MA Experiment 20000480 PARAMETER Experiment Name: Zm_Drought_P Parameter: Tissue Value: Aerial
  misc_feature: MA Experiment 20000480 PARAMETER Experiment Name: Zm_Drought_P Parameter: Treatment Value: Drought vs. No Drought
  misc_feature: MA Experiment ID: 20000626 Result: Up-regulated in Transcription
  misc_feature: MA Experiment 20000626 PARAMETER Experiment Name: Zm_Herbicide-Treatments_P Parameter: Timepoint (hr) Value: 12
  misc_feature: MA Experiment 20000626 PARAMETER Experiment Name: Zm_Herbicide-Treatments_P Parameter: Tissue Value: Aerial
  misc_feature: MA Experiment 20000626 PARAMETER Experiment Name: Zm_Herbicide-Treatments_P Parameter: Treatment Value: Roundup vs. No Treatment
agtatacacgccaagtcgccagccagcatttcctcccgaaccatccttccactccctcgccgaccctccccccgcgcccgccatggacacggcgatcggctccgtcccggcagcctccgacgcggcgcgtcacccagcgccgtccgcgtccgccccgcgcgacgcgacgctgggccggcacctggcgcggcgcctggcggaggtgggcgcccgggacgtgttcacggtgccgggggacttcaacctcacgctcctcgacgagctggaggccgagccgggcggcgtccgcctcgtcggctgctgcaacgagctcaacgcggcgtacgcggccgacgggtacgcccgcgcgcgcgccggcggggtcggcgcctgcgccgtcaccttcaccgtcggcggcctcagcgccatcaacggcgtcgccggcgccttcagcgagaacctccccgtcgtgtgcatcgtcggcggacccaacagcaacgactacgggagtaacaggatcctgcaccataccatcggcttgcctgatttcacgcaggagctcaggtgcttccagaacgtcacgtgctatcaggctgtggtgaacaacttggaagatgcgcacgagcagatcgatactgccatctccacggcaatcaaggagagcaagcctgtttacattagcatcaggctgcaacctcccttcgatcccacatcccaccttcagccgccatcctgtccctttcttcctctccccaaggctatcgaaccagatgaacctggaggctgcagtggaagccgccgcggctttcttgaacaaagccgtcaagccagtgcttgtaggtgggccaaagatgagggtgtccaaagcatgcgaagccttggcagagctggcagatgcctgcggctatcccgtcgccgtgatgccttctgcgaaggggctagtgccagagcaccactctaggttcattggcacgtactggggtgcggtgagcactccattctgtgctgagatcgtcgagtctgccgatgcctacctatttgctggccccgtattcaacgactacagctcggttgggtactcgctgctcctcaagaaggagaaggccatcattgtccaaccagagcgggtggtggtcgggcacggacccgcgtttgggtgtgttctgatgaaggatttccttcatgcccttgcaacccgtctgaagaagaacactgccgcgtatgagaactaccgtcgaatttatgtgcctttaggcgaaccacttccatctgaacctggcgagccgttgagagtgaacgtgctattcaagcatattcaggcaatgctgtctggcgacacggctgtcatcgcagagactggggactcgtggtttaactgccagaagctgaagctaccggaaggctgtggatacgaattccagatgcagtatggatcaattggctggtcagtgggcgcaactctaggatacgcacaggctgccaaggataaacgtgtcattgcctgcattggagacggcagctttcaggtgacggcacaagaagtgtcaacgatgctccggtgggggcacaacagcatcatcttcctgataaacaatggagggtacacaatcgaggtggagattcacgatggcccttataacgttatcaagaactggaactacaccggtctggtggaagcgttccacaatggcgagggcgcgtgctacacagcaaaggttcgaacagaggaggagctgacggaggcactggaggcagctctgggacctaagaaggactgcttatgcttcatcgaggtcatcgtgcataaggatgacaccagcaaagagcttctcgagtggggatctagggtttctgcggcgaatagccgtccacctaatcctcagtgaaatagccgtacatcaggtctcccgaattgtcctgtagatcaaaccgttttctggtgacgtccatagcaaaaagtctcggcgaggacatgctgtcgatttctgaataaattgtccctgcaattcactggtgttgaagtcctcgttgtaaaggtacaaagacgtttggaaaaatcactgacagcgtaaactct

SEQ ID NO: 16064 - protein, 423 aa, Zea mays subsp. mays
  peptide (1)..(423): Ceres Seq. ID no. 12372970
  misc_feature (58)..(207): Pfam Name: Thiamine pyrophosphate enzyme, central domain Pfam Description: Thiamine pyrophosphate enzyme, central domain
  misc_feature (22)..(423): Homolog of NCBI NO: 15240423 NR Description: pyruvate decarboxylase (gb|AAB16855.1); protein
  misc_feature (22)..(423): Homolog of NCBI NO: 1706325 NR Description: Pyruvate decarboxylase isozyme 1 (PDC)
  misc_feature (22)..(423): Homolog of NCBI NO: 7436705 NR Description: pyruvate decarboxylase (EC 4.1.1.1) pdc1 - rice
  misc_feature (22)..(423): Homolog of NCBI NO: 19851524 NR Description: pyruvate decarboxylase [Zea mays]
  misc_feature (22)..(423): Homolog of NCBI NO: 19851522 NR Description: pyruvate decarboxylase [Zea mays]
  misc_feature (22)..(423): Homolog of NCBI NO: 23495286 NR Description: pyruvate decarboxylase [Oryza sativa]
  misc_feature (22)..(423): Homolog of NCBI NO: 24745919 NR Description: pyruvate decarboxylase [Solanum tuberosum]
  misc_feature (22)..(423): Homolog of NCBI NO: 29373077 NR Description: pyruvate decarboxylase 1 [Lotus corniculatus]
  misc_feature (22)..(423): Homolog of NCBI NO: 10732644 NR Description: pyruvate decarboxylase 1 [Vitis vinifera]
  misc_feature (22)..(423): Homolog of NCBI NO: 19851518 NR Description: pyruvate decarboxylase [Zea mays]
MRTSRSILPSPRQSRRASLFTLASGCNLPSIPHPTFSRHPVPFFLSPRLSNQMNLEAAVEAAAAFLNKAVKPVLVGGPKMRVSKACEALAELADACGYPVAVMPSAKGLVPEHHSRFIGTYWGAVSTPFCAEIVESADAYLFAGPVFNDYSSVGYSLLLKKEKAIIVQPERVVVGHGPAFGCVLMKDFLHALATRLKKNTAAYENYRRIYVPLGEPLPSEPGEPLRVNVLFKHIQAMLSGDTAVIAETGDSWFNCQKLKLPEGCGYEFQMQYGSIGWSVGATLGYAQAAKDKRVIACIGDGSFQVTAQEVSTMLRWGHNSIIFLINNGGYTIEVEIHDGPYNVIKNWNYTGLVEAFHNGEGACYTAKVRTEEELTEALEAALGPKKDCLCFIEVIVHKDDTSKELLEWGSRVSAANSRPPNPQ

SEQ ID NO: 16065 - protein, 371 aa, Zea mays subsp. mays
  peptide (1)..(371): Ceres Seq. ID no. 12372971
  misc_feature (6)..(155): Pfam Name: Thiamine pyrophosphate enzyme, central domain Pfam Description: Thiamine pyrophosphate enzyme, central domain
  misc_feature (1)..(371): Homolog of NCBI NO: 15240423 NR Description: pyruvate decarboxylase (gb|AAB16855.1); protein
  misc_feature (1)..(371): Homolog of NCBI NO: 1706325 NR Description: Pyruvate decarboxylase isozyme 1 (PDC)
  misc_feature (1)..(371): Homolog of NCBI NO: 7436705 NR Description: pyruvate decarboxylase (EC 4.1.1.1) pdc1 - rice
  misc_feature (1)..(371): Homolog of NCBI NO: 19851524 NR Description: pyruvate decarboxylase [Zea mays]
  misc_feature (1)..(371): Homolog of NCBI NO: 19851522 NR Description: pyruvate decarboxylase [Zea mays]
  misc_feature (1)..(371): Homolog of NCBI NO: 23495286 NR Description: pyruvate decarboxylase [Oryza sativa]
  misc_feature (1)..(371): Homolog of NCBI NO: 24745919 NR Description: pyruvate decarboxylase [Solanum tuberosum]
  misc_feature (1)..(371): Homolog of NCBI NO: 29373077 NR Description: pyruvate decarboxylase 1 [Lotus corniculatus]
  misc_feature (1)..(371): Homolog of NCBI NO: 10732644 NR Description: pyruvate decarboxylase 1 [Vitis vinifera]
  misc_feature (1)..(371): Homolog of NCBI NO: 19851518 NR Description: pyruvate decarboxylase [Zea mays]
MNLEAAVEAAAAFLNKAVKPVLVGGPKMRVSKACEALAELADACGYPVAVMPSAKGLVPEHHSRFIGTYWGAVSTPFCAEIVESADAYLFAGPVFNDYSSVGYSLLLKKEKAIIVQPERVVVGHGPAFGCVLMKDFLHALATRLKKNTAAYENYRRIYVPLGEPLPSEPGEPLRVNVLFKHIQAMLSGDTAVIAETGDSWFNCQKLKLPEGCGYEFQMQYGSIGWSVGATLGYAQAAKDKRVIACIGDGSFQVTAQEVSTMLRWGHNSIIFLINNGGYTIEVEIHDGPYNVIKNWNYTGLVEAFHNGEGACYTAKVRTEEELTEALEAALGPKKDCLCFIEVIVHKDDTSKELLEWGSRVSAANSRPPNPQ

SEQ ID NO: 16066 - protein, 344 aa, Zea mays subsp. mays
  peptide (1)..(344): Ceres Seq. ID no. 12372972
  misc_feature (1)..(128): Pfam Name: Thiamine pyrophosphate enzyme, central domain Pfam Description: Thiamine pyrophosphate enzyme, central domain
  misc_feature (1)..(344): Homolog of NCBI NO: 15240423 NR Description: pyruvate decarboxylase (gb|AAB16855.1); protein
  misc_feature (1)..(344): Homolog of NCBI NO: 1706325 NR Description: Pyruvate decarboxylase isozyme 1 (PDC)
  misc_feature (1)..(344): Homolog of NCBI NO: 7436705 NR Description: pyruvate decarboxylase (EC 4.1.1.1) pdc1 - rice
  misc_feature (1)..(344): Homolog of NCBI NO: 19851524 NR Description: pyruvate decarboxylase [Zea mays]
  misc_feature (1)..(344): Homolog of NCBI NO: 19851522 NR Description: pyruvate decarboxylase [Zea mays]
  misc_feature (1)..(344): Homolog of NCBI NO: 23495286 NR Description: pyruvate decarboxylase [Oryza sativa]
  misc_feature (1)..(344): Homolog of NCBI NO: 24745919 NR Description: pyruvate decarboxylase [Solanum tuberosum]
  misc_feature (1)..(344): Homolog of NCBI NO: 29373077 NR Description: pyruvate decarboxylase 1 [Lotus corniculatus]
  misc_feature (1)..(344): Homolog of NCBI NO: 10732644 NR Description: pyruvate decarboxylase 1 [Vitis vinifera]
  misc_feature (1)..(344): Homolog of NCBI NO: 19851518 NR Description: pyruvate decarboxylase [Zea mays]
MRVSKACEALAELADACGYPVAVMPSAKGLVPEHHSRFIGTYWGAVSTPFCAEIVESADAYLFAGPVFNDYSSVGYSLLLKKEKAIIVQPERVVVGHGPAFGCVLMKDFLHALATRLKKNTAAYENYRRIYVPLGEPLPSEPGEPLRVNVLFKHIQAMLSGDTAVIAETGDSWFNCQKLKLPEGCGYEFQMQYGSIGWSVGATLGYAQAAKDKRVIACIGDGSFQVTAQEVSTMLRWGHNSIIFLINNGGYTIEVEIHDGPYNVIKNWNYTGLVEAFHNGEGACYTAKVRTEEELTEALEAALGPKKDCLCFIEVIVHKDDTSKELLEWGSRVSAANSRPPNPQ

SEQ ID NO: 16067 - DNA, 1639 bp, Zea mays subsp. mays
  misc_feature (1)..(1639): Ceres Seq. ID no. 12391357
  misc_feature: MA Experiment ID: 108689 Result: Down-regulated in Transcription
  misc_feature: MA Experiment 108689 PARAMETER Experiment Name: Zm_Drought_Roots_P Parameter: Age (day) Value: 9
  misc_feature: MA Experiment 108689 PARAMETER Experiment Name: Zm_Drought_Roots_P Parameter: Organism Value: Zea mays
  misc_feature: MA Experiment 108689 PARAMETER Experiment Name: Zm_Drought_Roots_P Parameter: Plant Line Value: 35A19
  misc_feature: MA Experiment 108689 PARAMETER Experiment Name: Zm_Drought_Roots_P Parameter: Timepoint (hr) Value: 24
  misc_feature: MA Experiment 108689 PARAMETER Experiment Name: Zm_Drought_Roots_P Parameter: Tissue Value: Roots
  misc_feature: MA Experiment 108689 PARAMETER Experiment Name: Zm_Drought_Roots_P Parameter: Treatment Value: Drought vs. No Drought
  misc_feature: MA Experiment ID: 20000480 Result: Down-regulated in Transcription
  misc_feature: MA Experiment 20000480 PARAMETER Experiment Name: Zm_Drought_P Parameter: Age (day) Value: 11
  misc_feature: MA Experiment 20000480 PARAMETER Experiment Name: Zm_Drought_P Parameter: Organism Value: Zea mays
  misc_feature: MA Experiment 20000480 PARAMETER Experiment Name: Zm_Drought_P Parameter: Plant Line Value: 35A19
  misc_feature: MA Experiment 20000480 PARAMETER Experiment Name: Zm_Drought_P Parameter: Timepoint (hr) Value: 72
  misc_feature: MA Experiment 20000480 PARAMETER Experiment Name: Zm_Drought_P Parameter: Tissue Value: Aerial
  misc_feature: MA Experiment 20000480 PARAMETER Experiment Name: Zm_Drought_P Parameter: Treatment Value: Drought vs. No Drought
  misc_feature: MA Experiment ID: 20000535 Result: Down-regulated in Transcription
  misc_feature: MA Experiment 20000535 PARAMETER Experiment Name: Zm_Hybrid_Seed_Dev_P Parameter: DAP Value: 30 vs. 12
  misc_feature: MA Experiment 20000535 PARAMETER Experiment Name: Zm_Hybrid_Seed_Dev_P Parameter: Organism Value: Zea mays
  misc_feature: MA Experiment 20000535 PARAMETER Experiment Name: Zm_Hybrid_Seed_Dev_P Parameter: Plant Line Value: 35A19
  misc_feature: MA Experiment 20000535 PARAMETER Experiment Name: Zm_Hybrid_Seed_Dev_P Parameter: Tissue Value: Embryo vs. Unfert Floret
aaactccaatccagcgttgagctcgacagctcgtgccaaactaggccgcagctggaaataccctccgctccacttacctgctgctggtgagcaccgcaagcaccaactcgcgcccaccgctccgctacaccagccgacgccatcatgtctaccgtcgccgccgcccccaccgtcgtgaaatcggctccggagctcgtcgcgccagtggggccaacacccggcggcaccctcccactgtcctccatcgacaagaccgcggcggtgcgtgtgtcggtggatttcatccaggtttttcccccggccgtaggagcaggcggggacaaagacgccgccgtggccgcgatgcgcgacggcttcgcgaaggcactggtgccgtactacccggtggccggccgcatcgcggacgccagccccggggagcccgtggtggagtgcaccgggcagggcgtctggttcgtggaggccgctgcgagctgcgcgctcgccgacgtcaactacctcgagcgccctctgctcatccccaaggaggagctcctcccgcgacctccccccgaggagaagctcgaggacctcgtcctcatggcacaggtgaccaagttcgcctgcggcgggttcgcggtcgggatctgcttcagccacctggtgttcgacgggcagggcgcggcgcagttcctcaaggcggccggcgagatggcgcgggggctgccggcgccgtcggttgcgccggtctgggaccgcgacgcgatcccggacccgcctaagctgccgcgcggccccccgccgtcgttcacggcgttcagcttcgtgacccaggtggtcgagatctcgccggagagcatcgcgcgcatcaaggacgacttcaaggacgcgacggggcagacctgctccaccttcgacgctgtcacggcggtggtgttcaagtgccgcgcgctggcgatggcgctccccgacgatgccgaggtccggctcggcttcgccgccagcacgcggcacctcctccacggcgtgctgccgtcggtggacggctactacggcaactgcgtgtaccccgtgggcatcacccggaccagcaaggcgatccgtgaggcgtcgcttccggaggtggtcggcgtgatgcgggaggccaaggaggcgcttaccacgcggttcacagactggatgcgcggcggcgccaaggacgaccactacaacgtgccgttggactacggcacggngacggtgtcggactggagccgcgtcgggttcaacgaggtggactacggcttcggtgaaccggggtacgtcttcacgctcaacgacgacgtcaacatcgtcgcgtcggtgatctacctcaaaccgcccgcgcccaagcgcggcatccggctcatgcttcgctgcgtcgaggaacctccacgctgcggcgttcgccgaggagctcgccaaattcgcgtagatggttgtttagtcttggtttatctatacttcattggtgtcggacactcggacctcatcttttacaatattatccatacttcattggtgtcaggcgctcattgattgtcatcggcattgttggatgtgcgggggacatgaaaaagctattacaagaacatttctggtatgcctaaaagtacacatattaaatcatgaccatttatct

SEQ ID NO: 16068 - protein, 463 aa, Zea mays subsp. mays
  peptide (1)..(463): Ceres Seq. ID no. 12391358
  misc_feature (8)..(415): Pfam Name: Transferase family Pfam Description: Transferase family
  misc_feature (9)..(408): Homolog of NCBI NO: 18034655 NR Description: 10-deacetylbaccatin III-10-O-acetyl transferase
  misc_feature (10)..(416): Homolog of NCBI NO: 28558088 NR Description: 3'-N-debenzoyl-2'-deoxytaxol N-benzoyltransferase
  misc_feature (10)..(414): Homolog of NCBI NO: 38347149 NR Description: OSJNBa0039G19.9 [Oryza sativa (japonica
  misc_feature (10)..(414): Homolog of NCBI NO: 38346537 NR Description: OSJNBa0040D17.12 [Oryza sativa (japonica
  misc_feature (156)..(414): Homolog of NCBI NO: 18558566 NR Description: putative 0-deacetylbaccatin III-10-O-acetyl
  misc_feature (17)..(414): Homolog of NCBI NO: 15228696 NR Description: putative protein; protein id: At3g62160.1
  misc_feature (4)..(417): Homolog of NCBI NO: 34906150 NR Description: putative 0-deacetylbaccatin III-10-O-acetyl
  misc_feature (10)..(412): Homolog of NCBI NO: 34906304 NR Description: unnamed protein product [Oryza sativa (japonica
  misc_feature (6)..(413): Homolog of NCBI NO: 34912654 NR Description: putative acetyl transferase
  misc_feature (1)..(415): Homolog of NCBI NO: 34912652 NR Description: putative acetyl transferase
  misc_feature (357)..(357): Xaa is any aa, unknown or other
MSTVAAAPTVVKSAPELVAPVGPTPGGTLPLSSIDKTAAVRVSVDFIQVFPPAVGAGGDKDAAVAAMRDGFAKALVPYYPVAGRIADASPGEPVVECTGQGVWFVEAAASCALADVNYLERPLLIPKEELLPRPPPEEKLEDLVLMAQVTKFACGGFAVGICFSHLVFDGQGAAQFLKAAGEMARGLPAPSVAPVWDRDAIPDPPKLPRGPPPSFTAFSFVTQVVEISPESIARIKDDFKDATGQTCSTFDAVTAVVFKCRALAMALPDDAEVRLGFAASTRHLLHGVLPSVDGYYGNCVYPVGITRTSKAIREASLPEVVGVMREAKEALTTRFTDWMRGGAKDDHYNVPLDYGTXTVSDWSRVGFNEVDYGFGEPGYVFTLNDDVNIVASVIYLKPPAPKRGIRLMLRCVEEPPRCGVRRGARQIRVDGCLVLVYLYFIGVGHSDLIFYNIIHTSLVSGAH

SEQ ID NO: 16069 - protein, 397 aa, Zea mays subsp. mays
  peptide (1)..(397): Ceres Seq. ID no. 12391359
  misc_feature (1)..(349): Pfam Name: Transferase family Pfam Description: Transferase family
  misc_feature (1)..(342): Homolog of NCBI NO: 18034655 NR Description: 10-deacetylbaccatin III-10-O-acetyl transferase
  misc_feature (1)..(350): Homolog of NCBI NO: 28558088 NR Description: 3'-N-debenzoyl-2'-deoxytaxol N-benzoyltransferase
  misc_feature (1)..(348): Homolog of NCBI NO: 38347149 NR Description: OSJNBa0039G19.9 [Oryza sativa (japonica
  misc_feature (1)..(348): Homolog of NCBI NO: 38346537 NR Description: OSJNBa0040D17.12 [Oryza sativa (japonica
  misc_feature (90)..(348): Homolog of NCBI NO: 18558566 NR Description: putative 0-deacetylbaccatin III-10-O-acetyl
  misc_feature (1)..(348): Homolog of NCBI NO: 15228696 NR Description: putative protein; protein id: At3g62160.1
  misc_feature (1)..(351): Homolog of NCBI NO: 34906150 NR Description: putative 0-deacetylbaccatin III-10-O-acetyl
  misc_feature (1)..(346): Homolog of NCBI NO: 34906304 NR Description: unnamed protein product [Oryza sativa (japonica
  misc_feature (1)..(347): Homolog of NCBI NO: 34912654 NR Description: putative acetyl transferase
  misc_feature (1)..(349): Homolog of NCBI NO: 34912652 NR Description: putative acetyl transferase
  misc_feature (291)..(291): Xaa is any aa, unknown or other
MRDGFAKALVPYYPVAGRIADASPGEPVVECTGQGVWFVEAAASCALADVNYLERPLLIPKEELLPRPPPEEKLEDLVLMAQVTKFACGGFAVGICFSHLVFDGQGAAQFLKAAGEMARGLPAPSVAPVWDRDAIPDPPKLPRGPPPSFTAFSFVTQVVEISPESIARIKDDFKDATGQTCSTFDAVTAVVFKCRALAMALPDDAEVRLGFAASTRHLLHGVLPSVDGYYGNCVYPVGITRTSKAIREASLPEVVGVMREAKEALTTRFTDWMRGGAKDDHYNVPLDYGTXTVSDWSRVGFNEVDYGFGEPGYVFTLNDDVNIVASVIYLKPPAPKRGIRLMLRCVEEPPRCGVRRGARQIRVDGCLVLVYLYFIGVGHSDLIFYNIIHTSLVSGAH

SEQ ID NO: 16070 - protein, 318 aa, Zea mays subsp. mays
  peptide (1)..(318): Ceres Seq. ID no. 12391360
  misc_feature (1)..(270): Pfam Name: Transferase family Pfam Description: Transferase family
  misc_feature (1)..(263): Homolog of NCBI NO: 18034655 NR Description: 10-deacetylbaccatin III-10-O-acetyl transferase
  misc_feature (1)..(271): Homolog of NCBI NO: 28558088 NR Description: 3'-N-debenzoyl-2'-deoxytaxol N-benzoyltransferase
  misc_feature (1)..(269): Homolog of NCBI NO: 38347149 NR Description: OSJNBa0039G19.9 [Oryza sativa (japonica
  misc_feature (1)..(269): Homolog of NCBI NO: 38346537 NR Description: OSJNBa0040D17.12 [Oryza sativa (japonica
  misc_feature (11)..(269): Homolog of NCBI NO: 18558566 NR Description: putative 0-deacetylbaccatin III-10-O-acetyl
  misc_feature (1)..(269): Homolog of NCBI NO: 15228696 NR Description: putative protein; protein id: At3g62160.1
  misc_feature (1)..(272): Homolog of NCBI NO: 34906150 NR Description: putative 0-deacetylbaccatin III-10-O-acetyl
  misc_feature (1)..(267): Homolog of NCBI NO: 34906304 NR Description: unnamed protein product [Oryza sativa (japonica
  misc_feature (1)..(268): Homolog of NCBI NO: 34912654 NR Description: putative acetyl transferase
  misc_feature (1)..(270): Homolog of NCBI NO: 34912652 NR Description: putative acetyl transferase
  misc_feature (212)..(212): Xaa is any aa, unknown or other
MAQVTKFACGGFAVGICFSHLVFDGQGAAQFLKAAGEMARGLPAPSVAPVWDRDAIPDPPKLPRGPPPSFTAFSFVTQVVEISPESIARIKDDFKDATGQTCSTFDAVTAVVFKCRALAMALPDDAEVRLGFAASTRHLLHGVLPSVDGYYGNCVYPVGITRTSKAIREASLPEVVGVMREAKEALTTRFTDWMRGGAKDDHYNVPLDYGTXTVSDWSRVGFNEVDYGFGEPGYVFTLNDDVNIVASVIYLKPPAPKRGIRLMLRCVEEPPRCGVRRGARQIRVDGCLVLVYLYFIGVGHSDLIFYNIIHTSLVSGAH

SEQ ID NO: 16071 - DNA, 2010 bp, Zea mays subsp. mays
  misc_feature (1)..(2010): Ceres Seq. ID no. 12367754
  misc_feature: MA Experiment ID: 108528 Result: Up-regulated in Transcription
  misc_feature: MA Experiment 108528 PARAMETER Experiment Name: Zm_Imbibed_Seeds_P Parameter: Age (day) Value: 5 vs. 2
  misc_feature: MA Experiment 108528 PARAMETER Experiment Name: Zm_Imbibed_Seeds_P Parameter: Organism Value: Zea mays
  misc_feature: MA Experiment 108528 PARAMETER Experiment Name: Zm_Imbibed_Seeds_P Parameter: Plant Line Value: 35A19
  misc_feature: MA Experiment 108528 PARAMETER Experiment Name: Zm_Imbibed_Seeds_P Parameter: Tissue Value: Aerial vs. Embryo
aaaaaagatctccactccagtatcccctccccgacttgcaacctctcctgaatcccaccgatcacgcgagctccccgccgcgatgtccgatcaccgagcgaagcggccgtccgacggcgcagccactgtggcatcgccggcggcgaagcgcgcccgcgacccgcccgcgccggcgttacccacgaacaaggaagctcccgacatggcccccaagacccgcatcttctgcgacatcctggcctcccgcgccgacgacgaggaactgaatgccgagctcgacaaggccgacatccgcgtaagcatcgctgacgtcgagcaggtgctccgcttctcctacgcgcacccgcgcgccgccgccgccttctttcgctggggcgggataccggtacctcggccacgagcactccccctactcgtggaacctcctcgtcgacatcctcggtaagaatcgtctcttcgagcccatgtgggacacagtcaaatctatgcagtcgcagcagctgctctcgctcgccactttcgcctccatattctcctccctggcggcgacccccggcggttccccgctcaaggcgttcatggacatgccccgctacggcatgacccgcgacacgccggcgctcaactcgctcctctccgcgctgtgtcgtgccaaccgcctcgacgacgctcgcgccgcgatcccagtagcccgcgccgaggctggcacgcgcccggatgccgactcctacgccatcctcctcgagggcagcgaggccgccgccgatctgcgggttgcgcgcgaggtgttcgacgaaatggtgcaggccattggattttatcctgacaacgtgcctgcctatgactccttcctcactacgcttgtttcaagtgactcctccacggcgctaccgggaagcaatggagtacctaaatgtcttgagcaggcacggctgttcgccaggagagaagttcttccgtgctgctcttgctgcacaccttgaggcacgacaattgcgcggagccatgaatctctgggatgactttgttgggcgtcgaggactcgtcccagatatggaaatgtacaacacaatgatcaagctgcagggcagtctcgggcatgctgagctgatagtgggttatctcgacgacatgatctccaatggagtcttccctgataccaacacatacaatgtggtcctccagcttttgttgaagggaaagaagcaccgagaggcagcggcaatatttagcgagatggtcaagaacgaatgttggccaaacgagggaaattgttcacttgcacttcgcatgtttttggatacacactattgggagactgggatcaaagtctggtgctgcatggtggagaatggcttgccacctttacaggagtgtgggaacatgcttgtagcaaagctgaaggatgacaggctacctgaggcatgcaaatatgcagaagacatgattgatcggggtatcaagttgagttcagcgacactgtccaagctgaagcagcgcctgcagaggattaagaaaggagagatccatgatcacctgcttgcaaaatggaaggcacattagtttgttgtgctcccctcgtatgggtaacctggtgcgatctcagtgttgacaatgaggttgagccttttatcactctgcaacgtttcaaacaacagttggaagtctctttctagtttctacattgaaattatcatattaatcagctggagcatttgggtctcaaggagtgagctggaacatcttccaagaaattctaccgtctgtatcaaatggctaagcctttttcaagaaagagtttgcccaggttatccatagagcatagaagaaatatttccttgaagaatgactagagcgtcagttgtggtctttttttaatatcttttgtgtcctttttttgtttcatgaattttgttgcttgcagctgtctggctgcaatttaggtagctgttccttttatgtatttgcataattatcaatgcaacattctaggcgtaaaagtgcattctc

SEQ ID NO: 16072 - protein, 281 aa, Zea mays subsp. mays
  peptide (1)..(281): Ceres Seq. ID no. 12367755
  misc_feature (57)..(258): Homolog of NCBI NO: 15242557 NR Description: putative protein; protein id: At5g02860.1
  misc_feature (61)..(270): Homolog of NCBI NO: 15237345 NR Description: salt-inducible protein-like; protein id:
  misc_feature (56)..(279): Homolog of NCBI NO: 15228767 NR Description: putative protein; protein id: At3g62470.1
  misc_feature (60)..(279): Homolog of NCBI NO: 11357982 NR Description: hypothetical protein T12C14.240 - Arabidopsis
  misc_feature (39)..(205): Homolog of NCBI NO: 15228825 NR Description: hypothetical protein; protein id: At3g22670.1
  misc_feature (58)..(269): Homolog of NCBI NO: 15228825 NR Description: hypothetical protein; protein id: At3g22670.1
  misc_feature (65)..(264): Homolog of NCBI NO: 21686921 NR Description: putative reverse transcriptase
  misc_feature (56)..(277): Homolog of NCBI NO: 15223927 NR Description: hypothetical protein; protein id: At1g71060.1
  misc_feature (57)..(270): Homolog of NCBI NO: 15223926 NR Description: hypothetical protein; protein id: At1g77360.1
  misc_feature (57)..(277): Homolog of NCBI NO: 14488357 NR Description: unknown protein [Oryza sativa (japonica
MPTPTPSSSRAARPPPICGLRARCSTKWCRPLDFILTTCLPMTPSSLRLFQVTPPRRYREAMEYLNVLSRHGCSPGEKFFRAALAAHLEARQLRGAMNLWDDFVGRRGLVPDMEMYNTMIKLQGSLGHAELIVGYLDDMISNGVFPDTNTYNVVLQLLLKGKKHREAAAIFSEMVKNECWPNEGNCSLALRMFLDTHYWETGIKVWCCMVENGLPPLQECGNMLVAKLKDDRLPEACKYAEDMIDRGIKLSSATLSKLKQRLQRIKKGEIHDHLLAKWKAH

SEQ ID NO: 16073 - protein, 240 aa, Zea mays subsp. mays
  peptide (1)..(240): Ceres Seq. ID no. 12367756
  misc_feature (16)..(229): Homolog of NCBI NO: 15223926 NR Description: hypothetical protein; protein id: At1g77360.1
  misc_feature (16)..(236): Homolog of NCBI NO: 14488357 NR Description: unknown protein [Oryza sativa (japonica
  misc_feature (16)..(217): Homolog of NCBI NO: 15242557 NR Description: putative protein; protein id: At5g02860.1
  misc_feature (20)..(229): Homolog of NCBI NO: 15237345 NR Description: salt-inducible protein-like; protein id:
  misc_feature (15)..(238): Homolog of NCBI NO: 15228767 NR Description: putative protein; protein id: At3g62470.1
  misc_feature (19)..(238): Homolog of NCBI NO: 11357982 NR Description: hypothetical protein T12C14.240 - Arabidopsis
  misc_feature (1)..(164): Homolog of NCBI NO: 15228825 NR Description: hypothetical protein; protein id: At3g22670.1
  misc_feature (17)..(228): Homolog of NCBI NO: 15228825 NR Description: hypothetical protein; protein id: At3g22670.1
  misc_feature (24)..(223): Homolog of NCBI NO: 21686921 NR Description: putative reverse transcriptase
  misc_feature (15)..(236): Homolog of NCBI NO: 15223927 NR Description: hypothetical protein; protein id: At1g71060.1
MTPSSLRLFQVTPPRRYREAMEYLNVLSRHGCSPGEKFFRAALAAHLEARQLRGAMNLWDDFVGRRGLVPDMEMYNTMIKLQGSLGHAELIVGYLDDMISNGVFPDTNTYNVVLQLLLKGKKHREAAAIFSEMVKNECWPNEGNCSLALRMFLDTHYWETGIKVWCCMVENGLPPLQECGNMLVAKLKDDRLPEACKYAEDMIDRGIKLSSATLSKLKQRLQRIKKGEIHDHLLAKWKAH

SEQ ID NO: 16074 - protein, 220 aa, Zea mays subsp. mays
  peptide (1)..(220): Ceres Seq. ID no. 12367757
  misc_feature (1)..(197): Homolog of NCBI NO: 15242557 NR Description: putative protein; protein id: At5g02860.1
  misc_feature (1)..(209): Homolog of NCBI NO: 15237345 NR Description: salt-inducible protein-like; protein id:
  misc_feature (1)..(218): Homolog of NCBI NO: 15228767 NR Description: putative protein; protein id: At3g62470.1
  misc_feature (1)..(218): Homolog of NCBI NO: 11357982 NR Description: hypothetical protein T12C14.240 - Arabidopsis
  misc_feature (1)..(144): Homolog of NCBI NO: 15228825 NR Description: hypothetical protein; protein id: At3g22670.1
  misc_feature (1)..(208): Homolog of NCBI NO: 15228825 NR Description: hypothetical protein; protein id: At3g22670.1
  misc_feature (4)..(203): Homolog of NCBI NO: 21686921 NR Description: putative reverse transcriptase
  misc_feature (1)..(216): Homolog of NCBI NO: 15223927 NR Description: hypothetical protein; protein id: At1g71060.1
  misc_feature (1)..(209): Homolog of NCBI NO: 15223926 NR Description: hypothetical protein; protein id: At1g77360.1
  misc_feature (1)..(216): Homolog of NCBI NO: 14488357 NR Description: unknown protein [Oryza sativa (japonica
MEYLNVLSRHGCSPGEKFFRAALAAHLEARQLRGAMNLWDDFVGRRGLVPDMEMYNTMIKLQGSLGHAELIVGYLDDMISNGVFPDTNTYNVVLQLLLKGKKHREAAAIFSEMVKNECWPNEGNCSLALRMFLDTHYWETGIKVWCCMVENGLPPLQECGNMLVAKLKDDRLPEACKYAEDMIDRGIKLSSATLSKLKQRLQRIKKGEIHDHLLAKWKAH

SEQ ID NO: 16075 - DNA, 1208 bp, Zea mays subsp. mays
  misc_feature (1)..(1208): Ceres Seq. ID no. 12373055
  misc_feature: MA Experiment ID: 108522 Result: Up-regulated in Transcription
  misc_feature: MA Experiment 108522 PARAMETER Experiment Name: Zm_42deg_Heat_P Parameter: Age (day) Value: 8
  misc_feature: MA Experiment 108522 PARAMETER Experiment Name: Zm_42deg_Heat_P Parameter: Organism Value: Zea mays
  misc_feature: MA Experiment 108522 PARAMETER Experiment Name: Zm_42deg_Heat_P Parameter: Plant Line Value: 35A19
  misc_feature: MA Experiment 108522 PARAMETER Experiment Name: Zm_42deg_Heat_P Parameter: Temperature (deg C) Value: 42 vs. 22
  misc_feature: MA Experiment 108522 PARAMETER Experiment Name: Zm_42deg_Heat_P Parameter: Timepoint (hr) Value: 1
  misc_feature: MA Experiment 108522 PARAMETER Experiment Name: Zm_42deg_Heat_P Parameter: Tissue Value: Aerial
  misc_feature: MA Experiment ID: 20000487 Result: Down-regulated in Transcription
  misc_feature: MA Experiment 20000487 PARAMETER Experiment Name: Zm_50mM_NH4NO3_L_to_H_P Parameter: Organism Value: Zea mays
  misc_feature: MA Experiment 20000487 PARAMETER Experiment Name: Zm_50mM_NH4NO3_L_to_H_P Parameter: Timepoint (hr) Value: 4
  misc_feature: MA Experiment 20000487 PARAMETER Experiment Name: Zm_50mM_NH4NO3_L_to_H_P Parameter: Tissue Value: Leaves
  misc_feature: MA Experiment 20000487 PARAMETER Experiment Name: Zm_50mM_NH4NO3_L_to_H_P Parameter: Treatment Value: 50mM NH4NO3 vs. 100mM Mannitol
atcagactaaacaagacctcggtcctcggcttgacctgttgctgttggccatacctcctctctcgcctccggtcagatcagattagcctccatggccgccgatcgccgcttcaagatctttgcagccgccgatggcttcggccagccactcaaggacgccgtcgtcgcttatctccgcgcccaccccgccgtcgccgaggtcgttgacctcggcgtcgacaagtactacgccgccgccgcagccgtcgcccgacacgtctcctctcccgactcggagcccgacgctcccgagttccgcggcgtggtcgtctgcggcaccggcgccggcgtctgcatcttcgccaacaagtacccgcgcgtctacgccacccactgcgcttcccccgccgacgccgtcaacacacgctccatcaacgcctgcaacgtcctcgctctctccggaatcgccacgcagcccgacgccgcggccgccatagccgattcctggctcgccacgcccttccgcgccccttgccccgcctccggcgacgcgccctggccggaggacatccaggggttcttcgacaccgcgccagacgagatggccgccatcccggaggcggagggtgccccggactcggtctgcgccatctgctgtctcaggaacgggatggagttcgagccggtggggattatgcctggcggcgagatgcggatcgtgcgggagagccccacctcggcgtacgtccgcttcaaggctggcagtgtggagccagcgcaccaccacacctttggccacgacctggtggtcatcaagggcaagaagaaggtttggaacctcaccaagaaggaaagctacgacctggtggacggagattttctcttcacacctgccggggatgtgcacagggtcaagtactttgaggacacagagttcttcatccgttgggatggccactgggacatctttctcgacgaggatctcgacactgcacgcagtgccattgacgcggagcttgcagctgccagcaagtgagatcatgccatctatgtgcagtgatggcaacgcttctgaaggtgttatgctcacatatcctcatttgggattgtgattgatggtcttgcttccataatgttagttattcgaactctgtgtatgatcctcatcgtcctgtcttgttattttgtggaattatggttattgacaacgatgatggtacaatttggtt

SEQ ID NO: 16076 - protein, 307 aa, Zea mays subsp. mays
  peptide (1)..(307): Ceres Seq. ID no. 12373056
  misc_feature (70)..(147): Pfam Name: Ribose/Galactose Isomerase Pfam Description: Ribose/Galactose Isomerase
  misc_feature (82)..(301): Homolog of NCBI NO: 1169199 NR Description: DNA-damage-repair/toleration protein DRT102
  misc_feature (1)..(301): Homolog of NCBI NO: 18397039 NR Description: DNA-damage-repair/toleration protein DRT102
  misc_feature (1)..(306): Homolog of NCBI NO: 34913680 NR Description: putative DNA-damage-repair/toleration protein
MAADRRFKIFAAADGFGQPLKDAVVAYLRAHPAVAEVVDLGVDKYYAAAAAVARHVSSPDSEPDAPEFRGVVVCGTGAGVCIFANKYPRVYATHCASPADAVNTRSINACNVLALSGIATQPDAAAAIADSWLATPFRAPCPASGDAPWPEDIQGFFDTAPDEMAAIPEAEGAPDSVCAICCLRNGMEFEPVGIMPGGEMRIVRESPTSAYVRFKAGSVEPAHHHTFGHDLVVIKGKKKVWNLTKKESYDLVDGDFLFTPAGDVHRVKYFEDTEFFIRWDGHWDIFLDEDLDTARSAIDAELAAASK

SEQ ID NO: 16077 - DNA, 1479 bp, Zea mays subsp. mays
  misc_feature (1)..(1479): Ceres Seq. ID no. 12369538
  misc_feature: MA Experiment ID: 108528 Result: Up-regulated in Transcription
  misc_feature: MA Experiment 108528 PARAMETER Experiment Name: Zm_Imbibed_Seeds_P Parameter: Age (day) Value: 5 vs. 2
  misc_feature: MA Experiment 108528 PARAMETER Experiment Name: Zm_Imbibed_Seeds_P Parameter: Organism Value: Zea mays
  misc_feature: MA Experiment 108528 PARAMETER Experiment Name: Zm_Imbibed_Seeds_P Parameter: Plant Line Value: 35A19
  misc_feature: MA Experiment 108528 PARAMETER Experiment Name: Zm_Imbibed_Seeds_P Parameter: Tissue Value: Aerial vs. Embryo
  misc_feature: MA Experiment ID: 108540 Result: Down-regulated in Transcription
  misc_feature: MA Experiment 108540 PARAMETER Experiment Name: Zm_20percent_PEG_P Parameter: Age (day) Value: 8
  misc_feature: MA Experiment 108540 PARAMETER Experiment Name: Zm_20percent_PEG_P Parameter: Organism Value: Zea mays
  misc_feature: MA Experiment 108540 PARAMETER Experiment Name: Zm_20percent_PEG_P Parameter: Plant Line Value: 35A19
  misc_feature: MA Experiment 108540 PARAMETER Experiment Name: Zm_20percent_PEG_P Parameter: Timepoint (hr) Value: 6
  misc_feature: MA Experiment 108540 PARAMETER Experiment Name: Zm_20percent_PEG_P Parameter: Tissue Value: Aerial
  misc_feature: MA Experiment 108540 PARAMETER Experiment Name: Zm_20percent_PEG_P Parameter: Treatment Value: 20percent PEG vs. No Treatment
  misc_feature: MA Experiment ID: 108547 Result: Up-regulated in Transcription
  misc_feature: MA Experiment 108547 PARAMETER Experiment Name: Zm_Imbibed_Seeds_P Parameter: Age (day) Value: 4 vs. 2
  misc_feature: MA Experiment 108547 PARAMETER Experiment Name: Zm_Imbibed_Seeds_P Parameter: Organism Value: Zea mays
  misc_feature: MA Experiment 108547 PARAMETER Experiment Name: Zm_Imbibed_Seeds_P Parameter: Plant Line Value: 35A19
  misc_feature: MA Experiment 108547 PARAMETER Experiment Name: Zm_Imbibed_Seeds_P Parameter: Tissue Value: Aerial vs. Embryo
  misc_feature: MA Experiment ID: 108556 Result: Down-regulated in Transcription
  misc_feature: MA Experiment 108556 PARAMETER Experiment Name: Zm_Drought_P Parameter: Age (day) Value: 9
  misc_feature: MA Experiment 108556 PARAMETER Experiment Name: Zm_Drought_P Parameter: Organism Value: Zea mays
  misc_feature: MA Experiment 108556 PARAMETER Experiment Name: Zm_Drought_P Parameter: Plant Line Value: 35A19
  misc_feature: MA Experiment 108556 PARAMETER Experiment Name: Zm_Drought_P Parameter: Timepoint (hr) Value: 24
  misc_feature: MA Experiment 108556 PARAMETER Experiment Name: Zm_Drought_P Parameter: Tissue Value: Aerial
  misc_feature: MA Experiment 108556 PARAMETER Experiment Name: Zm_Drought_P Parameter: Treatment Value: Drought vs. No Drought
  misc_feature: MA Experiment ID: 108597 Result: Down-regulated in Transcription
  misc_feature: MA Experiment 108597 PARAMETER Experiment Name: Zm_100uM_ABA_P Parameter: Age (day) Value: 9
  misc_feature: MA Experiment 108597 PARAMETER Experiment Name: Zm_100uM_ABA_P Parameter: Organism Value: Zea mays
  misc_feature: MA Experiment 108597 PARAMETER Experiment Name: Zm_100uM_ABA_P Parameter: Plant Line Value: 35A19
  misc_feature: MA Experiment 108597 PARAMETER Experiment Name: Zm_100uM_ABA_P Parameter: Timepoint (hr) Value: 24
  misc_feature: MA Experiment 108597 PARAMETER Experiment Name: Zm_100uM_ABA_P Parameter: Tissue Value: Aerial
  misc_feature: MA Experiment 108597 PARAMETER Experiment Name: Zm_100uM_ABA_P Parameter: Treatment Value: 100uM ABA vs. No Treatment
  misc_feature: MA Experiment ID: 108689 Result: Up-regulated in Transcription
  misc_feature: MA Experiment 108689 PARAMETER Experiment Name: Zm_Drought_Roots_P Parameter: Age (day) Value: 9
  misc_feature: MA Experiment 108689 PARAMETER Experiment Name: Zm_Drought_Roots_P Parameter: Organism Value: Zea mays
  misc_feature: MA Experiment 108689 PARAMETER Experiment Name: Zm_Drought_Roots_P Parameter: Plant Line Value: 35A19
  misc_feature: MA Experiment 108689 PARAMETER Experiment Name: Zm_Drought_Roots_P Parameter: Timepoint (hr) Value: 24
  misc_feature: MA Experiment 108689 PARAMETER Experiment Name: Zm_Drought_Roots_P Parameter: Tissue Value: Roots
  misc_feature: MA Experiment 108689 PARAMETER Experiment Name: Zm_Drought_Roots_P Parameter: Treatment Value: Drought vs. No Drought
  misc_feature: MA Experiment ID: 20000480 Result: Down-regulated in Transcription
  misc_feature: MA Experiment 20000480 PARAMETER Experiment Name: Zm_Drought_P Parameter: Age (day) Value: 11
  misc_feature: MA Experiment 20000480 PARAMETER Experiment Name: Zm_Drought_P Parameter: Organism Value: Zea mays
  misc_feature: MA Experiment 20000480 PARAMETER Experiment Name: Zm_Drought_P Parameter: Plant Line Value: 35A19
  misc_feature: MA Experiment 20000480 PARAMETER Experiment Name: Zm_Drought_P Parameter: Timepoint (hr) Value: 72
  misc_feature: MA Experiment 20000480 PARAMETER Experiment Name: Zm_Drought_P Parameter: Tissue Value: Aerial
  misc_feature: MA Experiment 20000480 PARAMETER Experiment Name: Zm_Drought_P Parameter: Treatment Value: Drought vs. No Drought
  misc_feature: MA Experiment ID: 20000535 Result: Up-regulated in Transcription
  misc_feature: MA Experiment 20000535 PARAMETER Experiment Name: Zm_Hybrid_Seed_Dev_P Parameter: DAP Value: 30 vs. 12
  misc_feature: MA Experiment 20000535 PARAMETER Experiment Name: Zm_Hybrid_Seed_Dev_P Parameter: Organism Value: Zea mays
  misc_feature: MA Experiment 20000535 PARAMETER Experiment Name: Zm_Hybrid_Seed_Dev_P Parameter: Plant Line Value: 35A19
  misc_feature: MA Experiment 20000535 PARAMETER Experiment Name: Zm_Hybrid_Seed_Dev_P Parameter: Tissue Value: Embryo vs. Unfert Floret
actttgaaatttgtccgtccatacgaactctacgactacgagcctactactctactactgcctacggaggagagagagagatttcatgagttcgtgttcagttagtcttggtgcaccagttccacccaccaccggatataggtcatgccccttataagctcgacacaggggcaggcacaccgcacagcaccgcaccgcactgcatcggtcgccagccgagccgagccgagccctgctctctcctccagctccccaaatcacactccgccatggccggcacgtgcgctcacgtcgagttcctccgcgcgcagccggcgtgggcgctggcgctggccgcggtgggcctgctcgtggccgtgcgcgccgccgcccgcttcgcgctctgggtctacgccgcgttcctccgcccgggcaagcccctgcgccgccgctacggcgcctgggccgtcgtgacgggcgccaccgacggcatcggccgcgccgtcgccttccgcctcgccgcgtccgggctcgggctcgtcctcgtcggccgcaaccaggagaagctggccgccgtcgccgccgagatcaaggccaggcaccccaaggtccccgaggtgcggactttcgtgctcgacttcgccggcgaggggctggccgccgccgtcgaggcgctcaaggactccatccggggcctcgacgtcggcgtgctcgtcaacaacgccggcgtgtcctacccgtacgcgcgctacttccacgaggtggacgaggagctgatgcgcaccctcatccgggtcaacgtcgagggcgtcacgcgtgtcacgcacgccgtgctgccggccatggtcgagaggaagcgcggcgccattgtcaacatcggctccggcgccgcctccgtcgtgccttctgatccgctctactccgtctacgccgctaccaaagcgtatgttgaccaattctcaagatgcctctatgttgagtacaagagcaagggtattgatgtgcaatgccaggtgcccttatacgtggcgacaaagatggcatccatcaggaagtcttccttcatggtcccatctgctgacacctatgctcgtgctgccgttcgtcacattggatacgagcctaggtgcacaccatactggccacactctgtcgtgtggttcttgatctccattcttcccgagtcccttatcgacagcgtgcgcctgggcatgtgcattaagatccgcaagaaggggctggccaaggacgccaagaagaaggcgctgtgattgatgtttcagaatgcatgttcagattcgcacatttcctcatcacctgtagtagacacgtgccttgctgtagtcactttattagctaccattacctcctgagtctgttaagaatcgagaatgtcattgttccatccgcggttatgatgatgaaaaatacgattcttcaattcaaaatgtaacactaatacgagtaatgatgcatgaaattaacttgaagaagttgtgc

SEQ ID NO: 16078 - protein, 326 aa, Zea mays subsp. mays
  peptide (1)..(326): Ceres Seq. ID no. 12369539
  misc_feature (1)..(318): Homolog of NCBI NO: 15221751 NR Description: putative b-keto acyl reductase; protein id:
  misc_feature (75)..(324): Homolog of NCBI NO: 2586125 NR Description: b-keto acyl reductase [Arabidopsis thaliana]
  misc_feature (99)..(326): Homolog of NCBI NO: 2586123 NR Description: b-keto acyl reductase [Allium porrum]
  misc_feature (33)..(324): Homolog of NCBI NO: 11072027 NR Description: F12A21.14 [Arabidopsis thaliana]
  misc_feature (10)..(324): Homolog of NCBI NO: 18408847 NR Description: Expressed protein
  misc_feature (10)..(324): Homolog of NCBI NO: 28565597 NR Description: putative 3-ketoacyl-CoA reductase 1 [Brassica
  misc_feature (10)..(324): Homolog of NCBI NO: 28565601 NR Description: putative 3-ketoacyl-CoA reductase 2 [Brassica
  misc_feature (8)..(324): Homolog of NCBI NO: 38345332 NR Description: OSJNBa0081L15.5 [Oryza sativa (japonica
  misc_feature (1)..(325): Homolog of NCBI NO: 7489413 NR Description: probable b-keto acyl reductase (EC 1.1.-.-) -
  misc_feature (1)..(326): Homolog of NCBI NO: 7489808 NR Description: probable beta-keto acyl reductase - maize
MAGTCAHVEFLRAQPAWALALAAVGLLVAVRAAARFALWVYAAFLRPGKPLRRRYGAWAVVTGATDGIGRAVAFRLAASGLGLVLVGRNQEKLAAVAAEIKARHPKVPEVRTFVLDFAGEGLAAAVEALKDSIRGLDVGVLVNNAGVSYPYARYFHEVDEELMRTLIRVNVEGVTRVTHAVLPAMVERKRGAIVNIGSGAASVVPSDPLYSVYAATKAYVDQFSRCLYVEYKSKGIDVQCQVPLYVATKMASIRKSSFMVPSADTYARAAVRHIGYEPRCTPYWPHSVVWFLISILPESLIDSVRLGMCIKIRKKGLAKDAKKKAL

SEQ ID NO: 16079 - protein, 164 aa, Zea mays subsp. mays
  peptide (1)..(164): Ceres Seq. ID no. 12369540
  misc_feature (1)..(156): Homolog of NCBI NO: 15221751 NR Description: putative b-keto acyl reductase; protein id:
  misc_feature (1)..(162): Homolog of NCBI NO: 2586125 NR Description: b-keto acyl reductase [Arabidopsis thaliana]
  misc_feature (1)..(164): Homolog of NCBI NO: 2586123 NR Description: b-keto acyl reductase [Allium porrum]
  misc_feature (1)..(162): Homolog of NCBI NO: 11072027 NR Description: F12A21.14 [Arabidopsis thaliana]
  misc_feature (1)..(162): Homolog of NCBI NO: 18408847 NR Description: Expressed protein
  misc_feature (1)..(162): Homolog of NCBI NO: 28565597 NR Description: putative 3-ketoacyl-CoA reductase 1 [Brassica
  misc_feature (1)..(162): Homolog of NCBI NO: 28565601 NR Description: putative 3-ketoacyl-CoA reductase 2 [Brassica
  misc_feature (1)..(162): Homolog of NCBI NO: 38345332 NR Description: OSJNBa0081L15.5 [Oryza sativa (japonica
  misc_feature (1)..(163): Homolog of NCBI NO: 7489413 NR Description: probable b-keto acyl reductase (EC 1.1.-.-) -
  misc_feature (1)..(164): Homolog of NCBI NO: 7489808 NR Description: probable beta-keto acyl reductase - maize
MRTLIRVNVEGVTRVTHAVLPAMVERKRGAIVNIGSGAASVVPSDPLYSVYAATKAYVDQFSRCLYVEYKSKGIDVQCQVPLYVATKMASIRKSSFMVPSADTYARAAVRHIGYEPRCTPYWPHSVVWFLISILPESLIDSVRLGMCIKIRKKGLAKDAKKKAL

SEQ ID NO: 16080 - DNA, 1548 bp, Zea mays subsp. mays
  misc_feature (1)..(1548): Ceres Seq. ID no. 12353157
  misc_feature: MA Experiment ID: 108515 Result: Up-regulated in Transcription
  misc_feature: MA Experiment 108515 PARAMETER Experiment Name: Zm_2mM_SA_P Parameter: Age (day) Value: 8
  misc_feature: MA Experiment 108515 PARAMETER Experiment Name: Zm_2mM_SA_P Parameter: Organism Value: Zea mays
  misc_feature: MA Experiment 108515 PARAMETER Experiment Name: Zm_2mM_SA_P Parameter: Plant Line Value: 35A19
  misc_feature: MA Experiment 108515 PARAMETER Experiment Name: Zm_2mM_SA_P Parameter: Timepoint (hr) Value: 12
  misc_feature: MA Experiment 108515 PARAMETER Experiment Name: Zm_2mM_SA_P Parameter: Tissue Value: Aerial
  misc_feature: MA Experiment 108515 PARAMETER Experiment Name: Zm_2mM_SA_P Parameter: Treatment Value: 2mM SA vs. No Treatment
  misc_feature: MA Experiment ID: 108522 Result: Up-regulated in Transcription
  misc_feature: MA Experiment 108522 PARAMETER Experiment Name: Zm_42deg_Heat_P Parameter: Age (day) Value: 8
  misc_feature: MA Experiment 108522 PARAMETER Experiment Name: Zm_42deg_Heat_P Parameter: Organism Value: Zea mays
  misc_feature: MA Experiment 108522 PARAMETER Experiment Name: Zm_42deg_Heat_P Parameter: Plant Line Value: 35A19
  misc_feature: MA Experiment 108522 PARAMETER Experiment Name: Zm_42deg_Heat_P Parameter: Temperature (deg C) Value: 42 vs. 22
  misc_feature: MA Experiment 108522 PARAMETER Experiment Name: Zm_42deg_Heat_P Parameter: Timepoint (hr) Value: 1
  misc_feature: MA Experiment 108522 PARAMETER Experiment Name: Zm_42deg_Heat_P Parameter: Tissue Value: Aerial
  misc_feature: MA Experiment ID: 108527 Result: Up-regulated in Transcription
  misc_feature: MA Experiment 108527 PARAMETER Experiment Name: Zm_5mM_NO_P Parameter: Age (day) Value: 8
  misc_feature: MA Experiment 108527 PARAMETER Experiment Name: Zm_5mM_NO_P Parameter: Organism Value: Zea mays
  misc_feature: MA Experiment 108527 PARAMETER Experiment Name: Zm_5mM_NO_P Parameter: Plant Line Value: 35A19
  misc_feature: MA Experiment 108527 PARAMETER Experiment Name: Zm_5mM_NO_P Parameter: Timepoint (hr) Value: 6
  misc_feature: MA Experiment 108527 PARAMETER Experiment Name: Zm_5mM_NO_P Parameter: Tissue Value: Aerial
  misc_feature: MA Experiment 108527 PARAMETER Experiment Name: Zm_5mM_NO_P Parameter: Treatment Value: 5mM NO vs. No Treatment
  misc_feature: MA Experiment ID: 108535 Result: Down-regulated in Transcription
  misc_feature: MA Experiment 108535 PARAMETER Experiment Name: Zm_Meristem_P Parameter: Age (day) Value: 8
  misc_feature: MA Experiment 108535 PARAMETER Experiment Name: Zm_Meristem_P Parameter: Organism Value: Zea mays
  misc_feature: MA Experiment 108535 PARAMETER Experiment Name: Zm_Meristem_P Parameter: Plant Line Value: 35A19
  misc_feature: MA Experiment 108535 PARAMETER Experiment Name: Zm_Meristem_P Parameter: Tissue Value: Root Meristem vs. Above Root Meristem
  misc_feature: MA Experiment ID: 108689 Result: Up-regulated in Transcription
  misc_feature: MA Experiment 108689 PARAMETER Experiment Name: Zm_Drought_Roots_P Parameter: Age (day) Value: 9
  misc_feature: MA Experiment 108689 PARAMETER Experiment Name: Zm_Drought_Roots_P Parameter: Organism Value: Zea mays
  misc_feature: MA Experiment 108689 PARAMETER Experiment Name: Zm_Drought_Roots_P Parameter: Plant Line Value: 35A19
  misc_feature: MA Experiment 108689 PARAMETER Experiment Name: Zm_Drought_Roots_P Parameter: Timepoint (hr) Value: 24
  misc_feature: MA Experiment 108689 PARAMETER Experiment Name: Zm_Drought_Roots_P Parameter: Tissue Value: Roots
  misc_feature: MA Experiment 108689 PARAMETER Experiment Name: Zm_Drought_Roots_P Parameter: Treatment Value: Drought vs. No Drought
  misc_feature: MA Experiment ID: 20000477 Result: Up-regulated in Transcription
  misc_feature: MA Experiment 20000477 PARAMETER Experiment Name: Zm_5mM_SA_P Parameter: Age (day) Value: 10
  misc_feature: MA Experiment 20000477 PARAMETER Experiment Name: Zm_5mM_SA_P Parameter: Organism Value: Zea mays
  misc_feature: MA Experiment 20000477 PARAMETER Experiment Name: Zm_5mM_SA_P Parameter: Plant Line Value: 35A19
  misc_feature: MA Experiment 20000477 PARAMETER Experiment Name: Zm_5mM_SA_P Parameter: Timepoint (hr) Value: 48
  misc_feature: MA Experiment 20000477 PARAMETER Experiment Name: Zm_5mM_SA_P Parameter: Tissue Value: Aerial
  misc_feature: MA Experiment 20000477 PARAMETER Experiment Name: Zm_5mM_SA_P Parameter: Treatment Value: 5mM SA vs. No Treatment
  misc_feature: MA Experiment ID: 20000478 Result: Up-regulated in Transcription
  misc_feature: MA Experiment 20000478 PARAMETER Experiment Name: Zm_5mM_SA_P Parameter: Age (day) Value: 11
  misc_feature: MA Experiment 20000478 PARAMETER Experiment Name: Zm_5mM_SA_P Parameter: Organism Value: Zea mays
  misc_feature: MA Experiment 20000478 PARAMETER Experiment Name: Zm_5mM_SA_P Parameter: Plant Line Value: 35A19
  misc_feature: MA Experiment 20000478 PARAMETER Experiment Name: Zm_5mM_SA_P Parameter: Timepoint (hr) Value: 72
  misc_feature: MA Experiment 20000478 PARAMETER Experiment Name: Zm_5mM_SA_P Parameter: Tissue Value: Aerial
  misc_feature: MA Experiment 20000478 PARAMETER Experiment Name: Zm_5mM_SA_P Parameter: Treatment Value: 5mM SA vs. No Treatment
  misc_feature: MA Experiment ID: 20000479 Result: Up-regulated in Transcription
  misc_feature: MA Experiment 20000479 PARAMETER Experiment Name: Zm_Drought_P Parameter: Age (day) Value: 10
  misc_feature: MA Experiment 20000479 PARAMETER Experiment Name: Zm_Drought_P Parameter: Organism Value: Zea mays
  misc_feature: MA Experiment 20000479 PARAMETER Experiment Name: Zm_Drought_P Parameter: Plant Line Value: 35A19
  misc_feature: MA Experiment 20000479 PARAMETER Experiment Name: Zm_Drought_P Parameter: Timepoint (hr) Value: 48
  misc_feature: MA Experiment 20000479 PARAMETER Experiment Name: Zm_Drought_P Parameter: Tissue Value: Aerial
  misc_feature: MA Experiment 20000479 PARAMETER Experiment Name: Zm_Drought_P Parameter: Treatment Value: Drought vs. No Drought
  misc_feature: MA Experiment ID: 20000480 Result: Up-regulated in Transcription
  misc_feature: MA Experiment 20000480 PARAMETER Experiment Name: Zm_Drought_P Parameter: Age (day) Value: 11
  misc_feature: MA Experiment 20000480 PARAMETER Experiment Name: Zm_Drought_P Parameter: Organism Value: Zea mays
  misc_feature: MA Experiment 20000480 PARAMETER Experiment Name: Zm_Drought_P Parameter: Plant Line Value: 35A19
  misc_feature: MA Experiment 20000480 PARAMETER Experiment Name: Zm_Drought_P Parameter: Timepoint (hr) Value: 72
  misc_feature: MA Experiment 20000480 PARAMETER Experiment Name: Zm_Drought_P Parameter: Tissue Value: Aerial
  misc_feature: MA Experiment 20000480 PARAMETER Experiment Name: Zm_Drought_P Parameter: Treatment Value: Drought vs. No Drought
  misc_feature: MA Experiment ID: 20000492 Result: Down-regulated in Transcription
  misc_feature: MA Experiment 20000492 PARAMETER Experiment Name: Zm_Hybrid_Seed_Dev_P Parameter: DAP Value: 12
  misc_feature: MA Experiment 20000492 PARAMETER Experiment Name: Zm_Hybrid_Seed_Dev_P Parameter: Organism Value: Zea mays
  misc_feature: MA Experiment 20000492 PARAMETER Experiment Name: Zm_Hybrid_Seed_Dev_P Parameter: Plant Line Value: 35A19
  misc_feature: MA Experiment 20000492 PARAMETER Experiment Name: Zm_Hybrid_Seed_Dev_P Parameter: Tissue Value: Fert Kernel vs. Unfert Floret
  misc_feature: MA Experiment ID: 20000533 Result: Up-regulated in Transcription
  misc_feature: MA Experiment 20000533 PARAMETER Experiment Name: Zm_0.001percent_MeJA_P Parameter: Age (day) Value: 11
  misc_feature: MA Experiment 20000533 PARAMETER Experiment Name: Zm_0.001percent_MeJA_P Parameter: Organism Value: Zea mays
  misc_feature: MA Experiment 20000533 PARAMETER Experiment Name: Zm_0.001percent_MeJA_P Parameter: Plant Line Value: 35A19
  misc_feature: MA Experiment 20000533 PARAMETER Experiment Name: Zm_0.001percent_MeJA_P Parameter: Timepoint (hr) Value: 72
  misc_feature: MA Experiment 20000533 PARAMETER Experiment Name: Zm_0.001percent_MeJA_P Parameter: Tissue Value: Aerial
  misc_feature: MA Experiment 20000533 PARAMETER Experiment Name: Zm_0.001percent_MeJA_P Parameter: Treatment Value: 0.001percent MeJA vs. No Treatment
  misc_feature: MA Experiment ID: 20000626 Result: Up-regulated in Transcription
  misc_feature: MA Experiment 20000626 PARAMETER Experiment Name: Zm_Herbicide-Treatments_P Parameter: Timepoint (hr) Value: 12
  misc_feature: MA Experiment 20000626 PARAMETER Experiment Name: Zm_Herbicide-Treatments_P Parameter: Tissue Value: Aerial
  misc_feature: MA Experiment 20000626 PARAMETER Experiment Name: Zm_Herbicide-Treatments_P Parameter: Treatment Value: Roundup vs. No Treatment
  misc_feature: MA Experiment ID: 20000630 Result: Up-regulated in Transcription
  misc_feature: MA Experiment 20000630 PARAMETER Experiment Name: Zm_Herbicide-Treatments_P Parameter: Timepoint (hr) Value: 4
  misc_feature: MA Experiment 20000630 PARAMETER Experiment Name: Zm_Herbicide-Treatments_P Parameter: Tissue Value: Aerial
  misc_feature: MA Experiment 20000630 PARAMETER Experiment Name: Zm_Herbicide-Treatments_P Parameter: Treatment Value: Roundup vs. No Treatment
cttcggccacacaacccaggtgttcgaccatgtcctcgccggcaccatcatcgccctccaggtccagccacggctcacgaggctccccgcgcatcgtcctcttcccgagcgctggcatgggccacctggtcccgttcacccgcctcgccgtcgcgctttcccggccacggttgcgagatctccctcctgacggcgctgcccacagtttcgtccgcggagtcccgccacatcgccgcgctctacgctgcgttccccgccatccggcagctggacctccgctttgcccctttcgacgcgtcgtccgaattccccggcgccgatccattctacctccgctacgaggccctgcgccgctgcgcgccctcgctcctcggcccgctcctcgctggcgcaggcgcgtcggctctcgtcgtggacatggcgctggcctccgtggccatacccgtagccagggagctccacgtcccgtgcttcgtcttcttcaccgcgtcggccacgatgctctcattcaaagcctactttcccacctacctcgacgacgtcggtgccggacatggcgttggcgacgttgacgtgcccggcgtgtaccgcatcccaagttcgtccgtcccacaggcgctgcatgatcccgacaacatcttcacccggcagttcgtcgcgaatggacgggcgctcgcgacagccgacggcctcctggtcaacgccttccacgccatggagccggaggccgtcgaggcactacagggtcgcttcgtgctctccgttttgccgcccgtgttcgccgtggggccgcttatgccggtgaacgacctccgggagacaggggaggcagcgcaaaaacaggggaactatagggcgtggctggacgagcagccgccgcggtctgtggtgtatgtcagctttggcagccgcaaggctctccccaaggaccagatcaaggagctcgccgccggactggaagcgtgtggccaccgcttcttgtgggttgtgaagggcgctgtcgtggacagggatgacgctggggagctcagcgaactgcttggcgaggccttcctgcggcgcgtgcaaggccgtggcctggtgaccaagtcatgggtcgagcaagaggaggtgctcaggcacccggccgtggcgctgttcgtcagccactgcggatggaactcggtgacggaggcagtgagcagcggcgtgccagtgctggcgtggccgaggttcgccgaccagcgagtgaacgcccgcgtggtggtccgttgcgggctcggtgtgtgggctgagcagtggagctgggagggggaagaggcgctggtgagagcggaggagatcgcagcgctggtgatggaggctatgggagacgacgcgatggcagtgaaagcggcgaacgtccgcgaggctgcgtcgagagccgtggtggacggcggcacgagctaccgatgcctggcggcgttcgtgcgtcgttgcaccgcgtgattgcgtgaagttatataaaaaaaaaacttatataacttcacgttcgtgtcgatccgcttcataaacttttaaaatgtgcct

SEQ ID NO: 16081 - protein, 488 aa, Zea mays subsp. mays
  peptide (1)..(488): Ceres Seq. ID no. 12353158
  misc_feature (52)..(483): Pfam Name: UDP-glucoronosyl and UDP-glucosyl transferase Pfam Description: UDP-glucoronosyl and UDP-glucosyl transferase
  misc_feature (51)..(484): Homolog of NCBI NO: 21593785 NR Description: putative glucosyltransferase [Arabidopsis
  misc_feature (51)..(484): Homolog of NCBI NO: 18401158 NR Description: putative glucosyltransferase
  misc_feature (53)..(483): Homolog of NCBI NO: 34910204 NR Description: putative flavonol glucosyltransferase
  misc_feature (55)..(479): Homolog of NCBI NO: 34394680 NR Description: putative glucosyltransferase
  misc_feature (57)..(483): Homolog of NCBI NO: 34910222 NR Description: putative flavonol glucosyltransferase
  misc_feature (29)..(479): Homolog of NCBI NO: 34394676 NR Description: putative glucosyltransferase
  misc_feature (53)..(485): Homolog of NCBI NO: 34910228 NR Description: putative flavonol glucosyltransferase
  misc_feature (56)..(485): Homolog of NCBI NO: 34908644 NR Description: putative flavonol 3-O-glucosyltransferase
  misc_feature (53)..(483): Homolog of NCBI NO: 22535568 NR Description: putative glucosyltransferase
  misc_feature (52)..(483): Homolog of NCBI NO: 34910218 NR Description: putative flavonol glucosyltransferase
LRPHNPGVRPCPRRHHHRPPGPATAHEAPRASSSSRALAWATWSRSPASPSRFPGHGCEISLLTALPTVSSAESRHIAALYAAFPAIRQLDLRFAPFDASSEFPGADPFYLRYEALRRCAPSLLGPLLAGAGASALVVDMALASVAIPVARELHVPCFVFFTASATMLSFKAYFPTYLDDVGAGHGVGDVDVPGVYRIPSSSVPQALHDPDNIFTRQFVANGRALATADGLLVNAFHAMEPEAVEALQGRFVLSVLPPVFAVGPLMPVNDLRETGEAAQKQGNYRAWLDEQPPRSVVYVSFGSRKALPKDQIKELAAGLEACGHRFLWVVKGAVVDRDDAGELSELLGEAFLRRVQGRGLVTKSWVEQEEVLRHPAVALFVSHCGWNSVTEAVSSGVPVLAWPRFADQRVNARVVVRCGLGVWAEQWSWEGEEALVRAEEIAALVMEAMGDDAMAVKAANVREAASRAVVDGGTSYRCLAAFVRRCTA

SEQ ID NO: 16082 - protein, 349 aa, Zea mays subsp. mays
  peptide (1)..(349): Ceres Seq. ID no. 12353159
  misc_feature (1)..(344): Pfam Name: UDP-glucoronosyl and UDP-glucosyl transferase Pfam Description: UDP-glucoronosyl and UDP-glucosyl transferase
  misc_feature (1)..(345): Homolog of NCBI NO: 21593785 NR Description: putative glucosyltransferase [Arabidopsis
  misc_feature (1)..(345): Homolog of NCBI NO: 18401158 NR Description: putative glucosyltransferase
  misc_feature (1)..(344): Homolog of NCBI NO: 34910204 NR Description: putative flavonol glucosyltransferase
  misc_feature (1)..(340): Homolog of NCBI NO: 34394680 NR Description: putative glucosyltransferase
  misc_feature (1)..(344): Homolog of NCBI NO: 34910222 NR Description: putative flavonol glucosyltransferase
  misc_feature (1)..(340): Homolog of NCBI NO: 34394676 NR Description: putative glucosyltransferase
  misc_feature (1)..(346): Homolog of NCBI NO: 34910228 NR Description: putative flavonol glucosyltransferase
  misc_feature (1)..(346): Homolog of NCBI NO: 34908644 NR Description: putative flavonol 3-O-glucosyltransferase
  misc_feature (1)..(344): Homolog of NCBI NO: 22535568 NR Description: putative glucosyltransferase
  misc_feature (1)..(344): Homolog of NCBI NO: 34910218 NR Description: putative flavonol glucosyltransferase
MALASVAIPVARELHVPCFVFFTASATMLSFKAYFPTYLDDVGAGHGVGDVDVPGVYRIPSSSVPQALHDPDNIFTRQFVANGRALATADGLLVNAFHAMEPEAVEALQGRFVLSVLPPVFAVGPLMPVNDLRETGEAAQKQGNYRAWLDEQPPRSVVYVSFGSRKALPKDQIKELAAGLEACGHRFLWVVKGAVVDRDDAGELSELLGEAFLRRVQGRGLVTKSWVEQEEVLRHPAVALFVSHCGWNSVTEAVSSGVPVLAWPRFADQRVNARVVVRCGLGVWAEQWSWEGEEALVRAEEIAALVMEAMGDDAMAVKAANVREAASRAVVDGGTSYRCLAAFVRRCTA

SEQ ID NO: 16083 - protein, 322 aa, Zea mays subsp. mays
  peptide (1)..(322): Ceres Seq. ID no. 12353160
  misc_feature (1)..(317): Pfam Name: UDP-glucoronosyl and UDP-glucosyl transferase Pfam Description: UDP-glucoronosyl and UDP-glucosyl transferase
  misc_feature (1)..(318): Homolog of NCBI NO: 21593785 NR Description: putative glucosyltransferase [Arabidopsis
  misc_feature (1)..(318): Homolog of NCBI NO: 18401158 NR Description: putative glucosyltransferase
  misc_feature (1)..(317): Homolog of NCBI NO: 34910204 NR Description: putative flavonol glucosyltransferase
  misc_feature (1)..(313): Homolog of NCBI NO: 34394680 NR Description: putative glucosyltransferase
  misc_feature (1)..(317): Homolog of NCBI NO: 34910222 NR Description: putative flavonol glucosyltransferase
  misc_feature (1)..(313): Homolog of NCBI NO: 34394676 NR Description: putative glucosyltransferase
  misc_feature (1)..(319): Homolog of NCBI NO: 34910228 NR Description: putative flavonol glucosyltransferase
  misc_feature (1)..(319): Homolog of NCBI NO: 34908644 NR Description: putative flavonol 3-O-glucosyltransferase
  misc_feature (1)..(317): Homolog of NCBI NO: 22535568 NR Description: putative glucosyltransferase
  misc_feature (1)..(317): Homolog of NCBI NO: 34910218 NR Description: putative flavonol glucosyltransferase
MLSFKAYFPTYLDDVGAGHGVGDVDVPGVYRIPSSSVPQALHDPDNIFTRQFVANGRALATADGLLVNAFHAMEPEAVEALQGRFVLSVLPPVFAVGPLMPVNDLRETGEAAQKQGNYRAWLDEQPPRSVVYVSFGSRKALPKDQIKELAAGLEACGHRFLWVVKGAVVDRDDAGELSELLGEAFLRRVQGRGLVTKSWVEQEEVLRHPAVALFVSHCGWNSVTEAVSSGVPVLAWPRFADQRVNARVVVRCGLGVWAEQWSWEGEEALVRAEEIAALVMEAMGDDAMAVKAANVREAASRAVVDGGTSYRCLAAFVRRCTA

SEQ ID NO: 16084 - DNA, 1993 bp, Zea mays subsp. mays
  misc_feature (1)..(1993): Ceres Seq. ID no. 13492718
  misc_feature: MA Experiment ID: 108533 Result: Up-regulated in Transcription
  misc_feature: MA Experiment 108533 PARAMETER Experiment Name: Zm_4deg_Cold_P Parameter: Age (hr) Value: 8
  misc_feature: MA Experiment 108533 PARAMETER Experiment Name: Zm_4deg_Cold_P Parameter: Organism Value: Zea mays
  misc_feature: MA Experiment 108533 PARAMETER Experiment Name: Zm_4deg_Cold_P Parameter: Plant Line Value: 35A19
  misc_feature: MA Experiment 108533 PARAMETER Experiment Name: Zm_4deg_Cold_P Parameter: Temperature (deg C) Value: 4 vs. 22
  misc_feature: MA Experiment 108533 PARAMETER Experiment Name: Zm_4deg_Cold_P Parameter: Timepoint (hr) Value: 1
  misc_feature: MA Experiment 108533 PARAMETER Experiment Name: Zm_4deg_Cold_P Parameter: Tissue Value: Aerial
  misc_feature: MA Experiment ID: 108543 Result: Up-regulated in Transcription
  misc_feature: MA Experiment ID: 108544 Result: Down-regulated in Transcription
  misc_feature: MA Experiment ID: 108689 Result: Down-regulated in Transcription
  misc_feature: MA Experiment 108689 PARAMETER Experiment Name: Zm_Drought_Roots_P Parameter: Age (day) Value: 9
  misc_feature: MA Experiment 108689 PARAMETER Experiment Name: Zm_Drought_Roots_P Parameter: Organism Value: Zea mays
  misc_feature: MA Experiment 108689 PARAMETER Experiment Name: Zm_Drought_Roots_P Parameter: Plant Line Value: 35A19
  misc_feature: MA Experiment 108689 PARAMETER Experiment Name: Zm_Drought_Roots_P Parameter: Timepoint (hr) Value: 24
  misc_feature: MA Experiment 108689 PARAMETER Experiment Name: Zm_Drought_Roots_P Parameter: Tissue Value: Roots
  misc_feature: MA Experiment 108689 PARAMETER Experiment Name: Zm_Drought_Roots_P Parameter: Treatment Value: Drought vs. No Drought
  misc_feature: MA Experiment ID: 20000478 Result: Down-regulated in Transcription
  misc_feature: MA Experiment 20000478 PARAMETER Experiment Name: Zm_5mM_SA_P Parameter: Age (day) Value: 11
  misc_feature: MA Experiment 20000478 PARAMETER Experiment Name: Zm_5mM_SA_P Parameter: Organism Value: Zea mays
  misc_feature: MA Experiment 20000478 PARAMETER Experiment Name: Zm_5mM_SA_P Parameter: Plant Line Value: 35A19
  misc_feature: MA Experiment 20000478 PARAMETER Experiment Name: Zm_5mM_SA_P Parameter: Timepoint (hr) Value: 72
  misc_feature: MA Experiment 20000478 PARAMETER Experiment Name: Zm_5mM_SA_P Parameter: Tissue Value: Aerial
  misc_feature: MA Experiment 20000478 PARAMETER Experiment Name: Zm_5mM_SA_P Parameter: Treatment Value: 5mM SA vs. No Treatment
  misc_feature: MA Experiment ID: 20000479 Result: Down-regulated in Transcription
  misc_feature: MA Experiment 20000479 PARAMETER Experiment Name: Zm_Drought_P Parameter: Age (day) Value: 10
  misc_feature: MA Experiment 20000479 PARAMETER Experiment Name: Zm_Drought_P Parameter: Organism Value: Zea mays
  misc_feature: MA Experiment 20000479 PARAMETER Experiment Name: Zm_Drought_P Parameter: Plant Line Value: 35A19
  misc_feature: MA Experiment 20000479 PARAMETER Experiment Name: Zm_Drought_P Parameter: Timepoint (hr) Value: 48
  misc_feature: MA Experiment 20000479 PARAMETER Experiment Name: Zm_Drought_P Parameter: Tissue Value: Aerial
  misc_feature: MA Experiment 20000479 PARAMETER Experiment Name: Zm_Drought_P Parameter: Treatment Value: Drought vs. No Drought
  misc_feature: MA Experiment ID: 20000480 Result: Down-regulated in Transcription
  misc_feature: MA Experiment 20000480 PARAMETER Experiment Name: Zm_Drought_P Parameter: Age (day) Value: 11
  misc_feature: MA Experiment 20000480 PARAMETER Experiment Name: Zm_Drought_P Parameter: Organism Value: Zea mays
  misc_feature: MA Experiment 20000480 PARAMETER Experiment Name: Zm_Drought_P Parameter: Plant Line Value: 35A19
  misc_feature: MA Experiment 20000480 PARAMETER Experiment Name: Zm_Drought_P Parameter: Timepoint (hr) Value: 72
  misc_feature: MA Experiment 20000480 PARAMETER Experiment Name: Zm_Drought_P Parameter: Tissue Value: Aerial
  misc_feature: MA Experiment 20000480 PARAMETER Experiment Name: Zm_Drought_P Parameter: Treatment Value: Drought vs. No Drought
  misc_feature: MA Experiment ID: 20000626 Result: Down-regulated in Transcription
  misc_feature: MA Experiment 20000626 PARAMETER Experiment Name: Zm_Herbicide-Treatments_P Parameter: Timepoint (hr) Value: 12
  misc_feature: MA Experiment 20000626 PARAMETER Experiment Name: Zm_Herbicide-Treatments_P Parameter: Tissue Value: Aerial
  misc_feature: MA Experiment 20000626 PARAMETER Experiment Name: Zm_Herbicide-Treatments_P Parameter: Treatment Value: Roundup vs. No Treatment
agtgcgcgcctcgtgctcgtgctcccccgagcagactagaccagcgcgctagcgccagcaaggccaaggcgagggaggggcgatgctcgcccgatctgctacagccgccgccgccgccgggatctgactgtgattaaggatgtcggcgtcgcggagcgggaggatcaggcgggccgggagcgtggcgctcggggactttctgcggcgggaggcgtcggcggagcgggccgcgttgggaggcggcgagcggccctcggtcgcggcggggcadgcctgccgggcgaagaagggcgaggacttcgcgctgctcaagcccgcctgcgagcgacgccccggcgcgccgtccacctccttctccgccttcgccctgttcgatgggcataacgggagcgccgcwkcggtgtacgccgaggagcacctcctcggcaacgtgctcggctgcgtcccggccgatctgagcagggacgactggctcgccgcgctcctaagggcgctcgtcgcggggttcgtcaagaccgacaaggattttcaaactaaagctcattcctcggggacaaccgtgacacttgccataattgatggctccgttgtaactgttgcgtccgttggtgattcacgttgtgtccttgatgctgcgggatccatctactatttgtcggctgaccaccgctttgacgctaatgaagaggaggttggacgtgtaaccgaatgcggaggtgaagttggaaggctaaatgttgtcggtggtgctgagattggtccccttagatgttggccaggtggtctatgcctctcaagatcgattggtgaccaggacgtaggtgaatttatcattccggttccttatgtgaagcaaattaagctgtctaacgctggaggccgtcttattatttcaagtgacggtgtttgggatgctttgactgcggaaatggcttttagatgtgcacgggggcttcctcctgaggctgcagccgagcaaattgttaaagaagcagttgaatcaaaaggattgagagatgatacaacttgcattgtcattgacataatcccaccagagaaacaaaaatgcactatagaatctccaaaaacgccaggaaaaggccttgtacttctaaaaaatttcttcttaaggaaaacggcatctggttcattgtctctcgctgacaaggataattatcccgagccagatttcgtggaggaggtctttgaggatggatgcccatccctttcgaggaggcttaattctgaatatcctgtccgagatatgttcaagctttttgcatgtgcaatttgtcaaattgacttggagtctggccaaggcatatccatacacgagggttcgtcaaaggcagggaagctgcgtccctgggatggccctttcctttgccacagttgccaggaaaagaaagaggcgatggaggggaagcgtcactcgcgagactcctcgtcaagaaatagcgggtcaagtgaatagtgactaaagccaggagtcatcttgaggcgaccacctagcgtgtgacgagctaactcttgttgcagttgtcattgtagcagcacttcctctatacatggattaccattggacatagacagatgttggaacttggatggtgccatgcgtacatatgttggagctaatgcggtaatggaccgtcggccaaattcaatcgcctctaggtaccacaccggcgacggcgtcttcggcaaggcttgtagcagtaactcatgcaggtagtgatgacaagggactgttagcgaagaatgtcgacagtggccaatggtcatgtaaattgttcatcgtatagagaggtgcaagtgacaaatagccacggttttgtaattctgagctaggattagctattgagaccctgtaattcgtctgggcagacctcaaactagaggtcaacaacgtagcctggcctattgtagaatgtatcttgctctacagtcttcatgatccaacgctgtaattaggctgttgccagtgcttccc

SEQ ID NO: 16085 - protein, 444 aa, Zea mays subsp. mays
  peptide (1)..(444): Ceres Seq. ID no. 15222889
  misc_feature (47)..(295): Pfam Name: Protein phosphatase 2C Pfam Description: Protein phosphatase 2C
  misc_feature (47)..(295): Pfam Name: Protein phosphatase 2C Pfam Description: Protein phosphatase 2C
  misc_feature (37)..(432): Homolog of NCBI NO: 34914644 NR Description: OSJNBa0054L14.21 [Oryza sativa (japonica
  misc_feature (1)..(435): Homolog of NCBI NO: 15217454 NR Description: protein phosphatase 2C (PP2C) -related
  misc_feature (33)..(438): Homolog of NCBI NO: 34394411 NR Description: protein phosphatase 2C-like
  misc_feature (3)..(432): Homolog of NCBI NO: 15221404 NR Description: protein phosphatase 2C (PP2C) -related
  misc_feature (1)..(365): Homolog of NCBI NO: 16930415 NR Description: At1g09160/T12M4_13 [Arabidopsis thaliana]
  misc_feature (1)..(365): Homolog of NCBI NO: 16930415 NR Description: At1g09160/T12M4_13 [Arabidopsis thaliana]
  misc_feature (37)..(432): Homolog of NCBI NO: 34914644 NR Description: OSJNBa0054L14.21 [Oryza sativa (japonica
  misc_feature (33)..(438): Homolog of NCBI NO: 34394411 NR Description: protein phosphatase 2C-like
  misc_feature (1)..(444): Homolog of NCBI NO: 38344839 NR Description: OSJNBa0064H22.20 [Oryza sativa (japonica
  misc_feature (14)..(440): Homolog of NCBI NO: 18401703 NR Description: protein phosphatase 2C (PP2C) -related
  misc_feature (14)..(440): Homolog of NCBI NO: 15292869 NR Description: unknown protein [Arabidopsis thaliana]
  misc_feature (7)..(431): Homolog of NCBI NO: 14029015 NR Description: Unknown protein [Oryza sativa]
  misc_feature (3)..(432): Homolog of NCBI NO: 15221404 NR Description: protein phosphatase 2C (PP2C) -related
  misc_feature (1)..(435): Homolog of NCBI NO: 15217454 NR Description: protein phosphatase 2C (PP2C) -related
  misc_feature (33)..(366): Homolog of NCBI NO: 34898168 NR Description: protein phosphatase 2C-like
  misc_feature (33)..(366): Homolog of NCBI NO: 34898168 NR Description: protein phosphatase 2C-like
  misc_feature (7)..(431): Homolog of NCBI NO: 14029015 NR Description: Unknown protein [Oryza sativa]
  misc_feature (14)..(440): Homolog of NCBI NO: 15292869 NR Description: unknown protein [Arabidopsis thaliana]
  misc_feature (14)..(440): Homolog of NCBI NO: 18401703 NR Description: protein phosphatase 2C (PP2C) -related
  misc_feature (1)..(444): Homolog of NCBI NO: 38344839 NR Description: OSJNBa0064H22.20 [Oryza sativa (japonica
  misc_feature (44)..(44): Xaa is any aa, unknown or other
  misc_feature (86)..(86): Xaa is any aa, unknown or other
  misc_feature (87)..(87): Xaa is any aa, unknown or other
MSASRSGRIRRAGSVALGDFLRREASAERAALGGGERPSVAAGXACRAKKGEDFALLKPACERRPGAPSTSFSAFALFDGHNGSAXXVYAEEHLLGNVLGCVPADLSRDDWLAALLRALVAGFVKTDKDFQTKAHSSGTTVTLAIIDGSVVTVASVGDSRCVLDAAGSIYYLSADHRFDANEEEVGRVTECGGEVGRLNVVGGAEIGPLRCWPGGLCLSRSIGDQDVGEFIIPVPYVKQIKLSNAGGRLIISSDGVWDALTAEMAFRCARGLPPEAAAEQIVKEAVESKGLRDDTTCIVIDIIPPEKQKCTIESPKTPGKGLVLLKNFFLRKTASGSLSLADKDNYPEPDFVEEVFEDGCPSLSRRLNSEYPVRDMFKLFACAICQIDLESGQGISIHEGSSKAGKLRPWDGPFLCHSCQEKKEAMEGKRHSRDSSSRNSGSSE

SEQ ID NO: 16086 - DNA, 1239 bp, Zea mays subsp. mays
  misc_feature (1)..(1239): Ceres Seq. ID no. 12354519
  misc_feature: MA Experiment ID: 108523 Result: Down-regulated in Transcription
  misc_feature: MA Experiment 108523 PARAMETER Experiment Name: Zm_42deg_Heat_P Parameter: Age (day) Value: 8
  misc_feature: MA Experiment 108523 PARAMETER Experiment Name: Zm_42deg_Heat_P Parameter: Organism Value: Zea mays
  misc_feature: MA Experiment 108523 PARAMETER Experiment Name: Zm_42deg_Heat_P Parameter: Plant Line Value: 35A19
  misc_feature: MA Experiment 108523 PARAMETER Experiment Name: Zm_42deg_Heat_P Parameter: Temperature (deg C) Value: 42 vs. 22
  misc_feature: MA Experiment 108523 PARAMETER Experiment Name: Zm_42deg_Heat_P Parameter: Timepoint (hr) Value: 6
  misc_feature: MA Experiment 108523 PARAMETER Experiment Name: Zm_42deg_Heat_P Parameter: Tissue Value: Aerial
  misc_feature: MA Experiment ID: 108528 Result: Up-regulated in Transcription
  misc_feature: MA Experiment 108528 PARAMETER Experiment Name: Zm_Imbibed_Seeds_P Parameter: Age (day) Value: 5 vs. 2
  misc_feature: MA Experiment 108528 PARAMETER Experiment Name: Zm_Imbibed_Seeds_P Parameter: Organism Value: Zea mays
  misc_feature: MA Experiment 108528 PARAMETER Experiment Name: Zm_Imbibed_Seeds_P Parameter: Plant Line Value: 35A19
  misc_feature: MA Experiment 108528 PARAMETER Experiment Name: Zm_Imbibed_Seeds_P Parameter: Tissue Value: Aerial vs. Embryo
  misc_feature: MA Experiment ID: 108530 Result: Up-regulated in Transcription
  misc_feature: MA Experiment 108530 PARAMETER Experiment Name: Zm_Imbibed_Seeds_P Parameter: Age (day) Value: 6 vs. 2
  misc_feature: MA Experiment 108530 PARAMETER Experiment Name: Zm_Imbibed_Seeds_P Parameter: Organism Value: Zea mays
  misc_feature: MA Experiment 108530 PARAMETER Experiment Name: Zm_Imbibed_Seeds_P Parameter: Plant Line Value: 35A19
  misc_feature: MA Experiment 108530 PARAMETER Experiment Name: Zm_Imbibed_Seeds_P Parameter: Tissue Value: Aerial vs. Embryo
  misc_feature: MA Experiment ID: 108536 Result: Down-regulated in Transcription
  misc_feature: MA Experiment 108536 PARAMETER Experiment Name: Zm_Meristem_P Parameter: Age (day) Value: 8
  misc_feature: MA Experiment 108536 PARAMETER Experiment Name: Zm_Meristem_P Parameter: Organism Value: Zea mays
  misc_feature: MA Experiment 108536 PARAMETER Experiment Name: Zm_Meristem_P Parameter: Plant Line Value: 35A19
  misc_feature: MA Experiment 108536 PARAMETER Experiment Name: Zm_Meristem_P Parameter: Tissue Value: Shoot Meristem vs. Above Shoot Meristem
  misc_feature: MA Experiment ID: 108545 Result: Up-regulated in Transcription
  misc_feature: MA Experiment 108545 PARAMETER Experiment Name: Zm_Imbibed_Seeds_P Parameter: Age (day) Value: 3 vs. 2
  misc_feature: MA Experiment 108545 PARAMETER Experiment Name: Zm_Imbibed_Seeds_P Parameter: Organism Value: Zea mays
  misc_feature: MA Experiment 108545 PARAMETER Experiment Name: Zm_Imbibed_Seeds_P Parameter: Plant Line Value: 35A19
  misc_feature: MA Experiment 108545 PARAMETER Experiment Name: Zm_Imbibed_Seeds_P Parameter: Tissue Value: Aerial vs. Embryo
  misc_feature: MA Experiment ID: 108547 Result: Up-regulated in Transcription
  misc_feature: MA Experiment 108547 PARAMETER Experiment Name: Zm_Imbibed_Seeds_P Parameter: Age (day) Value: 4 vs. 2
  misc_feature: MA Experiment 108547 PARAMETER Experiment Name: Zm_Imbibed_Seeds_P Parameter: Organism Value: Zea mays
  misc_feature: MA Experiment 108547 PARAMETER Experiment Name: Zm_Imbibed_Seeds_P Parameter: Plant Line Value: 35A19
  misc_feature: MA Experiment 108547 PARAMETER Experiment Name: Zm_Imbibed_Seeds_P Parameter: Tissue Value: Aerial vs. Embryo
  misc_feature: MA Experiment ID: 108688 Result: Down-regulated in Transcription
  misc_feature: MA Experiment 108688 PARAMETER Experiment Name: Zm_Embryos-Flowers__P Parameter: Tissue Value: Immature Flowers vs. Aerial+
  misc_feature: MA Experiment ID: 20000492 Result: Down-regulated in Transcription
  misc_feature: MA Experiment 20000492 PARAMETER Experiment Name: Zm_Hybrid_Seed_Dev_P Parameter: DAP Value: 12
  misc_feature: MA Experiment 20000492 PARAMETER Experiment Name: Zm_Hybrid_Seed_Dev_P Parameter: Organism Value: Zea mays
  misc_feature: MA Experiment 20000492 PARAMETER Experiment Name: Zm_Hybrid_Seed_Dev_P Parameter: Plant Line Value: 35A19
  misc_feature: MA Experiment 20000492 PARAMETER Experiment Name: Zm_Hybrid_Seed_Dev_P Parameter: Tissue Value: Fert Kernel vs. Unfert Floret
gtgacattgttgtgcgccttccactacagtaatggaagcaggcgccggggaagcagcaccaagcgcgccgcgcagactgaccctgccgtggaaggtgcggctcctgctcctctgcctcgatgtcgtcgccggtctctcgatgcgtcgcgacggcaccatcaaccgctccatcttcaacctcttcgaccttcgtgccaccgccagcacgcgcccggacaggcagggcgtccggtccgccgacgtggacgcgtcgcgcggcctgtgggcgcgcgtgttctggccgtcgccggagtcgtccgcggccccgctcccagtcgtggtatacttccacggcggcgccttcacgctgctctctgcggcctcgtacgtctacgacgccatgtgccgccggttctgccgcgagctgggcgccgtcgtcgtgtccgtcaactaccgcctcgcacccgagcaccgctggcccgccgcgtacgaggacggcgtcgccatgcttcgatacctcgcctccgcgggtctccccgacagcgtcgacgtccccgtggacctctcccgctgcttcctcgccggggacagcgccggcgccaacatcgcccaccacgtggcgcagcgctggacgacggcctcctccccgccgcggtccatccccgtccacctcgctggcgccatcctggtgcagccgtactttggcggcgaggagcggacggaagctgaggtcaggctggatgggaacgtgccggtggtgaccgtgcgtggctcggactggatgtggcgggcgttcctgccggaaggcgccgatcggaaccactccgccgcgcacgtgacagacgacaacgccgacctggcggacggctttccgccggtgatggtggtgatcggtggcttcgacccgctgcaggagtggcagaggcggtacgccgacgtgctgcggaggagggggaaggaggtaagggtggtggagttcccggacgccattcacactttcttcctcttccccgagctcaccgatcatggtacgctcgtggaggcgatgaaggcgttcatacgcgagcaacgcatctgatctaattctgcctcacggtcacggatcaccaacctacgtggacctacatggtccgtgcaaataattttgtttcccatgcacgtaatggtccctacatggtccgtgcaaataatttctctataaaccactattcaagtctcccatatatttattcagttcatcgagcatctcttctagatctt

SEQ ID NO: 16087 - protein, 341 aa, Zea mays subsp. mays
  peptide (1)..(341): Ceres Seq. ID no. 12354520
  misc_feature (85)..(138): Pfam Name: Carboxylesterase Pfam Description: Carboxylesterase
  misc_feature (3)..(336): Homolog of NCBI NO: 15229371 NR Description: putative protein; protein id: At3g63010.1
  misc_feature (15)..(339): Homolog of NCBI NO: 15240483 NR Description: putative protein
  misc_feature (8)..(341): Homolog of NCBI NO: 21618039 NR Description: unknown [Arabidopsis thaliana]
  misc_feature (8)..(341): Homolog of NCBI NO: 15237783 NR Description: putative protein
  misc_feature (35)..(340): Homolog of NCBI NO: 34904758 NR Description: hypothetical protein~predicted by GeneMark.hmm
  misc_feature (3)..(340): Homolog of NCBI NO: 34904774 NR Description: similar to carboxylesterase
  misc_feature (3)..(340): Homolog of NCBI NO: 34393714 NR Description: putative esterase [Oryza sativa (japonica
  misc_feature (3)..(338): Homolog of NCBI NO: 34904760 NR Description: similar to carboxylesterase
  misc_feature (14)..(338): Homolog of NCBI NO: 34904772 NR Description: similar to carboxylesterase
  misc_feature (13)..(336): Homolog of NCBI NO: 34904770 NR Description: similar to carboxylesterase
MEAGAGEAAPSAPRRLTLPWKVRLLLLCLDVVAGLSMRRDGTINRSIFNLFDLRATASTRPDRQGVRSADVDASRGLWARVFWPSPESSAAPLPVVVYFHGGAFTLLSAASYVYDAMCRRFCRELGAVVVSVNYRLAPEHRWPAAYEDGVAMLRYLASAGLPDSVDVPVDLSRCFLAGDSAGANIAHHVAQRWTTASSPPRSIPVHLAGAILVQPYFGGEERTEAEVRLDGNVPVVTVRGSDWMWRAFLPEGADRNHSAAHVTDDNADLADGFPPVMVVIGGFDPLQEWQRRYADVLRRRGKEVRVVEFPDAIHTFFLFPELTDHGTLVEAMKAFIREQRI

SEQ ID NO: 16088 - protein, 305 aa, Zea mays subsp. mays
  peptide (1)..(305): Ceres Seq. ID no. 12354521
  misc_feature (49)..(102): Pfam Name: Carboxylesterase Pfam Description: Carboxylesterase
  misc_feature (1)..(300): Homolog of NCBI NO: 15229371 NR Description: putative protein; protein id: At3g63010.1
  misc_feature (1)..(303): Homolog of NCBI NO: 15240483 NR Description: putative protein
  misc_feature (1)..(305): Homolog of NCBI NO: 21618039 NR Description: unknown [Arabidopsis thaliana]
  misc_feature (1)..(305): Homolog of NCBI NO: 15237783 NR Description: putative protein
  misc_feature (1)..(304): Homolog of NCBI NO: 34904758 NR Description: hypothetical protein~predicted by GeneMark.hmm
  misc_feature (1)..(304): Homolog of NCBI NO: 34904774 NR Description: similar to carboxylesterase
  misc_feature (1)..(304): Homolog of NCBI NO: 34393714 NR Description: putative esterase [Oryza sativa (japonica
  misc_feature (1)..(302): Homolog of NCBI NO: 34904760 NR Description: similar to carboxylesterase
  misc_feature (1)..(302): Homolog of NCBI NO: 34904772 NR Description: similar to carboxylesterase
  misc_feature (1)..(300): Homolog of NCBI NO: 34904770 NR Description: similar to carboxylesterase
MRRDGTINRSIFNLFDLRATASTRPDRQGVRSADVDASRGLWARVFWPSPESSAAPLPVVVYFHGGAFTLLSAASYVYDAMCRRFCRELGAVVVSVNYRLAPEHRWPAAYEDGVAMLRYLASAGLPDSVDVPVDLSRCFLAGDSAGANIAHHVAQRWTTASSPPRSIPVHLAGAILVQPYFGGEERTEAEVRLDGNVPVVTVRGSDWMWRAFLPEGADRNHSAAHVTDDNADLADGFPPVMVVIGGFDPLQEWQRRYADVLRRRGKEVRVVEFPDAIHTFFLFPELTDHGTLVEAMKAFIREQRI

SEQ ID NO: 16089 - protein, 235 aa, Zea mays subsp. mays
  peptide (1)..(235): Ceres Seq. ID no. 12354522
VTLLCAFHYSNGSRRRGSSTKRAAQTDPAVEGAAPAPLPRCRRRSLDASRRHHQPLHLQPLRPSCHRQHAPGQAGRPVRRRGRVARPVGARVLAVAGVVRGPAPSRGILPRRRLHAALCGLVRLRRHVPPVLPRAGRRRRVRQLPPRTRAPLARRVRGRRRHASIPRLRGSPRQRRRPRGPLPLLPRRGQRRRQHRPPRGAALDDGLLPAAVHPRPPRWRHPGAAVLWRRGADGS

SEQ ID NO: 16090 - DNA, 529 bp, Zea mays subsp. mays
  misc_feature (1)..(529): Ceres Seq. ID no. 1555861
  misc_feature: MA Experiment ID: 20000479 Result: Down-regulated in Transcription
  misc_feature: MA Experiment 20000479 PARAMETER Experiment Name: Zm_Drought_P Parameter: Age (day) Value: 10
  misc_feature: MA Experiment 20000479 PARAMETER Experiment Name: Zm_Drought_P Parameter: Organism Value: Zea mays
  misc_feature: MA Experiment 20000479 PARAMETER Experiment Name: Zm_Drought_P Parameter: Plant Line Value: 35A19
  misc_feature: MA Experiment 20000479 PARAMETER Experiment Name: Zm_Drought_P Parameter: Timepoint (hr) Value: 48
  misc_feature: MA Experiment 20000479 PARAMETER Experiment Name: Zm_Drought_P Parameter: Tissue Value: Aerial
  misc_feature: MA Experiment 20000479 PARAMETER Experiment Name: Zm_Drought_P Parameter: Treatment Value: Drought vs. No Drought
  misc_feature: Pfam Name: UQ_con Pfam Description: Ubiquitin-conjugating enzyme
aaaccgaggccacaggccaccaccattccttccttgttccttccccagctccgcaggctgctcatcgccctccctccgcgcccccgatccagatccagatccaggggcttgtcatggcatccaaacgtatcctcaaggaattaaaggacttgcaaaaggaccctccaacatcatgcagtgcaggtcctgctggtgaggatatgttccactggcaggcaaccatcatgggtcctcctgatagtccatatgctggaggtgttttcttggtgaacattcatttcccgccagactaccccttcaagcctccaaaggtatcttttaagacgaaggtcttccatccaaacatcaatagtaatggaagcatatgtcttgacattcttaaggagcagtggagccctgctttgacaatctctaaggtgctgggacaatttagtactaactttactagtatatacactgttcatattatagctttaaatgacttgtgcacagtaaatgattagcttaaaatgcatgctgtgatgtttat

SEQ ID NO: 16091 - protein, 166 aa, Zea mays subsp. mays
  peptide (1)..(166): Ceres Seq. ID no. 1555862
  misc_feature: Pfam Name: UQ_con Pfam Description: Ubiquitin-conjugating enzyme
  misc_feature (38)..(140): Homolog of NCBI NO: 18398206 NR Description: E2, ubiquitin-conjugating enzyme 11 (UBC11)
  misc_feature (38)..(140): Homolog of NCBI NO: 28569263 NR Description: ubiquitin-conjugating enzyme E2 [Gossypium
  misc_feature (38)..(140): Homolog of NCBI NO: 28569269 NR Description: ubiquitin-conjugating enzyme E2 [Gossypium
  misc_feature (38)..(140): Homolog of NCBI NO: 464981 NR Description: Ubiquitin-conjugating enzyme E2-17 kDa
  misc_feature (38)..(140): Homolog of NCBI NO: 5762457 NR Description: ubiquitin-conjugating enzyme UBC2
  misc_feature (38)..(140): Homolog of NCBI NO: 30025160 NR Description: ubiquitin-conjugating enzyme [Hordeum vulgare]
  misc_feature (38)..(140): Homolog of NCBI NO: 32488376 NR Description: OSJNBa0043A12.6 [Oryza sativa (japonica
  misc_feature (38)..(148): Homolog of NCBI NO: 20086317 NR Description: elicitor and UV light related transcription
  misc_feature (38)..(140): Homolog of NCBI NO: 34909292 NR Description: ubiquitin conjugating enzyme
  misc_feature (38)..(140): Homolog of NCBI NO: 2668744 NR Description: ubiquitin conjugating enzyme [Zea mays]
TEATGHHHSFLVPSPAPQAAHRPPSAPPIQIQIQGLVMASKRILKELKDLQKDPPTSCSAGPAGEDMFHWQATIMGPPDSPYAGGVFLVNIHFPPDYPFKPPKVSFKTKVFHPNINSNGSICLDILKEQWSPALTISKVLGQFSTNFTSIYTVHIIALNDLCTVND

SEQ ID NO: 16092 - protein, 129 aa, Zea mays subsp. mays
  peptide (1)..(129): Ceres Seq. ID no. 1555863
  misc_feature: Pfam Name: UQ_con Pfam Description: Ubiquitin-conjugating enzyme
  misc_feature (1)..(103): Homolog of NCBI NO: 28569263 NR Description: ubiquitin-conjugating enzyme E2 [Gossypium
  misc_feature (1)..(103): Homolog of NCBI NO: 28569269 NR Description: ubiquitin-conjugating enzyme E2 [Gossypium
  misc_feature (1)..(103): Homolog of NCBI NO: 18398206 NR Description: E2, ubiquitin-conjugating enzyme 11 (UBC11)
  misc_feature (1)..(103): Homolog of NCBI NO: 464981 NR Description: Ubiquitin-conjugating enzyme E2-17 kDa
  misc_feature (1)..(103): Homolog of NCBI NO: 5762457 NR Description: ubiquitin-conjugating enzyme UBC2
  misc_feature (1)..(103): Homolog of NCBI NO: 30025160 NR Description: ubiquitin-conjugating enzyme [Hordeum vulgare]
  misc_feature (1)..(103): Homolog of NCBI NO: 32488376 NR Description: OSJNBa0043A12.6 [Oryza sativa (japonica
  misc_feature (1)..(111): Homolog of NCBI NO: 20086317 NR Description: elicitor and UV light related transcription
  misc_feature (1)..(103): Homolog of NCBI NO: 34909292 NR Description: ubiquitin conjugating enzyme
  misc_feature (1)..(103): Homolog of NCBI NO: 2668744 NR Description: ubiquitin conjugating enzyme [Zea mays]
MASKRILKELKDLQKDPPTSCSAGPAGEDMFHWQATIMGPPDSPYAGGVFLVNIHFPPDYPFKPPKVSFKTKVFHPNINSNGSICLDILKEQWSPALTISKVLGQFSTNFTSIYTVHIIALNDLCTVND

SEQ ID NO: 16093 - protein, 100 aa, Zea mays subsp. mays
  peptide (1)..(100): Ceres Seq. ID no. 1555864
  misc_feature: Pfam Name: UQ_con Pfam Description: Ubiquitin-conjugating enzyme
  misc_feature (1)..(74): Homolog of NCBI NO: 18398206 NR Description: E2, ubiquitin-conjugating enzyme 11 (UBC11)
  misc_feature (1)..(74): Homolog of NCBI NO: 28569269 NR Description: ubiquitin-conjugating enzyme E2 [Gossypium
  misc_feature (1)..(74): Homolog of NCBI NO: 28569263 NR Description: ubiquitin-conjugating enzyme E2 [Gossypium
  misc_feature (1)..(74): Homolog of NCBI NO: 464981 NR Description: Ubiquitin-conjugating enzyme E2-17 kDa
  misc_feature (1)..(74): Homolog of NCBI NO: 5762457 NR Description: ubiquitin-conjugating enzyme UBC2
  misc_feature (1)..(74): Homolog of NCBI NO: 30025160 NR Description: ubiquitin-conjugating enzyme [Hordeum vulgare]
  misc_feature (1)..(74): Homolog of NCBI NO: 32488376 NR Description: OSJNBa0043A12.6 [Oryza sativa (japonica
  misc_feature (1)..(82): Homolog of NCBI NO: 20086317 NR Description: elicitor and UV light related transcription
  misc_feature (1)..(74): Homolog of NCBI NO: 34909292 NR Description: ubiquitin conjugating enzyme
  misc_feature (1)..(74): Homolog of NCBI NO: 2668744 NR Description: ubiquitin conjugating enzyme [Zea mays]
MFHWQATIMGPPDSPYAGGVFLVNIHFPPDYPFKPPKVSFKTKVFHPNINSNGSICLDILKEQWSPALTISKVLGQFSTNFTSIYTVHIIALNDLCTVND

SEQ ID NO: 16094 - DNA, 1400 bp, Zea mays subsp. mays
  misc_feature (1)..(1400): Ceres Seq. ID no. 12391337
  misc_feature: MA Experiment ID: 108504 Result: Up-regulated in Transcription
  misc_feature: MA Experiment 108504 PARAMETER Experiment Name: Zm_Drought_P Parameter: Age (day) Value: 8
  misc_feature: MA Experiment 108504 PARAMETER Experiment Name: Zm_Drought_P Parameter: Organism Value: Zea mays
  misc_feature: MA Experiment 108504 PARAMETER Experiment Name: Zm_Drought_P Parameter: Plant Line Value: 35A19
  misc_feature: MA Experiment 108504 PARAMETER Experiment Name: Zm_Drought_P Parameter: Timepoint (hr) Value: 12
  misc_feature: MA Experiment 108504 PARAMETER Experiment Name: Zm_Drought_P Parameter: Tissue Value: Aerial
  misc_feature: MA Experiment 108504 PARAMETER Experiment Name: Zm_Drought_P Parameter: Treatment Value: Drought vs. No Drought
  misc_feature: MA Experiment ID: 108522 Result: Up-regulated in Transcription
  misc_feature: MA Experiment 108522 PARAMETER Experiment Name: Zm_42deg_Heat_P Parameter: Age (day) Value: 8
  misc_feature: MA Experiment 108522 PARAMETER Experiment Name: Zm_42deg_Heat_P Parameter: Organism Value: Zea mays
  misc_feature: MA Experiment 108522 PARAMETER Experiment Name: Zm_42deg_Heat_P Parameter: Plant Line Value: 35A19
  misc_feature: MA Experiment 108522 PARAMETER Experiment Name: Zm_42deg_Heat_P Parameter: Temperature (deg C) Value: 42 vs. 22
  misc_feature: MA Experiment 108522 PARAMETER Experiment Name: Zm_42deg_Heat_P Parameter: Timepoint (hr) Value: 1
  misc_feature: MA Experiment 108522 PARAMETER Experiment Name: Zm_42deg_Heat_P Parameter: Tissue Value: Aerial
  misc_feature: MA Experiment ID: 108523 Result: Up-regulated in Transcription
  misc_feature: MA Experiment 108523 PARAMETER Experiment Name: Zm_42deg_Heat_P Parameter: Age (day) Value: 8
  misc_feature: MA Experiment 108523 PARAMETER Experiment Name: Zm_42deg_Heat_P Parameter: Organism Value: Zea mays
  misc_feature: MA Experiment 108523 PARAMETER Experiment Name: Zm_42deg_Heat_P Parameter: Plant Line Value: 35A19
  misc_feature: MA Experiment 108523 PARAMETER Experiment Name: Zm_42deg_Heat_P Parameter: Temperature (deg C) Value: 42 vs. 22
  misc_feature: MA Experiment 108523 PARAMETER Experiment Name: Zm_42deg_Heat_P Parameter: Timepoint (hr) Value: 6
  misc_feature: MA Experiment 108523 PARAMETER Experiment Name: Zm_42deg_Heat_P Parameter: Tissue Value: Aerial
  misc_feature: MA Experiment ID: 108526 Result: Up-regulated in Transcription
  misc_feature: MA Experiment 108526 PARAMETER Experiment Name: Zm_5mM_NO_P Parameter: Age (day) Value: 8
  misc_feature: MA Experiment 108526 PARAMETER Experiment Name: Zm_5mM_NO_P Parameter: Organism Value: Zea mays
  misc_feature: MA Experiment 108526 PARAMETER Experiment Name: Zm_5mM_NO_P Parameter: Plant Line Value: 35A19
  misc_feature: MA Experiment 108526 PARAMETER Experiment Name: Zm_5mM_NO_P Parameter: Timepoint (hr) Value: 1
  misc_feature: MA Experiment 108526 PARAMETER Experiment Name: Zm_5mM_NO_P Parameter: Tissue Value: Aerial
  misc_feature: MA Experiment 108526 PARAMETER Experiment Name: Zm_5mM_NO_P Parameter: Treatment Value: 5mM NO vs. No Treatment
  misc_feature: MA Experiment ID: 108527 Result: Up-regulated in Transcription
  misc_feature: MA Experiment 108527 PARAMETER Experiment Name: Zm_5mM_NO_P Parameter: Age (day) Value: 8
  misc_feature: MA Experiment 108527 PARAMETER Experiment Name: Zm_5mM_NO_P Parameter: Organism Value: Zea mays
  misc_feature: MA Experiment 108527 PARAMETER Experiment Name: Zm_5mM_NO_P Parameter: Plant Line Value: 35A19
  misc_feature: MA Experiment 108527 PARAMETER Experiment Name: Zm_5mM_NO_P Parameter: Timepoint (hr) Value: 6
  misc_feature: MA Experiment 108527 PARAMETER Experiment Name: Zm_5mM_NO_P Parameter: Tissue Value: Aerial
  misc_feature: MA Experiment 108527 PARAMETER Experiment Name: Zm_5mM_NO_P Parameter: Treatment Value: 5mM NO vs. No Treatment
  misc_feature: MA Experiment ID: 108529 Result: Up-regulated in Transcription
  misc_feature: MA Experiment 108529 PARAMETER Experiment Name: Zm_Imbibed_Seeds_P Parameter: Age (day) Value: 5 vs. 2
  misc_feature: MA Experiment 108529 PARAMETER Experiment Name: Zm_Imbibed_Seeds_P Parameter: Organism Value: Zea mays
  misc_feature: MA Experiment 108529 PARAMETER Experiment Name: Zm_Imbibed_Seeds_P Parameter: Plant Line Value: 35A19
  misc_feature: MA Experiment 108529 PARAMETER Experiment Name: Zm_Imbibed_Seeds_P Parameter: Tissue Value: Roots vs. Embryo
  misc_feature: MA Experiment ID: 108533 Result: Up-regulated in Transcription
  misc_feature: MA Experiment 108533 PARAMETER Experiment Name: Zm_4deg_Cold_P Parameter: Age (hr) Value: 8
  misc_feature: MA Experiment 108533 PARAMETER Experiment Name: Zm_4deg_Cold_P Parameter: Organism Value: Zea mays
  misc_feature: MA Experiment 108533 PARAMETER Experiment Name: Zm_4deg_Cold_P Parameter: Plant Line Value: 35A19
  misc_feature: MA Experiment 108533 PARAMETER Experiment Name: Zm_4deg_Cold_P Parameter: Temperature (deg C) Value: 4 vs. 22
  misc_feature: MA Experiment 108533 PARAMETER Experiment Name: Zm_4deg_Cold_P Parameter: Timepoint (hr) Value: 1
  misc_feature: MA Experiment 108533 PARAMETER Experiment Name: Zm_4deg_Cold_P Parameter: Tissue Value: Aerial
  misc_feature: MA Experiment ID: 108534 Result: Up-regulated in Transcription
  misc_feature: MA Experiment 108534 PARAMETER Experiment Name: Zm_4deg_Cold_P Parameter: Age (hr) Value: 8
  misc_feature: MA Experiment 108534 PARAMETER Experiment Name: Zm_4deg_Cold_P Parameter: Organism Value: Zea mays
  misc_feature: MA Experiment 108534 PARAMETER Experiment Name: Zm_4deg_Cold_P Parameter: Plant Line Value: 35A19
  misc_feature: MA Experiment 108534 PARAMETER Experiment Name: Zm_4deg_Cold_P Parameter: Temperature (deg C) Value: 4 vs. 22
  misc_feature: MA Experiment 108534 PARAMETER Experiment Name: Zm_4deg_Cold_P Parameter: Timepoint (hr) Value: 6
  misc_feature: MA Experiment 108534 PARAMETER Experiment Name: Zm_4deg_Cold_P Parameter: Tissue Value: Aerial
  misc_feature: MA Experiment ID: 108535 Result: Down-regulated in Transcription
  misc_feature: MA Experiment 108535 PARAMETER Experiment Name: Zm_Meristem_P Parameter: Age (day) Value: 8
  misc_feature: MA Experiment 108535 PARAMETER Experiment Name: Zm_Meristem_P Parameter: Organism Value: Zea mays
  misc_feature: MA Experiment 108535 PARAMETER Experiment Name: Zm_Meristem_P Parameter: Plant Line Value: 35A19
  misc_feature: MA Experiment 108535 PARAMETER Experiment Name: Zm_Meristem_P Parameter: Tissue Value: Root Meristem vs. Above Root Meristem
  misc_feature: MA Experiment ID: 108536 Result: Up-regulated in Transcription
  misc_feature: MA Experiment 108536 PARAMETER Experiment Name: Zm_Meristem_P Parameter: Age (day) Value: 8
  misc_feature: MA Experiment 108536 PARAMETER Experiment Name: Zm_Meristem_P Parameter: Organism Value: Zea mays
  misc_feature: MA Experiment 108536 PARAMETER Experiment Name: Zm_Meristem_P Parameter: Plant Line Value: 35A19
  misc_feature: MA Experiment 108536 PARAMETER Experiment Name: Zm_Meristem_P Parameter: Tissue Value: Shoot Meristem vs. Above Shoot Meristem
  misc_feature: MA Experiment ID: 108547 Result: Up-regulated in Transcription
  misc_feature: MA Experiment 108547 PARAMETER Experiment Name: Zm_Imbibed_Seeds_P Parameter: Age (day) Value: 4 vs. 2
  misc_feature: MA Experiment 108547 PARAMETER Experiment Name: Zm_Imbibed_Seeds_P Parameter: Organism Value: Zea mays
  misc_feature: MA Experiment 108547 PARAMETER Experiment Name: Zm_Imbibed_Seeds_P Parameter: Plant Line Value: 35A19
  misc_feature: MA Experiment 108547 PARAMETER Experiment Name: Zm_Imbibed_Seeds_P Parameter: Tissue Value: Aerial vs. Embryo
  misc_feature: MA Experiment ID: 108689 Result: Down-regulated in Transcription
  misc_feature: MA Experiment 108689 PARAMETER Experiment Name: Zm_Drought_Roots_P Parameter: Age (day) Value: 9
  misc_feature: MA Experiment 108689 PARAMETER Experiment Name: Zm_Drought_Roots_P Parameter: Organism Value: Zea mays
  misc_feature: MA Experiment 108689 PARAMETER Experiment Name: Zm_Drought_Roots_P Parameter: Plant Line Value: 35A19
  misc_feature: MA Experiment 108689 PARAMETER Experiment Name: Zm_Drought_Roots_P Parameter: Timepoint (hr) Value: 24
  misc_feature: MA Experiment 108689 PARAMETER Experiment Name: Zm_Drought_Roots_P Parameter: Tissue Value: Roots
  misc_feature: MA Experiment 108689 PARAMETER Experiment Name: Zm_Drought_Roots_P Parameter: Treatment Value: Drought vs. No Drought
  misc_feature: MA Experiment ID: 20000108 Result: Down-regulated in Transcription
  misc_feature: MA Experiment 20000108 PARAMETER Experiment Name: Zm_Root-Tips_P Parameter: Age (day) Value: 12
  misc_feature: MA Experiment 20000108 PARAMETER Experiment Name: Zm_Root-Tips_P Parameter: Organism Value: Zea mays
  misc_feature: MA Experiment 20000108 PARAMETER Experiment Name: Zm_Root-Tips_P Parameter: Tissue Value: Root tips vs. Root mid region    35
  misc_feature: MA Experiment 20000108 PARAMETER Experiment Name: Zm_Root-Tips_P Parameter: Tissue Value: Root tips vs. Root mid region   Sequence Listing-Misc Features (4)
  misc_feature: MA Experiment ID: 20000535 Result: Down-regulated in Transcription
  misc_feature: MA Experiment 20000535 PARAMETER Experiment Name: Zm_Hybrid_Seed_Dev_P Parameter: DAP Value: 30 vs. 12
  misc_feature: MA Experiment 20000535 PARAMETER Experiment Name: Zm_Hybrid_Seed_Dev_P Parameter: Organism Value: Zea mays
  misc_feature: MA Experiment 20000535 PARAMETER Experiment Name: Zm_Hybrid_Seed_Dev_P Parameter: Plant Line Value: 35A19
  misc_feature: MA Experiment 20000535 PARAMETER Experiment Name: Zm_Hybrid_Seed_Dev_P Parameter: Tissue Value: Embryo vs. Unfert Floret
  misc_feature: MA Experiment ID: 20000626 Result: Down-regulated in Transcription
  misc_feature: MA Experiment 20000626 PARAMETER Experiment Name: Zm_Herbicide-Treatments_P Parameter: Timepoint (hr) Value: 12
  misc_feature: MA Experiment 20000626 PARAMETER Experiment Name: Zm_Herbicide-Treatments_P Parameter: Tissue Value: Aerial
  misc_feature: MA Experiment 20000626 PARAMETER Experiment Name: Zm_Herbicide-Treatments_P Parameter: Treatment Value: Roundup vs. No Treatment
  misc_feature: MA Experiment ID: 20000630 Result: Up-regulated in Transcription
  misc_feature: MA Experiment 20000630 PARAMETER Experiment Name: Zm_Herbicide-Treatments_P Parameter: Timepoint (hr) Value: 4
  misc_feature: MA Experiment 20000630 PARAMETER Experiment Name: Zm_Herbicide-Treatments_P Parameter: Tissue Value: Aerial
  misc_feature: MA Experiment 20000630 PARAMETER Experiment Name: Zm_Herbicide-Treatments_P Parameter: Treatment Value: Roundup vs. No Treatment
  misc_feature: MA Experiment ID: 20001610 Result: Up-regulated in Transcription
  misc_feature: MA Experiment 20001610 PARAMETER Experiment Name: Zm_50ppm_KNO3_L-to-H_P Parameter: Age (day) Value: 19
  misc_feature: MA Experiment 20001610 PARAMETER Experiment Name: Zm_50ppm_KNO3_L-to-H_P Parameter: Organism Value: Zea mays
  misc_feature: MA Experiment 20001610 PARAMETER Experiment Name: Zm_50ppm_KNO3_L-to-H_P Parameter: Plant Line Value: 35A19
  misc_feature: MA Experiment 20001610 PARAMETER Experiment Name: Zm_50ppm_KNO3_L-to-H_P Parameter: Timepoint (hr) Value: 2
  misc_feature: MA Experiment 20001610 PARAMETER Experiment Name: Zm_50ppm_KNO3_L-to-H_P Parameter: Tissue Value: Roots
  misc_feature: MA Experiment 20001610 PARAMETER Experiment Name: Zm_50ppm_KNO3_L-to-H_P Parameter: Treatment Value: 50ppm KNO3 vs. 50ppm KCl
gcacgagaccattacctagaacatcctaatcgaaaaatagtattcgacaggctcacaagtcacaattccagctcaggccaccagcaagcacatcgcaaaggagaacagaacagaacagagagccatggcggcggtcgccgtgagcggggggcactggaggaggctgcggacgctggggcgcggcgcgtcgggcgccgtggtgtcgctggcgtgggacgccgcgtcgggggagctggtcgcggtcaagtcggccggcgcgatcggcgcggcggcgctgaggcgggagcacgcggtgctggccgggctgcgctcgccgcacgtcgtgcgctgcgtcggcggcggcgatgcggcggaggaggggtcgtcgtaccagctcttcctcgagtacgcccccggcgggtcgctcnccgacgaggtggcccggagcgggggctccctcggggagcgcgccgtccgcgcgttcgccgccgacgtgctgcgggggctggcgtacctccacgcccgctccgtcgtgcacggcgacgtcaaggcgcggaacgtgctggtcggcgccggcggccgcgccatgctcgccgacttcgggtgcgccagggcgctgtccggctccggctccgcgcgccggccgatcgtcggcgccacgccggcgttcatggcgcccgaggtggcccgcggggaggaccagggcccccccgccgacgtctgggcgctgggctgcaccgtcgtcgagatggccaccggccgcgccccgttcgncggcatgggtggcgctggcggcgccctcnnggcggtccantggatcgggtacacggacgccgtgccggaggtgccggcctggctgtcgcctgaggccggggacttcctggcccactgcttcgccagagacgccgccgatcggtggaccgccgcgcggctcctggagcacccgttnngtggcgttcgcccgccacgangacaaggccccgcggccgtctcccaagagcgctctggacgccgccgcgttctgggagtccgaaacagagtccgaggacgaagcgtcagggagcgcgtcggagaggatcgagtcactggcgtgctccgccggggccttgcccgactgggacggcgagggaggatggatcgacgtgctcggcgagcactgcggcgcgccaggcaaagcgtccagcgtcctggtggcggtgccagctggggagatggatgtcggcggcggtctacccagtgaagatggactggaagcagaggaggtnccgttcggtggcggcggtgttccagttccagttccagcagctgatgcttcggctgggcgtcatgagaaacactgttcgagttccgactgtcatgcgctctcctgtcagctagtaccttgtaatctagtctttaatgcaataaagttatgggttccc

SEQ ID NO: 16095 - protein, 364 aa, Zea mays subsp. mays
  peptide (1)..(364): Ceres Seq. ID no. 12391338
  misc_feature (11)..(267): Pfam Name: Protein kinase domain Pfam Description: Protein kinase domain
  misc_feature (11)..(273): Homolog of NCBI NO: 15225692 NR Description: putative protein kinase; protein id: At2g32510.1
  misc_feature (10)..(267): Homolog of NCBI NO: 19423926 NR Description: unknown protein [Arabidopsis thaliana]
  misc_feature (10)..(267): Homolog of NCBI NO: 15236903 NR Description: putative NPK1-related protein kinase; protein id:
  misc_feature (134)..(267): Homolog of NCBI NO: 19110337 NR Description: NPK1-related protein kinase-like protein [Zea
  misc_feature (1)..(267): Homolog of NCBI NO: 37530788 NR Description: putative NPK1-related protein kinase
  misc_feature (1)..(267): Homolog of NCBI NO: 37530786 NR Description: putative NPK1-related protein kinase
  misc_feature (12)..(267): Homolog of NCBI NO: 34911476 NR Description: NPK1-related protein kinase-like protein
  misc_feature (5)..(267): Homolog of NCBI NO: 34911472 NR Description: NPK1-related protein kinase-like protein
  misc_feature (12)..(293): Homolog of NCBI NO: 34911474 NR Description: NPK1-related protein kinase-like protein
  misc_feature (3)..(267): Homolog of NCBI NO: 34911466 NR Description: NPK1-related protein kinase-like protein
  misc_feature (95)..(95): Xaa is any aa, unknown or other
  misc_feature (210)..(210): Xaa is any aa, unknown or other
  misc_feature (220)..(220): Xaa is any aa, unknown or other
  misc_feature (223)..(223): Xaa is any aa, unknown or other
  misc_feature (268)..(268): Xaa is any aa, unknown or other
  misc_feature (269)..(269): Xaa is any aa, unknown or other
  misc_feature (276)..(276): Xaa is any aa, unknown or other
MAAVAVSGGHWRRLRTLGRGASGAVVSLAWDAASGELVAVKSAGAIGAAALRREHAVLAGLRSPHVVRCVGGGDAAEEGSSYQLFLEYAPGGSLXDEVARSGGSLGERAVRAFAADVLRGLAYLHARSVVHGDVKARNVLVGAGGRAMLADFGCARALSGSGSARRPIVGATPAFMAPEVARGEDQGPPADVWALGCTVVEMATGRAPFXGMGGAGGALXAVXWIGYTDAVPEVPAWLSPEAGDFLAHCFARDAADRWTAARLLEHPXXGVRPPRXQGPAAVSQERSGRRRVLGVRNRVRGRSVRERVGEDRVTGVLRRGLARLGRRGRMDRRARRALRRARQSVQRPGGGASWGDGCRRRSTQ

SEQ ID NO: 16096 - protein, 352 aa, Zea mays subsp. mays
  peptide (1)..(352): Ceres Seq. ID no. 12391339
  misc_feature (209)..(254): Homolog of NCBI NO: 19110337 NR Description: NPK1-related protein kinase-like protein [Zea
  misc_feature (221)..(305): Homolog of NCBI NO: 37530786 NR Description: putative NPK1-related protein kinase
  misc_feature (226)..(291): Homolog of NCBI NO: 37530788 NR Description: putative NPK1-related protein kinase
  misc_feature (204)..(262): Homolog of NCBI NO: 37530786 NR Description: putative NPK1-related protein kinase
  misc_feature (209)..(298): Homolog of NCBI NO: 34911476 NR Description: NPK1-related protein kinase-like protein
  misc_feature (203)..(283): Homolog of NCBI NO: 34911472 NR Description: NPK1-related protein kinase-like protein
  misc_feature (204)..(318): Homolog of NCBI NO: 34911474 NR Description: NPK1-related protein kinase-like protein
  misc_feature (196)..(337): Homolog of NCBI NO: 34911466 NR Description: NPK1-related protein kinase-like protein
  misc_feature (21)..(21): Xaa is any aa, unknown or other
  misc_feature (137)..(137): Xaa is any aa, unknown or other
  misc_feature (146)..(146): Xaa is any aa, unknown or other
  misc_feature (147)..(147): Xaa is any aa, unknown or other
  misc_feature (150)..(150): Xaa is any aa, unknown or other
  misc_feature (195)..(195): Xaa is any aa, unknown or other
  misc_feature (202)..(202): Xaa is any aa, unknown or other
  misc_feature (300)..(300): Xaa is any aa, unknown or other
MRRRRGRRTSSSSSTPPAGRXPTRWPGAGAPSGSAPSARSPPTCCGGWRTSTPAPSCTATSRRGTCWSAPAAAPCSPTSGAPGRCPAPAPRAGRSSAPRRRSWRPRWPAGRTRAPPPTSGRWAAPSSRWPPAAPRSXAWVALAAPXXRSXGSGTRTPCRRCRPGCRLRPGTSWPTASPETPPIGGPPRGSWSTRXVAFARHXDKAPRPSPKSALDAAAFWESETESEDEASGSASERIESLACSAGALPDWDGEGGWIDVLGEHCGAPGKASSVLVAVPAGEMDVGGGLPSEDGLEAEEXPFGGGGVPVPVPAADASAGRHEKHCSSSDCHALSCQLVPCNLVFNAIKLWVP

SEQ ID NO: 16097 - protein, 281 aa, Zea mays subsp. mays
  peptide (1)..(281): Ceres Seq. ID no. 12391340
  misc_feature (20)..(281): Homolog of NCBI NO: 30424862 NR Description: RIKEN cDNA 5033413A03 [Mus musculus]
  misc_feature (136)..(136): Xaa is any aa, unknown or other
  misc_feature (251)..(251): Xaa is any aa, unknown or other
  misc_feature (261)..(261): Xaa is any aa, unknown or other
  misc_feature (265)..(265): Xaa is any aa, unknown or other
ARDHYLEHPNRKIVFDRLTSHNSSSGHQQAHRKGEQNRTESHGGGRRERGALEEAADAGARRVGRRGVAGVGRRVGGAGRGQVGRRDRRGGAEAGARGAGRAALAARRALRRRRRCGGGGVVVPALPRVRPRRVAXRRGGPERGLPRGARRPRVRRRRAAGAGVPPRPLRRARRRQGAERAGRRRRPRHARRLRVRQGAVRLRLRAPADRRRHAGVHGARGGPRGGPGPPRRRLGAGLHRRRDGHRPRPVXRHGWRWRRPXGGPXDRVHGRRAGGAGLAVA

SEQ ID NO: 16098 - DNA, 2365 bp, Zea mays subsp. mays; identical to SEQ ID NO: 3951
  misc_feature (1)..(2365): Ceres Seq. ID no. 13635021
  misc_feature: MA Experiment ID: 108522 Result: Up-regulated in Transcription
  misc_feature: MA Experiment 108522 PARAMETER Experiment Name: Zm_42deg_Heat_P Parameter: Age (day) Value: 8
  misc_feature: MA Experiment 108522 PARAMETER Experiment Name: Zm_42deg_Heat_P Parameter: Organism Value: Zea mays
  misc_feature: MA Experiment 108522 PARAMETER Experiment Name: Zm_42deg_Heat_P Parameter: Plant Line Value: 35A19
  misc_feature: MA Experiment 108522 PARAMETER Experiment Name: Zm_42deg_Heat_P Parameter: Temperature (deg C) Value: 42 vs. 22
  misc_feature: MA Experiment 108522 PARAMETER Experiment Name: Zm_42deg_Heat_P Parameter: Timepoint (hr) Value: 1
  misc_feature: MA Experiment 108522 PARAMETER Experiment Name: Zm_42deg_Heat_P Parameter: Tissue Value: Aerial
  misc_feature: MA Experiment ID: 108523 Result: Up-regulated in Transcription
  misc_feature: MA Experiment 108523 PARAMETER Experiment Name: Zm_42deg_Heat_P Parameter: Age (day) Value: 8
  misc_feature: MA Experiment 108523 PARAMETER Experiment Name: Zm_42deg_Heat_P Parameter: Organism Value: Zea mays
  misc_feature: MA Experiment 108523 PARAMETER Experiment Name: Zm_42deg_Heat_P Parameter: Plant Line Value: 35A19
  misc_feature: MA Experiment 108523 PARAMETER Experiment Name: Zm_42deg_Heat_P Parameter: Temperature (deg C) Value: 42 vs. 22
  misc_feature: MA Experiment 108523 PARAMETER Experiment Name: Zm_42deg_Heat_P Parameter: Timepoint (hr) Value: 6
  misc_feature: MA Experiment 108523 PARAMETER Experiment Name: Zm_42deg_Heat_P Parameter: Tissue Value: Aerial
  misc_feature: MA Experiment ID: 108535 Result: Up-regulated in Transcription
  misc_feature: MA Experiment 108535 PARAMETER Experiment Name: Zm_Meristem_P Parameter: Age (day) Value: 8
  misc_feature: MA Experiment 108535 PARAMETER Experiment Name: Zm_Meristem_P Parameter: Organism Value: Zea mays
  misc_feature: MA Experiment 108535 PARAMETER Experiment Name: Zm_Meristem_P Parameter: Plant Line Value: 35A19
  misc_feature: MA Experiment 108535 PARAMETER Experiment Name: Zm_Meristem_P Parameter: Tissue Value: Root Meristem vs. Above Root Meristem
  misc_feature: MA Experiment ID: 108536 Result: Down-regulated in Transcription
  misc_feature: MA Experiment 108536 PARAMETER Experiment Name: Zm_Meristem_P Parameter: Age (day) Value: 8
  misc_feature: MA Experiment 108536 PARAMETER Experiment Name: Zm_Meristem_P Parameter: Organism Value: Zea mays
  misc_feature: MA Experiment 108536 PARAMETER Experiment Name: Zm_Meristem_P Parameter: Plant Line Value: 35A19
  misc_feature: MA Experiment 108536 PARAMETER Experiment Name: Zm_Meristem_P Parameter: Tissue Value: Shoot Meristem vs. Above Shoot Meristem
  misc_feature: MA Experiment ID: 108543 Result: Down-regulated in Transcription
  misc_feature: MA Experiment ID: 108544 Result: Down-regulated in Transcription
  misc_feature: MA Experiment ID: 20000108 Result: Up-regulated in Transcription
  misc_feature: MA Experiment 20000108 PARAMETER Experiment Name: Zm_Root-Tips_P Parameter: Age (day) Value: 12
  misc_feature: MA Experiment 20000108 PARAMETER Experiment Name: Zm_Root-Tips_P Parameter: Organism Value: Zea mays
  misc_feature: MA Experiment 20000108 PARAMETER Experiment Name: Zm_Root-Tips_P Parameter: Tissue Value: Root tips vs. Root mid region    35
  misc_feature: MA Experiment 20000108 PARAMETER Experiment Name: Zm_Root-Tips_P Parameter: Tissue Value: Root tips vs. Root mid region   Sequence Listing-Misc Features (4)
  misc_feature: MA Experiment ID: 20000492 Result: Up-regulated in Transcription
  misc_feature: MA Experiment 20000492 PARAMETER Experiment Name: Zm_Hybrid_Seed_Dev_P Parameter: DAP Value: 12
  misc_feature: MA Experiment 20000492 PARAMETER Experiment Name: Zm_Hybrid_Seed_Dev_P Parameter: Organism Value: Zea mays
  misc_feature: MA Experiment 20000492 PARAMETER Experiment Name: Zm_Hybrid_Seed_Dev_P Parameter: Plant Line Value: 35A19
  misc_feature: MA Experiment 20000492 PARAMETER Experiment Name: Zm_Hybrid_Seed_Dev_P Parameter: Tissue Value: Fert Kernel vs. Unfert Floret
  misc_feature: MA Experiment ID: 20000534 Result: Down-regulated in Transcription
  misc_feature: MA Experiment 20000534 PARAMETER Experiment Name: Zm_Hybrid_Pollen_P Parameter: Age (day) Value: 8
  misc_feature: MA Experiment 20000534 PARAMETER Experiment Name: Zm_Hybrid_Pollen_P Parameter: Organism Value: Zea mays
  misc_feature: MA Experiment 20000534 PARAMETER Experiment Name: Zm_Hybrid_Pollen_P Parameter: Plant Line Value: 35A19
  misc_feature: MA Experiment 20000534 PARAMETER Experiment Name: Zm_Hybrid_Pollen_P Parameter: Tissue Value: Pollen vs. Aerial

SEQ ID NO: 16099 - protein, 699 aa, Zea mays subsp. mays; identical to SEQ ID NO: 3952
  peptide (1)..(699): Ceres Seq. ID no. 13635022

SEQ ID NO: 16100 - protein, 663 aa, Zea mays subsp. mays; identical to SEQ ID NO: 3953
  peptide (1)..(663): Ceres Seq. ID no. 13635023

SEQ ID NO: 16101 - protein, 548 aa, Zea mays subsp. mays; identical to SEQ ID NO: 3954
  peptide (1)..(548): Ceres Seq. ID no. 13635024

SEQ ID NO: 16102 - DNA, 514 bp, Zea mays subsp. mays
  misc_feature (1)..(514): Ceres Seq. ID no. 2789020
  misc_feature: MA Experiment ID: 108534 Result: Up-regulated in Transcription
  misc_feature: MA Experiment 108534 PARAMETER Experiment Name: Zm_4deg_Cold_P Parameter: Age (hr) Value: 8
  misc_feature: MA Experiment 108534 PARAMETER Experiment Name: Zm_4deg_Cold_P Parameter: Organism Value: Zea mays
  misc_feature: MA Experiment 108534 PARAMETER Experiment Name: Zm_4deg_Cold_P Parameter: Plant Line Value: 35A19
  misc_feature: MA Experiment 108534 PARAMETER Experiment Name: Zm_4deg_Cold_P Parameter: Temperature (deg C) Value: 4 vs. 22
  misc_feature: MA Experiment 108534 PARAMETER Experiment Name: Zm_4deg_Cold_P Parameter: Timepoint (hr) Value: 6
  misc_feature: MA Experiment 108534 PARAMETER Experiment Name: Zm_4deg_Cold_P Parameter: Tissue Value: Aerial
  misc_feature: MA Experiment ID: 20000479 Result: Up-regulated in Transcription
  misc_feature: MA Experiment 20000479 PARAMETER Experiment Name: Zm_Drought_P Parameter: Age (day) Value: 10
  misc_feature: MA Experiment 20000479 PARAMETER Experiment Name: Zm_Drought_P Parameter: Organism Value: Zea mays
  misc_feature: MA Experiment 20000479 PARAMETER Experiment Name: Zm_Drought_P Parameter: Plant Line Value: 35A19
  misc_feature: MA Experiment 20000479 PARAMETER Experiment Name: Zm_Drought_P Parameter: Timepoint (hr) Value: 48
  misc_feature: MA Experiment 20000479 PARAMETER Experiment Name: Zm_Drought_P Parameter: Tissue Value: Aerial
  misc_feature: MA Experiment 20000479 PARAMETER Experiment Name: Zm_Drought_P Parameter: Treatment Value: Drought vs. No Drought
  misc_feature: MA Experiment ID: 20000480 Result: Up-regulated in Transcription
  misc_feature: MA Experiment 20000480 PARAMETER Experiment Name: Zm_Drought_P Parameter: Age (day) Value: 11
  misc_feature: MA Experiment 20000480 PARAMETER Experiment Name: Zm_Drought_P Parameter: Organism Value: Zea mays
  misc_feature: MA Experiment 20000480 PARAMETER Experiment Name: Zm_Drought_P Parameter: Plant Line Value: 35A19
  misc_feature: MA Experiment 20000480 PARAMETER Experiment Name: Zm_Drought_P Parameter: Timepoint (hr) Value: 72
  misc_feature: MA Experiment 20000480 PARAMETER Experiment Name: Zm_Drought_P Parameter: Tissue Value: Aerial
  misc_feature: MA Experiment 20000480 PARAMETER Experiment Name: Zm_Drought_P Parameter: Treatment Value: Drought vs. No Drought
  misc_feature: MA Experiment ID: 20000535 Result: Down-regulated in Transcription
  misc_feature: MA Experiment 20000535 PARAMETER Experiment Name: Zm_Hybrid_Seed_Dev_P Parameter: DAP Value: 30 vs. 12
  misc_feature: MA Experiment 20000535 PARAMETER Experiment Name: Zm_Hybrid_Seed_Dev_P Parameter: Organism Value: Zea mays
  misc_feature: MA Experiment 20000535 PARAMETER Experiment Name: Zm_Hybrid_Seed_Dev_P Parameter: Plant Line Value: 35A19
  misc_feature: MA Experiment 20000535 PARAMETER Experiment Name: Zm_Hybrid_Seed_Dev_P Parameter: Tissue Value: Embryo vs. Unfert Floret
gtgctctctcagaggtgggctggcttctcctccccctcttaccaagtcctcttcgggttagggttacttagggttttgtggaggggcgatggcggcggctgatgtggagtaccgttgcttcgtcggcgggcttgcctgggccaccagcaacgagtcgctggagaatgccttcgcctcctacggcgagatcctcgactccaaggtttgcttcgtcctcgctaggtttcattccgcggtctgtttgtgccgttggggctagatccgggtcgtggttcaacagatctgcttcgttttggtacagatctgcgttcgctcgaatcgagcatgacgttttcatgtgattatgcaggtcatcaccgaccgggagacggggaggtctcgcggcttcggcttcgttaccttctcctccgagaactccatgctcgacgctatcgagaacatgaacggcaaggagctcgacggccgtaacatcaccgttaaccaggcccagtccgtggcggtggcggtggcggcg

SEQ ID NO: 16103 - protein, 79 aa, Zea mays subsp. mays
  peptide (1)..(79): Ceres Seq. ID no. 2789021
MWSTVASSAGLPGPPATSRWRMPSPPTARSSTPRFASSSLGFIPRSVCAVGARSGSWFNRSASFWYRSAFARIEHDVFM

SEQ ID NO: 16104 - protein, 58 aa, Zea mays subsp. mays
  peptide (1)..(58): Ceres Seq. ID no. 2789022
MPSPPTARSSTPRFASSSLGFIPRSVCAVGARSGSWFNRSASFWYRSAFARIEHDVFM

SEQ ID NO: 16105 - protein, 56 aa, Zea mays subsp. mays
  peptide (1)..(56): Ceres Seq. ID no. 2789023
  misc_feature (1)..(39): Homolog of NCBI NO: 18076086 NR Description: glycine-rich RNA-binding protein [Ricinus
  misc_feature (1)..(39): Homolog of NCBI NO: 2331131 NR Description: glycine-rich protein [Oryza sativa]
  misc_feature (1)..(39): Homolog of NCBI NO: 7439987 NR Description: glycine-rich RNA-binding protein - rice
  misc_feature (1)..(39): Homolog of NCBI NO: 7439985 NR Description: glycine-rich RNA-binding protein - rice
  misc_feature (1)..(39): Homolog of NCBI NO: 18103931 NR Description: glycine rich RNA binding protein [Oryza sativa]
  misc_feature (1)..(39): Homolog of NCBI NO: 2293480 NR Description: glycine-rich protein [Oryza sativa]
  misc_feature (1)..(39): Homolog of NCBI NO: 2331133 NR Description: glycine-rich protein [Oryza sativa]
  misc_feature (1)..(39): Homolog of NCBI NO: 544423 NR Description: Glycine-rich RNA-binding protein 2
  misc_feature (1)..(39): Homolog of NCBI NO: 10799202 NR Description: glycine-rich RNA-binding protein [Sorghum bicolor]
  misc_feature (1)..(39): Homolog of NCBI NO: 112994 NR Description: Glycine-rich RNA-binding, abscisic acid-inducible
MAAADVEYRCFVGGLAWATSNESLENAFASYGEILDSKVCFVLARFHSAVCLCRWG

SEQ ID NO: 16106 - protein, 57 aa, Zea mays subsp. mays
  peptide (1)..(57): Ceres Seq. ID no. 2789024
  misc_feature (2)..(50): Homolog of NCBI NO: 2331133 NR Description: glycine-rich protein [Oryza sativa]
  misc_feature (2)..(50): Homolog of NCBI NO: 544423 NR Description: Glycine-rich RNA-binding protein 2
  misc_feature (2)..(50): Homolog of NCBI NO: 10799202 NR Description: glycine-rich RNA-binding protein [Sorghum bicolor]
  misc_feature (2)..(50): Homolog of NCBI NO: 112994 NR Description: Glycine-rich RNA-binding, abscisic acid-inducible
  misc_feature (2)..(50): Homolog of NCBI NO: 18103931 NR Description: glycine rich RNA binding protein [Oryza sativa]
  misc_feature (2)..(50): Homolog of NCBI NO: 2293480 NR Description: glycine-rich protein [Oryza sativa]
  misc_feature (2)..(50): Homolog of NCBI NO: 18076086 NR Description: glycine-rich RNA-binding protein [Ricinus
  misc_feature (2)..(50): Homolog of NCBI NO: 2331131 NR Description: glycine-rich protein [Oryza sativa]
  misc_feature (2)..(50): Homolog of NCBI NO: 7439987 NR Description: glycine-rich RNA-binding protein - rice
  misc_feature (2)..(50): Homolog of NCBI NO: 7439985 NR Description: glycine-rich RNA-binding protein - rice
MQVITDRETGRSRGFGFVTFSSENSMLDAIENMNGKELDGRNITVNQAQSVAVAVAA

SEQ ID NO: 16107 - DNA, 1648 bp, Zea mays subsp. mays; identical to SEQ ID NO: 9782
  misc_feature (1)..(1648): Ceres Seq. ID no. 12595157
  misc_feature: MA Experiment ID: 108687 Result: Down-regulated in Transcription
  misc_feature: MA Experiment 108687 PARAMETER Experiment Name: Zm_Embryos-Flowers__P Parameter: Tissue Value: Embryo vs. Aerial+

SEQ ID NO: 16108 - protein, 338 aa, Zea mays subsp. mays; identical to SEQ ID NO: 9783
  peptide (1)..(338): Ceres Seq. ID no. 12595158
  misc_feature (31)..(159): Pfam Name: No apical meristem (NAM) protein Pfam Description: No apical meristem (NAM) protein
  misc_feature (10)..(338): Homolog of NCBI NO: 28411877 NR Description: putative NAM [Oryza sativa (japonica
  misc_feature (9)..(185): Homolog of NCBI NO: 15223043 NR Description: unknown protein; protein id: At1g76420.1
  misc_feature (43)..(185): Homolog of NCBI NO: 21389170 NR Description: nam-like protein 16 [Petunia x hybrida]
  misc_feature (28)..(182): Homolog of NCBI NO: 1279640 NR Description: NAM [Petunia x hybrida]
  misc_feature (31)..(312): Homolog of NCBI NO: 15232511 NR Description: NAM-like protein; protein id: At3g15170.1, by cDNA: gi_12060421 [Arabidopsis thaliana]
  misc_feature (26)..(181): Homolog of NCBI NO: 15238882 NR Description: CUC2 (dbj|BAA19529.1); protein id: At5g53950.1 thaliana] >gi|1944132|dbj|BAA19529.1| CUC2 [Arabidopsis thaliana]
  misc_feature (31)..(291): Homolog of NCBI NO: 11994506 NR Description: contains similarity to NAM (no apical meristem)
  misc_feature (28)..(181): Homolog of NCBI NO: 40737029 NR Description: putative OsNAC1 protein [Oryza sativa (japonica
  misc_feature (28)..(215): Homolog of NCBI NO: 15241819 NR Description: NAM / CUC2 - like protein; protein id: supported by cDNA: 113779., supported by cDNA: gi_15810576, by cDNA: gi_20259574 [Arabidopsis thaliana]
  misc_feature (28)..(215): Homolog of NCBI NO: 21536866 NR Description: NAM / CUC2-like protein [Arabidopsis thaliana]
  misc_feature (230)..(230): Xaa is any aa, unknown or other

SEQ ID NO: 16109 - protein, 329 aa, Zea mays subsp. mays; identical to SEQ ID NO: 9784
  peptide (1)..(329): Ceres Seq. ID no. 12595159
  misc_feature (22)..(150): Pfam Name: No apical meristem (NAM) protein Pfam Description: No apical meristem (NAM) protein
  misc_feature (1)..(329): Homolog of NCBI NO: 28411877 NR Description: putative NAM [Oryza sativa (japonica
  misc_feature (1)..(176): Homolog of NCBI NO: 15223043 NR Description: unknown protein; protein id: At1g76420.1
  misc_feature (34)..(176): Homolog of NCBI NO: 21389170 NR Description: nam-like protein 16 [Petunia x hybrida]
  misc_feature (19)..(173): Homolog of NCBI NO: 1279640 NR Description: NAM [Petunia x hybrida]
  misc_feature (22)..(303): Homolog of NCBI NO: 15232511 NR Description: NAM-like protein; protein id: At3g15170.1, by cDNA: gi_12060421 [Arabidopsis thaliana]
  misc_feature (17)..(172): Homolog of NCBI NO: 15238882 NR Description: CUC2 (dbj|BAA19529.1); protein id: At5g53950.1 thaliana] >gi|1944132|dbj|BAA19529.1| CUC2 [Arabidopsis thaliana]
  misc_feature (22)..(282): Homolog of NCBI NO: 11994506 NR Description: contains similarity to NAM (no apical meristem)
  misc_feature (19)..(172): Homolog of NCBI NO: 40737029 NR Description: putative OsNAC1 protein [Oryza sativa (japonica
  misc_feature (19)..(206): Homolog of NCBI NO: 15241819 NR Description: NAM / CUC2 - like protein; protein id: supported by cDNA: 113779., supported by cDNA: gi_15810576, by cDNA: gi_20259574 [Arabidopsis thaliana]
  misc_feature (19)..(206): Homolog of NCBI NO: 21536866 NR Description: NAM / CUC2-like protein [Arabidopsis thaliana]
  misc_feature (221)..(221): Xaa is any aa, unknown or other

SEQ ID NO: 16110 - protein, 317 aa, Zea mays subsp. mays; identical to SEQ ID NO: 9785
  peptide (1)..(317): Ceres Seq. ID no. 12595160
  misc_feature (10)..(138): Pfam Name: No apical meristem (NAM) protein Pfam Description: No apical meristem (NAM) protein
  misc_feature (1)..(317): Homolog of NCBI NO: 28411877 NR Description: putative NAM [Oryza sativa (japonica
  misc_feature (1)..(164): Homolog of NCBI NO: 15223043 NR Description: unknown protein; protein id: At1g76420.1
  misc_feature (22)..(164): Homolog of NCBI NO: 21389170 NR Description: nam-like protein 16 [Petunia x hybrida]
  misc_feature (7)..(161): Homolog of NCBI NO: 1279640 NR Description: NAM [Petunia x hybrida]
  misc_feature (10)..(291): Homolog of NCBI NO: 15232511 NR Description: NAM-like protein; protein id: At3g15170.1, by cDNA: gi_12060421 [Arabidopsis thaliana]
  misc_feature (5)..(160): Homolog of NCBI NO: 15238882 NR Description: CUC2 (dbj|BAA19529.1); protein id: At5g53950.1 thaliana] >gi|1944132|dbj|BAA19529.1| CUC2 [Arabidopsis thaliana]
  misc_feature (10)..(270): Homolog of NCBI NO: 11994506 NR Description: contains similarity to NAM (no apical meristem)
  misc_feature (7)..(160): Homolog of NCBI NO: 40737029 NR Description: putative OsNAC1 protein [Oryza sativa (japonica
  misc_feature (7)..(194): Homolog of NCBI NO: 15241819 NR Description: NAM / CUC2 - like protein; protein id: supported by cDNA: 113779., supported by cDNA: gi_15810576, by cDNA: gi_20259574 [Arabidopsis thaliana]
  misc_feature (7)..(194): Homolog of NCBI NO: 21536866 NR Description: NAM / CUC2-like protein [Arabidopsis thaliana]
  misc_feature (209)..(209): Xaa is any aa, unknown or other

SEQ ID NO: 16111 - DNA, 1240 bp, Zea mays subsp. mays
  misc_feature (1)..(1240): Ceres Seq. ID no. 14309637
  misc_feature: MA Experiment ID: 108535 Result: Down-regulated in Transcription
  misc_feature: MA Experiment 108535 PARAMETER Experiment Name: Zm_Meristem_P Parameter: Age (day) Value: 8
  misc_feature: MA Experiment 108535 PARAMETER Experiment Name: Zm_Meristem_P Parameter: Organism Value: Zea mays
  misc_feature: MA Experiment 108535 PARAMETER Experiment Name: Zm_Meristem_P Parameter: Plant Line Value: 35A19
  misc_feature: MA Experiment 108535 PARAMETER Experiment Name: Zm_Meristem_P Parameter: Tissue Value: Root Meristem vs. Above Root Meristem
  misc_feature: MA Experiment ID: 108543 Result: Up-regulated in Transcription
  misc_feature: MA Experiment ID: 108544 Result: Down-regulated in Transcription
  misc_feature: MA Experiment ID: 108556 Result: Down-regulated in Transcription
  misc_feature: MA Experiment 108556 PARAMETER Experiment Name: Zm_Drought_P Parameter: Age (day) Value: 9
  misc_feature: MA Experiment 108556 PARAMETER Experiment Name: Zm_Drought_P Parameter: Organism Value: Zea mays
  misc_feature: MA Experiment 108556 PARAMETER Experiment Name: Zm_Drought_P Parameter: Plant Line Value: 35A19
  misc_feature: MA Experiment 108556 PARAMETER Experiment Name: Zm_Drought_P Parameter: Timepoint (hr) Value: 24
  misc_feature: MA Experiment 108556 PARAMETER Experiment Name: Zm_Drought_P Parameter: Tissue Value: Aerial
  misc_feature: MA Experiment 108556 PARAMETER Experiment Name: Zm_Drought_P Parameter: Treatment Value: Drought vs. No Drought
  misc_feature: MA Experiment ID: 108687 Result: Down-regulated in Transcription
  misc_feature: MA Experiment 108687 PARAMETER Experiment Name: Zm_Embryos-Flowers__P Parameter: Tissue Value: Embryo vs. Aerial+
  misc_feature: MA Experiment ID: 20000477 Result: Down-regulated in Transcription
  misc_feature: MA Experiment 20000477 PARAMETER Experiment Name: Zm_5mM_SA_P Parameter: Age (day) Value: 10
  misc_feature: MA Experiment 20000477 PARAMETER Experiment Name: Zm_5mM_SA_P Parameter: Organism Value: Zea mays
  misc_feature: MA Experiment 20000477 PARAMETER Experiment Name: Zm_5mM_SA_P Parameter: Plant Line Value: 35A19
  misc_feature: MA Experiment 20000477 PARAMETER Experiment Name: Zm_5mM_SA_P Parameter: Timepoint (hr) Value: 48
  misc_feature: MA Experiment 20000477 PARAMETER Experiment Name: Zm_5mM_SA_P Parameter: Tissue Value: Aerial
  misc_feature: MA Experiment 20000477 PARAMETER Experiment Name: Zm_5mM_SA_P Parameter: Treatment Value: 5mM SA vs. No Treatment
  misc_feature: MA Experiment ID: 20000479 Result: Down-regulated in Transcription
  misc_feature: MA Experiment 20000479 PARAMETER Experiment Name: Zm_Drought_P Parameter: Age (day) Value: 10
  misc_feature: MA Experiment 20000479 PARAMETER Experiment Name: Zm_Drought_P Parameter: Organism Value: Zea mays
  misc_feature: MA Experiment 20000479 PARAMETER Experiment Name: Zm_Drought_P Parameter: Plant Line Value: 35A19
  misc_feature: MA Experiment 20000479 PARAMETER Experiment Name: Zm_Drought_P Parameter: Timepoint (hr) Value: 48
  misc_feature: MA Experiment 20000479 PARAMETER Experiment Name: Zm_Drought_P Parameter: Tissue Value: Aerial
  misc_feature: MA Experiment 20000479 PARAMETER Experiment Name: Zm_Drought_P Parameter: Treatment Value: Drought vs. No Drought
  misc_feature: MA Experiment ID: 20000480 Result: Down-regulated in Transcription
  misc_feature: MA Experiment 20000480 PARAMETER Experiment Name: Zm_Drought_P Parameter: Age (day) Value: 11
  misc_feature: MA Experiment 20000480 PARAMETER Experiment Name: Zm_Drought_P Parameter: Organism Value: Zea mays
  misc_feature: MA Experiment 20000480 PARAMETER Experiment Name: Zm_Drought_P Parameter: Plant Line Value: 35A19
  misc_feature: MA Experiment 20000480 PARAMETER Experiment Name: Zm_Drought_P Parameter: Timepoint (hr) Value: 72
  misc_feature: MA Experiment 20000480 PARAMETER Experiment Name: Zm_Drought_P Parameter: Tissue Value: Aerial
  misc_feature: MA Experiment 20000480 PARAMETER Experiment Name: Zm_Drought_P Parameter: Treatment Value: Drought vs. No Drought
  misc_feature: MA Experiment ID: 20000488 Result: Down-regulated in Transcription
  misc_feature: MA Experiment 20000488 PARAMETER Experiment Name: Zm_50mM_NH4NO3_L_to_H_P Parameter: Organism Value: Zea mays
  misc_feature: MA Experiment 20000488 PARAMETER Experiment Name: Zm_50mM_NH4NO3_L_to_H_P Parameter: Timepoint (hr) Value: 8
  misc_feature: MA Experiment 20000488 PARAMETER Experiment Name: Zm_50mM_NH4NO3_L_to_H_P Parameter: Tissue Value: Leaves
  misc_feature: MA Experiment 20000488 PARAMETER Experiment Name: Zm_50mM_NH4NO3_L_to_H_P Parameter: Treatment Value: 50mM NH4NO3 vs. 100mM Mannitol
  misc_feature: MA Experiment ID: 20000534 Result: Down-regulated in Transcription
  misc_feature: MA Experiment 20000534 PARAMETER Experiment Name: Zm_Hybrid_Pollen_P Parameter: Age (day) Value: 8
  misc_feature: MA Experiment 20000534 PARAMETER Experiment Name: Zm_Hybrid_Pollen_P Parameter: Organism Value: Zea mays
  misc_feature: MA Experiment 20000534 PARAMETER Experiment Name: Zm_Hybrid_Pollen_P Parameter: Plant Line Value: 35A19
  misc_feature: MA Experiment 20000534 PARAMETER Experiment Name: Zm_Hybrid_Pollen_P Parameter: Tissue Value: Pollen vs. Aerial
  misc_feature: MA Experiment ID: 20000626 Result: Down-regulated in Transcription
  misc_feature: MA Experiment 20000626 PARAMETER Experiment Name: Zm_Herbicide-Treatments_P Parameter: Timepoint (hr) Value: 12
  misc_feature: MA Experiment 20000626 PARAMETER Experiment Name: Zm_Herbicide-Treatments_P Parameter: Tissue Value: Aerial
  misc_feature: MA Experiment 20000626 PARAMETER Experiment Name: Zm_Herbicide-Treatments_P Parameter: Treatment Value: Roundup vs. No Treatment
gcagcacacaacctaccacactcgcattgcattgcattgcattccttcagttcagtagtgtgctctgacagtgagatggcgagcgtgaaggttttcgggtcacccacctcggcggaggtcgcccgcgtgctcatgtgcctcttcgagaaggaggtggagttccagctgatccgcgtcgacgcctaccgcggcaccaagcgcatgccccagtacctcaagctgcagccgcaaggcgaggcgctcaccttcgaggacgagagcctcaccctctccgactccagggggatcctccgccacatctcccacaagtacgcgaagcagggcaacccgtacctgattggcacgggcgcgctggagcgggcgtccatcgagcagtggctgcagacggaggcgcagagcttcgacgcgcccagcgccgagatggtctacagcctcgccttcctgccgcccaccctgcccaggcagaacgacaacggcaacggcggcgcgttcaacgccagggaagccaccgtgggcagtaacgccgacgcgtccagcagcaagcgcggtgtggccgggtcacagccggcggcaagccagaccaaggtgagcgcgcagaaggaggaggagatgctgaagctgttcgagcagaggaagaaggacctggagaagctgctggacatctacgagcagcgcctggaggaggccacgttcctggccggcgacaacttcaccatcgccgacctgtcgcacctgccctacgcggaccacctcgtctccgacccgcgctcccgccgcatgttcgagtcccgcaagaacgtcagcaggtggtggcacgacgtctccggccgcgacacctggaagtacgtcaagaccctgcagcgcccgccgtccacgtccaccgacgccagcgccaagaacggccagctgggccagcagcagcacctgccgtcgtccaccgacggccacggcgtgaagagccaacggctggtccagaacgagcggcacttctagccgttgccgtcccttcccgccgacgaataaactacctgcgccgccgccaccgccgccgtccatcaacatggttcctgctgctgttcgtgtcgttttcatacgtcatacgtgtcttgctgcttttgaagctccgttcccgggtgcagggacctacgagtccattccgccgtttgctcattctgttcgtcgtgtaataaaatgaaaaccccaccccgttttgaatgaaattcaattctcagtgttgtgc

SEQ ID NO: 16112 - protein, 330 aa, Zea mays subsp. mays
  peptide (1)..(330): Ceres Seq. ID no. 14309638
  misc_feature (121)..(278): Pfam Name: Glutathione S-transferase, C-terminal domain Pfam Description: Glutathione S-transferase, C-terminal domain
  misc_feature (27)..(149): Homolog of NCBI NO: 11385469 NR Description: glutathione S-transferase GST 9 [Zea mays]
  misc_feature (210)..(288): Homolog of NCBI NO: 11385475 NR Description: glutathione S-transferase GST 12 [Zea mays]
  misc_feature (27)..(149): Homolog of NCBI NO: 11385475 NR Description: glutathione S-transferase GST 12 [Zea mays]
  misc_feature (206)..(287): Homolog of NCBI NO: 22758269 NR Description: Putative glutathione S-transferase
  misc_feature (27)..(149): Homolog of NCBI NO: 22758269 NR Description: Putative glutathione S-transferase
  misc_feature (176)..(291): Homolog of NCBI NO: 11385479 NR Description: glutathione S-transferase GST 14 [Zea mays]
  misc_feature (29)..(162): Homolog of NCBI NO: 11385479 NR Description: glutathione S-transferase GST 14 [Zea mays]
  misc_feature (28)..(291): Homolog of NCBI NO: 37536564 NR Description: putative glutathione S-transferase
  misc_feature (27)..(330): Homolog of NCBI NO: 22758271 NR Description: Putative glutathione S-transferase
  misc_feature (26)..(110): Homolog of NCBI NO: 11385473 NR Description: glutathione S-transferase GST 11 [Zea mays]
AAHNLPHSHCIALHSFSSVVCSDSEMASVKVFGSPTSAEVARVLMCLFEKEVEFQLIRVDAYRGTKRMPQYLKLQPQGEALTFEDESLTLSDSRGILRHISHKYAKQGNPYLIGTGALERASIEQWLQTEAQSFDAPSAEMVYSLAFLPPTLPRQNDNGNGGAFNAREATVGSNADASSSKRGVAGSQPAASQTKVSAQKEEEMLKLFEQRKKDLEKLLDIYEQRLEEATFLAGDNFTIADLSHLPYADHLVSDPRSRRMFESRKNVSRWWHDVSGRDTWKYVKTLQRPPSTSTDASAKNGQLGQQQHLPSSTDGHGVKSQRLVQNERHF

SEQ ID NO: 16113 - protein, 305 aa, Zea mays subsp. mays
  peptide (1)..(305): Ceres Seq. ID no. 14309639
  misc_feature (96)..(253): Pfam Name: Glutathione S-transferase, C-terminal domain Pfam Description: Glutathione S-transferase, C-terminal domain
  misc_feature (2)..(124): Homolog of NCBI NO: 11385469 NR Description: glutathione S-transferase GST 9 [Zea mays]
  misc_feature (185)..(263): Homolog of NCBI NO: 11385475 NR Description: glutathione S-transferase GST 12 [Zea mays]
  misc_feature (2)..(124): Homolog of NCBI NO: 11385475 NR Description: glutathione S-transferase GST 12 [Zea mays]
  misc_feature (181)..(262): Homolog of NCBI NO: 22758269 NR Description: Putative glutathione S-transferase
  misc_feature (2)..(124): Homolog of NCBI NO: 22758269 NR Description: Putative glutathione S-transferase
  misc_feature (151)..(266): Homolog of NCBI NO: 11385479 NR Description: glutathione S-transferase GST 14 [Zea mays]
  misc_feature (4)..(137): Homolog of NCBI NO: 11385479 NR Description: glutathione S-transferase GST 14 [Zea mays]
  misc_feature (3)..(266): Homolog of NCBI NO: 37536564 NR Description: putative glutathione S-transferase
  misc_feature (2)..(305): Homolog of NCBI NO: 22758271 NR Description: Putative glutathione S-transferase
  misc_feature (1)..(85): Homolog of NCBI NO: 11385473 NR Description: glutathione S-transferase GST 11 [Zea mays]
MASVKVFGSPTSAEVARVLMCLFEKEVEFQLIRVDAYRGTKRMPQYLKLQPQGEALTFEDESLTLSDSRGILRHISHKYAKQGNPYLIGTGALERASIEQWLQTEAQSFDAPSAEMVYSLAFLPPTLPRQNDNGNGGAFNAREATVGSNADASSSKRGVAGSQPAASQTKVSAQKEEEMLKLFEQRKKDLEKLLDIYEQRLEEATFLAGDNFTIADLSHLPYADHLVSDPRSRRMFESRKNVSRWWHDVSGRDTWKYVKTLQRPPSTSTDASAKNGQLGQQQHLPSSTDGHGVKSQRLVQNERHF

SEQ ID NO: 16114 - protein, 286 aa, Zea mays subsp. mays
  peptide (1)..(286): Ceres Seq. ID no. 14309640
  misc_feature (77)..(234): Pfam Name: Glutathione S-transferase, C-terminal domain Pfam Description: Glutathione S-transferase, C-terminal domain
  misc_feature (1)..(105): Homolog of NCBI NO: 11385469 NR Description: glutathione S-transferase GST 9 [Zea mays]
  misc_feature (166)..(244): Homolog of NCBI NO: 11385475 NR Description: glutathione S-transferase GST 12 [Zea mays]
  misc_feature (1)..(105): Homolog of NCBI NO: 11385475 NR Description: glutathione S-transferase GST 12 [Zea mays]
  misc_feature (162)..(243): Homolog of NCBI NO: 22758269 NR Description: Putative glutathione S-transferase
  misc_feature (1)..(105): Homolog of NCBI NO: 22758269 NR Description: Putative glutathione S-transferase
  misc_feature (132)..(247): Homolog of NCBI NO: 11385479 NR Description: glutathione S-transferase GST 14 [Zea mays]
  misc_feature (1)..(118): Homolog of NCBI NO: 11385479 NR Description: glutathione S-transferase GST 14 [Zea mays]
  misc_feature (1)..(247): Homolog of NCBI NO: 37536564 NR Description: putative glutathione S-transferase
  misc_feature (1)..(286): Homolog of NCBI NO: 22758271 NR Description: Putative glutathione S-transferase
  misc_feature (1)..(66): Homolog of NCBI NO: 11385473 NR Description: glutathione S-transferase GST 11 [Zea mays]
MCLFEKEVEFQLIRVDAYRGTKRMPQYLKLQPQGEALTFEDESLTLSDSRGILRHISHKYAKQGNPYLIGTGALERASIEQWLQTEAQSFDAPSAEMVYSLAFLPPTLPRQNDNGNGGAFNAREATVGSNADASSSKRGVAGSQPAASQTKVSAQKEEEMLKLFEQRKKDLEKLLDIYEQRLEEATFLAGDNFTIADLSHLPYADHLVSDPRSRRMFESRKNVSRWWHDVSGRDTWKYVKTLQRPPSTSTDASAKNGQLGQQQHLPSSTDGHGVKSQRLVQNERHF

SEQ ID NO: 16115 - DNA, 1483 bp, Zea mays subsp. mays
  misc_feature (1)..(1483): Ceres Seq. ID no. 12367762
  misc_feature: MA Experiment ID: 20000477 Result: Down-regulated in Transcription
  misc_feature: MA Experiment 20000477 PARAMETER Experiment Name: Zm_5mM_SA_P Parameter: Age (day) Value: 10
  misc_feature: MA Experiment 20000477 PARAMETER Experiment Name: Zm_5mM_SA_P Parameter: Organism Value: Zea mays
  misc_feature: MA Experiment 20000477 PARAMETER Experiment Name: Zm_5mM_SA_P Parameter: Plant Line Value: 35A19
  misc_feature: MA Experiment 20000477 PARAMETER Experiment Name: Zm_5mM_SA_P Parameter: Timepoint (hr) Value: 48
  misc_feature: MA Experiment 20000477 PARAMETER Experiment Name: Zm_5mM_SA_P Parameter: Tissue Value: Aerial
  misc_feature: MA Experiment 20000477 PARAMETER Experiment Name: Zm_5mM_SA_P Parameter: Treatment Value: 5mM SA vs. No Treatment
aactagcacctccgcctcgcggctcgctccatcccttccaccaccaccgcctcaccagtcaccactcccctatcacgggacgggaccaccgccgccgcgtcctatgacgtcgccgtcctcgcaccacccggactccacctcggcgtcctctacccctcgcgccggtgtcgggaacggcggcatccaccacctccatccgccatctctgcacccggcgcccgcgcctaccccggctgctccccccgcgcaggcgcaggcggcgcacgggggcccgcaagtgcgcctcatgtgcagcttcggcggccgcatcttaccgcgccctggggaccgccagctgcgctacgtcggcggggagacccgcatcgtctccttcccgcgcgccgcaacttccttcgccgccctcgtcgccgcgctcgccaaggtcgcgcccgtgctcttcgccccgggggcgcccaggccgtcgctcaagtaccagctgccccaggacgacctcgactcgctcgtctccatcacctccgacgacgacgtcgaccacctcatggacgagcttgaccgcatccaagacctctccgccaacgtcgccaggccaccccgcctccgcgtcttcctcttcgcgcccgcgcctgacgccgccttcggctccgtcttctccggcaccaccagtgaggccgcctccaccgaccagtggtttgtcgacgcgctaaacgcccccgcgccgcagccgcaccccaccgagcgcggccgatccgaggcctcctcgatcgtctccgaggtccccgactacctcttcggcctcgaaaccacgtccggtgagcccagccccggccccgcggccgtccgcgccaagtccgatgccacggagactccgcgccaccacgacgacgacgaatgcgacgtgccaccttccgcgcgccagatgccgtacgtcgtagagggagcgtcatcgtggcccgcccccgccgccgccgtacatggcgcagcctgtgtactacttccccgtgccgccgccggtccactatctcgaaccgtctgcgcagggcggctacatgcctcgcccggtctaccacattgtcggtggcggaggaagcgaggcgcctggcggagatcttcacgcggccggcggcgtctacggcgtcccgcaggcacatgcaggcgttcccggcgatgatgtacgcgccgccgcgcgcggtcgtctacaactacaactcggaggggatgccatcgctgcctcccgaaggtggggcacactcttcctaggcgcatcggctgcttcacatctctggttcctgattattattgcagatgcctgagttctgcgtgcgtattagatttttatcgattcgtcttggttggtgtatagatgactaagatgagggaggcggatgatggatagatattattgcagttttcgtctagtggaaatatattcgtgaaatggatctatgagcatgatataatactaagtagtatagtatttggtgtg

SEQ ID NO: 16116 - protein, 388 aa, Zea mays subsp. mays
  peptide (1)..(388): Ceres Seq. ID no. 12367763
  misc_feature (12)..(92): Pfam Name: Extensin-like region Pfam Description: Extensin-like region
  misc_feature (27)..(271): Homolog of NCBI NO: 21553908 NR Description: unknown [Arabidopsis thaliana]
  misc_feature (29)..(254): Homolog of NCBI NO: 15229599 NR Description: unknown protein; protein id: At3g18230.1
  misc_feature (10)..(81): Homolog of NCBI NO: 6523547 NR Description: hydroxyproline-rich glycoprotein DZ-HRGP
  misc_feature (8)..(82): Homolog of NCBI NO: 6523547 NR Description: hydroxyproline-rich glycoprotein DZ-HRGP
  misc_feature (75)..(293): Homolog of NCBI NO: 15237703 NR Description: putative protein
  misc_feature (10)..(91): Homolog of NCBI NO: 20138131 NR Description: Vegetative cell wall protein gp1 precursor
  misc_feature (13)..(91): Homolog of NCBI NO: 20138131 NR Description: Vegetative cell wall protein gp1 precursor
  misc_feature (91)..(317): Homolog of NCBI NO: 25407315 NR Description: hypothetical protein AT4g05150 [imported] -
  misc_feature (91)..(317): Homolog of NCBI NO: 18412822 NR Description: putative protein
  misc_feature (14)..(275): Homolog of NCBI NO: 34895646 NR Description: P0480E02.2 [Oryza sativa (japonica
TSTSASRLAPSLPPPPPHQSPLPYHGTGPPPPRPMTSPSSHHPDSTSASSTPRAGVGNGGIHHLHPPSLHPAPAPTPAAPPAQAQAAHGGPQVRLMCSFGGRILPRPGDRQLRYVGGETRIVSFPRAATSFAALVAALAKVAPVLFAPGAPRPSLKYQLPQDDLDSLVSITSDDDVDHLMDELDRIQDLSANVARPPRLRVFLFAPAPDAAFGSVFSGTTSEAASTDQWFVDALNAPAPQPHPTERGRSEASSIVSEVPDYLFGLETTSGEPSPGPAAVRAKSDATETPRHHDDDECDVPPSARQMPYVVEGASSWPAPAAAVHGAACVLLPRAAAGPLSRTVCAGRLHASPGLPHCRWRRKRGAWRRSSRGRRRLRRPAGTCRRSRR

SEQ ID NO: 16117 - protein, 354 aa, Zea mays subsp. mays
  peptide (1)..(354): Ceres Seq. ID no. 12367764
  misc_feature (1)..(58): Pfam Name: Extensin-like region Pfam Description: Extensin-like region
  misc_feature (1)..(237): Homolog of NCBI NO: 21553908 NR Description: unknown [Arabidopsis thaliana]
  misc_feature (1)..(220): Homolog of NCBI NO: 15229599 NR Description: unknown protein; protein id: At3g18230.1
  misc_feature (1)..(47): Homolog of NCBI NO: 6523547 NR Description: hydroxyproline-rich glycoprotein DZ-HRGP
  misc_feature (1)..(48): Homolog of NCBI NO: 6523547 NR Description: hydroxyproline-rich glycoprotein DZ-HRGP
  misc_feature (41)..(259): Homolog of NCBI NO: 15237703 NR Description: putative protein
  misc_feature (1)..(57): Homolog of NCBI NO: 20138131 NR Description: Vegetative cell wall protein gp1 precursor
  misc_feature (1)..(57): Homolog of NCBI NO: 20138131 NR Description: Vegetative cell wall protein gp1 precursor
  misc_feature (57)..(283): Homolog of NCBI NO: 25407315 NR Description: hypothetical protein AT4g05150 [imported] -
  misc_feature (57)..(283): Homolog of NCBI NO: 18412822 NR Description: putative protein
  misc_feature (1)..(241): Homolog of NCBI NO: 34895646 NR Description: P0480E02.2 [Oryza sativa (japonica
MTSPSSHHPDSTSASSTPRAGVGNGGIHHLHPPSLHPAPAPTPAAPPAQAQAAHGGPQVRLMCSFGGRILPRPGDRQLRYVGGETRIVSFPRAATSFAALVAALAKVAPVLFAPGAPRPSLKYQLPQDDLDSLVSITSDDDVDHLMDELDRIQDLSANVARPPRLRVFLFAPAPDAAFGSVFSGTTSEAASTDQWFVDALNAPAPQPHPTERGRSEASSIVSEVPDYLFGLETTSGEPSPGPAAVRAKSDATETPRHHDDDECDVPPSARQMPYVVEGASSWPAPAAAVHGAACVLLPRAAAGPLSRTVCAGRLHASPGLPHCRWRRKRGAWRRSSRGRRRLRRPAGTCRRSRR

SEQ ID NO: 16118 - protein, 293 aa, Zea mays subsp. mays
  peptide (1)..(293): Ceres Seq. ID no. 12367765
  misc_feature (12)..(109): Pfam Name: PB1 domain Pfam Description: PB1 domain
  misc_feature (1)..(141): Homolog of NCBI NO: 25410886 NR Description: hypothetical protein At2g01190 [imported] -
  misc_feature (1)..(12): Homolog of NCBI NO: 20138131 NR Description: Vegetative cell wall protein gp1 precursor
  misc_feature (1)..(176): Homolog of NCBI NO: 18379168 NR Description: expressed protein
  misc_feature (1)..(176): Homolog of NCBI NO: 21553908 NR Description: unknown [Arabidopsis thaliana]
  misc_feature (1)..(159): Homolog of NCBI NO: 15229599 NR Description: unknown protein; protein id: At3g18230.1
  misc_feature (1)..(179): Homolog of NCBI NO: 15242462 NR Description: putative protein; protein id: At5g09620.1
  misc_feature (1)..(198): Homolog of NCBI NO: 15237703 NR Description: putative protein
  misc_feature (1)..(222): Homolog of NCBI NO: 25407315 NR Description: hypothetical protein AT4g05150 [imported] -
  misc_feature (1)..(222): Homolog of NCBI NO: 18412822 NR Description: putative protein
  misc_feature (1)..(180): Homolog of NCBI NO: 34895646 NR Description: P0480E02.2 [Oryza sativa (japonica
MCSFGGRILPRPGDRQLRYVGGETRIVSFPRAATSFAALVAALAKVAPVLFAPGAPRPSLKYQLPQDDLDSLVSITSDDDVDHLMDELDRIQDLSANVARPPRLRVFLFAPAPDAAFGSVFSGTTSEAASTDQWFVDALNAPAPQPHPTERGRSEASSIVSEVPDYLFGLETTSGEPSPGPAAVRAKSDATETPRHHDDDECDVPPSARQMPYVVEGASSWPAPAAAVHGAACVLLPRAAAGPLSRTVCAGRLHASPGLPHCRWRRKRGAWRRSSRGRRRLRRPAGTCRRSRR

SEQ ID NO: 16119 - DNA, 520 bp, Zea mays subsp. mays
  misc_feature (1)..(520): Ceres Seq. ID no. 1601784
  misc_feature: MA Experiment ID: 20000535 Result: Up-regulated in Transcription
  misc_feature: MA Experiment 20000535 PARAMETER Experiment Name: Zm_Hybrid_Seed_Dev_P Parameter: DAP Value: 30 vs. 12
  misc_feature: MA Experiment 20000535 PARAMETER Experiment Name: Zm_Hybrid_Seed_Dev_P Parameter: Organism Value: Zea mays
  misc_feature: MA Experiment 20000535 PARAMETER Experiment Name: Zm_Hybrid_Seed_Dev_P Parameter: Plant Line Value: 35A19
  misc_feature: MA Experiment 20000535 PARAMETER Experiment Name: Zm_Hybrid_Seed_Dev_P Parameter: Tissue Value: Embryo vs. Unfert Floret
aaccgaggtcccccaatcccccaaacatttcccccaaacatttttttgtcgagatctgtcgtgagatcctccccgacgagatggcggggaagggagccaaggccacggccgccaagtcggcggacaaggacaaggggaagaaggccggcggccccgtctcgcgctcctcccgcgccgcacctcaggagaattcaactccgaagaaagatgtttatcaattgttcgctgagaaggttagggataacaaacagctggaatcaagatgggcaatcatgcaagaaacccgtgtggagtattttcgtggaaaagatttcaatgccttcatcaagaattatccagaagtcagggaaattttggggccagataaggatttagaagtggaagacattgttaacactttgttgaccaagaaccttgtgataaggtgtgaccgagttatgaaaactgtgaggcctggcaagaaaaagttatcatcatggcctgctcactttggagatacataatgaacaagtgtttactg

SEQ ID NO: 16120 - protein, 124 aa, Zea mays subsp. mays
  peptide (1)..(124): Ceres Seq. ID no. 1601785
NRGPPIPQTFPPNIFLSRSVVRSSPTRWRGREPRPRPPSRRTRTRGRRPAAPSRAPPAPHLRRIQLRRKMFINCSLRRLGITNSWNQDGQSCKKPVWSIFVEKISMPSSRIIQKSGKFWGQIRI

SEQ ID NO: 16121 - protein, 166 aa, Zea mays subsp. mays
  peptide (1)..(166): Ceres Seq. ID no. 1601786
  misc_feature (93)..(162): Pfam Name: Translocation protein Sec62 Pfam Description: Translocation protein Sec62
  misc_feature (40)..(162): Homolog of NCBI NO: 21593719 NR Description: unknown [Arabidopsis thaliana]
  misc_feature (40)..(162): Homolog of NCBI NO: 18402801 NR Description: expressed protein
PRSPNPPNISPKHFFVEICREILPDEMAGKGAKATAAKSADKDKGKKAGGPVSRSSRAAPQENSTPKKDVYQLFAEKVRDNKQLESRWAIMQETRVEYFRGKDFNAFIKNYPEVREILGPDKDLEVEDIVNTLLTKNLVIRCDRVMKTVRPGKKKLSSWPAHFGDT

SEQ ID NO: 16122 - protein, 140 aa, Zea mays subsp. mays
  peptide (1)..(140): Ceres Seq. ID no. 1601787
  misc_feature (67)..(136): Pfam Name: Translocation protein Sec62 Pfam Description: Translocation protein Sec62
  misc_feature (14)..(136): Homolog of NCBI NO: 21593719 NR Description: unknown [Arabidopsis thaliana]
  misc_feature (14)..(136): Homolog of NCBI NO: 18402801 NR Description: expressed protein
MAGKGAKATAAKSADKDKGKKAGGPVSRSSRAAPQENSTPKKDVYQLFAEKVRDNKQLESRWAIMQETRVEYFRGKDFNAFIKNYPEVREILGPDKDLEVEDIVNTLLTKNLVIRCDRVMKTVRPGKKKLSSWPAHFGDT

SEQ ID NO: 16123 - DNA, 1575 bp, Zea mays subsp. mays
  misc_feature (1)..(1575): Ceres Seq. ID no. 12349572
  misc_feature: MA Experiment ID: 108559 Result: Up-regulated in Transcription
  misc_feature: MA Experiment 108559 PARAMETER Experiment Name: Zm_5mM_NO_P Parameter: Age (day) Value: 8
  misc_feature: MA Experiment 108559 PARAMETER Experiment Name: Zm_5mM_NO_P Parameter: Organism Value: Zea mays
  misc_feature: MA Experiment 108559 PARAMETER Experiment Name: Zm_5mM_NO_P Parameter: Plant Line Value: 35A19
  misc_feature: MA Experiment 108559 PARAMETER Experiment Name: Zm_5mM_NO_P Parameter: Timepoint (hr) Value: 12
  misc_feature: MA Experiment 108559 PARAMETER Experiment Name: Zm_5mM_NO_P Parameter: Tissue Value: Aerial
  misc_feature: MA Experiment 108559 PARAMETER Experiment Name: Zm_5mM_NO_P Parameter: Treatment Value: 5mM NO vs. No Treatment
gcctggctctggtattgggttccccgttctgctgctcagctcagcccagccccagagcccctgacctgccgtcctccctccttccctccccgtgagtcgccgtacggcggtacgggatcgccaccgcggcgtccagggatggcggacgggagcctctacgcctggtggtgctgtgccttgggctgggcgctggcgcttgtcgcagcggacggcttcctcgtggacatcacctatgtggaaagcgccgtggccaaaggagcagtgtgtttggatggtagtgcgccggcgtaccatctcgcccgcggctccggctccggtgagaacagctggctggtccatttcgaggggggaggatggtgcaacaatgtcaccacctgcctgcaacggaagcgcactcggttgggttcgtccaaggagatggcgacgcagattgccttctccggaatcctgagtgacacgccggatgacaacccagatttttacaattggaacaaggtcaaggttcggtactgtgatggttcatctttcactggagatgttgaagaagttgaccctgcaacaaagctacattatagaggtgccaggatatggcaagctgtcatggacgacctgcttgccaaagggatggacaaagctgaaaatgctctaatttcaggctgttctgctggtggtttaacctccatactacactgtgacagatttcatgaccttctgccgccggctgcgagggttaagtgcctttctgatgctgggttcttcattaatgagaaagacgttgcaggagttgggtacattgctgcctttttcaacgacgtcgttacaacacatgggtcagcaaagaatttgccgccttcatgcacttcgacgttacctccaggaacgtgctttttcccccagaacgaggtgaaacagatacagacacctctgttcatcctcaacgcagcatatgattcatggcaggtaaggaacattttggtgccaggagtagctgaccctcatggaaaatggcatagctgtaagcatgatatagaccagtgctctgcatcgcagctacgggtattgcagggattcaggggtgattttctgaaggaagtggcagaactagggaactccgactcgagagggttgttcataaactcatgcttcgtgcactgccagtctgagatacaggagctatggttctcatctgactcccccgtgctcggaaacacaacagtagcaaacgctgttggcgactggttcttcgaccgcagctccttccagaagatagactgcccatacccttgtgactcgacctgtcacaatcggatctacgatgactcatcacaagcatagcaattacagtggcctcacttcgtactgccattcaccatgttattacatttgacgcttccagcattgctaacagtagggcaatgcgttgatagccattgattttttttttctttttacgaataagatcaggtgccggcggctttaactcggttgctaccggaaagtgagcgtgcatcttccgacggtacatggcatggtttatctggatggatgaatcgataatcataaattcttaaaaac

SEQ ID NO: 16124 - protein, 444 aa, Zea mays subsp. mays
  peptide (1)..(444): Ceres Seq. ID no. 12349573
  misc_feature (66)..(423): Pfam Name: Pectinacetylesterase Pfam Description: Pectinacetylesterase
  misc_feature (73)..(438): Homolog of NCBI NO: 25347293 NR Description: probable pectinacetylesterase precursor T8L23.6
  misc_feature (73)..(438): Homolog of NCBI NO: 18397406 NR Description: pectinacetylesterase, putative
  misc_feature (73)..(438): Homolog of NCBI NO: 15226462 NR Description: pectinacetylesterase, putative
  misc_feature (66)..(439): Homolog of NCBI NO: 28392968 NR Description: putative pectinacetylesterase [Arabidopsis
  misc_feature (50)..(433): Homolog of NCBI NO: 18415308 NR Description: pectinacetylesterase, putative
  misc_feature (56)..(433): Homolog of NCBI NO: 15242357 NR Description: pectinacetylesterase, putative
  misc_feature (56)..(433): Homolog of NCBI NO: 21593445 NR Description: pectin acetylesterase [Arabidopsis thaliana]
  misc_feature (60)..(440): Homolog of NCBI NO: 38344147 NR Description: OSJNBa0041A02.14 [Oryza sativa (japonica
  misc_feature (56)..(438): Homolog of NCBI NO: 22328797 NR Description: pectinacetylesterase family; protein id:
  misc_feature (56)..(443): Homolog of NCBI NO: 7488883 NR Description: pectin acetylesterase (EC 3.1.1.-) precursor -
AWLWYWVPRSAAQLSPAPEPLTCRPPSFPPRESPYGGTGSPPRRPGMADGSLYAWWCCALGWALALVAADGFLVDITYVESAVAKGAVCLDGSAPAYHLARGSGSGENSWLVHFEGGGWCNNVTTCLQRKRTRLGSSKEMATQIAFSGILSDTPDDNPDFYNWNKVKVRYCDGSSFTGDVEEVDPATKLHYRGARIWQAVMDDLLAKGMDKAENALISGCSAGGLTSILHCDRFHDLLPPAARVKCLSDAGFFINEKDVAGVGYIAAFFNDVVTTHGSAKNLPPSCTSTLPPGTCFFPQNEVKQIQTPLFILNAAYDSWQVRNILVPGVADPHGKWHSCKHDIDQCSASQLRVLQGFRGDFLKEVAELGNSDSRGLFINSCFVHCQSEIQELWFSSDSPVLGNTTVANAVGDWFFDRSSFQKIDCPYPCDSTCHNRIYDDSSQA

SEQ ID NO: 16125 - protein, 398 aa, Zea mays subsp. mays
  peptide (1)..(398): Ceres Seq. ID no. 12349574
  misc_feature (20)..(377): Pfam Name: Pectinacetylesterase Pfam Description: Pectinacetylesterase
  misc_feature (27)..(392): Homolog of NCBI NO: 25347293 NR Description: probable pectinacetylesterase precursor T8L23.6
  misc_feature (27)..(392): Homolog of NCBI NO: 18397406 NR Description: pectinacetylesterase, putative
  misc_feature (27)..(392): Homolog of NCBI NO: 15226462 NR Description: pectinacetylesterase, putative
  misc_feature (20)..(393): Homolog of NCBI NO: 28392968 NR Description: putative pectinacetylesterase [Arabidopsis
  misc_feature (4)..(387): Homolog of NCBI NO: 18415308 NR Description: pectinacetylesterase, putative
  misc_feature (10)..(387): Homolog of NCBI NO: 15242357 NR Description: pectinacetylesterase, putative
  misc_feature (10)..(387): Homolog of NCBI NO: 21593445 NR Description: pectin acetylesterase [Arabidopsis thaliana]
  misc_feature (14)..(394): Homolog of NCBI NO: 38344147 NR Description: OSJNBa0041A02.14 [Oryza sativa (japonica
  misc_feature (10)..(392): Homolog of NCBI NO: 22328797 NR Description: pectinacetylesterase family; protein id:
  misc_feature (10)..(397): Homolog of NCBI NO: 7488883 NR Description: pectin acetylesterase (EC 3.1.1.-) precursor -
MADGSLYAWWCCALGWALALVAADGFLVDITYVESAVAKGAVCLDGSAPAYHLARGSGSGENSWLVHFEGGGWCNNVTTCLQRKRTRLGSSKEMATQIAFSGILSDTPDDNPDFYNWNKVKVRYCDGSSFTGDVEEVDPATKLHYRGARIWQAVMDDLLAKGMDKAENALISGCSAGGLTSILHCDRFHDLLPPAARVKCLSDAGFFINEKDVAGVGYIAAFFNDVVTTHGSAKNLPPSCTSTLPPGTCFFPQNEVKQIQTPLFILNAAYDSWQVRNILVPGVADPHGKWHSCKHDIDQCSASQLRVLQGFRGDFLKEVAELGNSDSRGLFINSCFVHCQSEIQELWFSSDSPVLGNTTVANAVGDWFFDRSSFQKIDCPYPCDSTCHNRIYDDSSQA

SEQ ID NO: 16126 - protein, 305 aa, Zea mays subsp. mays
  peptide (1)..(305): Ceres Seq. ID no. 12349575
  misc_feature (1)..(284): Pfam Name: Pectinacetylesterase Pfam Description: Pectinacetylesterase
  misc_feature (1)..(299): Homolog of NCBI NO: 25347293 NR Description: probable pectinacetylesterase precursor T8L23.6
  misc_feature (1)..(299): Homolog of NCBI NO: 18397406 NR Description: pectinacetylesterase, putative
  misc_feature (1)..(299): Homolog of NCBI NO: 15226462 NR Description: pectinacetylesterase, putative
  misc_feature (1)..(300): Homolog of NCBI NO: 28392968 NR Description: putative pectinacetylesterase [Arabidopsis
  misc_feature (1)..(294): Homolog of NCBI NO: 18415308 NR Description: pectinacetylesterase, putative
  misc_feature (1)..(294): Homolog of NCBI NO: 15242357 NR Description: pectinacetylesterase, putative
  misc_feature (1)..(294): Homolog of NCBI NO: 21593445 NR Description: pectin acetylesterase [Arabidopsis thaliana]
  misc_feature (1)..(301): Homolog of NCBI NO: 38344147 NR Description: OSJNBa0041A02.14 [Oryza sativa (japonica
  misc_feature (1)..(299): Homolog of NCBI NO: 22328797 NR Description: pectinacetylesterase family; protein id:
  misc_feature (1)..(304): Homolog of NCBI NO: 7488883 NR Description: pectin acetylesterase (EC 3.1.1.-) precursor -
MATQIAFSGILSDTPDDNPDFYNWNKVKVRYCDGSSFTGDVEEVDPATKLHYRGARIWQAVMDDLLAKGMDKAENALISGCSAGGLTSILHCDRFHDLLPPAARVKCLSDAGFFINEKDVAGVGYIAAFFNDVVTTHGSAKNLPPSCTSTLPPGTCFFPQNEVKQIQTPLFILNAAYDSWQVRNILVPGVADPHGKWHSCKHDIDQCSASQLRVLQGFRGDFLKEVAELGNSDSRGLFINSCFVHCQSEIQELWFSSDSPVLGNTTVANAVGDWFFDRSSFQKIDCPYPCDSTCHNRIYDDSSQA

SEQ ID NO: 16127 - DNA, 1745 bp, Zea mays subsp. mays
  misc_feature (1)..(1745): Ceres Seq. ID no. 12383093
  misc_feature: MA Experiment ID: 20000478 Result: Up-regulated in Transcription
  misc_feature: MA Experiment 20000478 PARAMETER Experiment Name: Zm_5mM_SA_P Parameter: Age (day) Value: 11
  misc_feature: MA Experiment 20000478 PARAMETER Experiment Name: Zm_5mM_SA_P Parameter: Organism Value: Zea mays
  misc_feature: MA Experiment 20000478 PARAMETER Experiment Name: Zm_5mM_SA_P Parameter: Plant Line Value: 35A19
  misc_feature: MA Experiment 20000478 PARAMETER Experiment Name: Zm_5mM_SA_P Parameter: Timepoint (hr) Value: 72
  misc_feature: MA Experiment 20000478 PARAMETER Experiment Name: Zm_5mM_SA_P Parameter: Tissue Value: Aerial
  misc_feature: MA Experiment 20000478 PARAMETER Experiment Name: Zm_5mM_SA_P Parameter: Treatment Value: 5mM SA vs. No Treatment
  misc_feature: MA Experiment ID: 20001612 Result: Up-regulated in Transcription
  misc_feature: MA Experiment 20001612 PARAMETER Experiment Name: Zm_50ppm_KNO3_L-to-H_P Parameter: Age (day) Value: 19
  misc_feature: MA Experiment 20001612 PARAMETER Experiment Name: Zm_50ppm_KNO3_L-to-H_P Parameter: Organism Value: Zea mays
  misc_feature: MA Experiment 20001612 PARAMETER Experiment Name: Zm_50ppm_KNO3_L-to-H_P Parameter: Plant Line Value: 35A19
  misc_feature: MA Experiment 20001612 PARAMETER Experiment Name: Zm_50ppm_KNO3_L-to-H_P Parameter: Timepoint (hr) Value: 8
  misc_feature: MA Experiment 20001612 PARAMETER Experiment Name: Zm_50ppm_KNO3_L-to-H_P Parameter: Tissue Value: Roots
  misc_feature: MA Experiment 20001612 PARAMETER Experiment Name: Zm_50ppm_KNO3_L-to-H_P Parameter: Treatment Value: 50ppm KNO3 vs. 50ppm KCl
gcaattaaccctcactaaagggaacaaaagctggagctccaccgcggtggcggccgctctagaactagtggatcccccgggctgcaggaattcgcacgagaccattacctagaacatcctaatcgaaaaatttccgcaccacgcccagtcgcccacgcagccggcccaagcccaaaaacctttctccatcctctactctcatccccacgatggccgccgccgccaccacgccgcactccctcctcctccagcgcgccgcgatcccggccgcgccgtcgagggcgtccgccgccgcctctcccgtccgcctcccggtccgcgccgccaggatctcgtgcgcggcggtggcggcgccgtccccggccgcagccgccgcggcggacgaggtggagcgcggcgtctacaacttcgcggcgggtcccgcgacgctccctctctccgtgctcaagcgggcgcaggcggagctggtggactaccacggctccgggatgagcatcatggagatgagccaccgcgggaaggagttcgacgccgccatcaagaaggccgagtccgacctgcgcgcgctcctcgcggtgcccgacacccacgccgtgctcttcctccagggcggcgccaccacgcagttcgccgccgtcccgctcaacctctgcacggggccctccgacccggccgacttcgtcgtgtccggatcctggagcgacaaggccttcaaggaggccaagaagttctccgccgcctccgtcgcctggtcgggtaaagacggcaagtacacggccctcccgccgttcgacgccatcgcccagaaccccgaggccaggttcctccacatctgctccaacgagaccatccacggcgtggagttcaaggactacccggagccccgcaacaggtcgggcatcctcgtcgccgacatgtcctccaacttctgctccaagcccgtcgacgtctcccgcttcggcgtcatctacgccggcgcacagaagaacgtcgggccctccggcgtcaccatcgccatcgtgcgcaaggacctcatcggcgccgctcagcccttcacgcccgtcatgctcgacttcaagacgcacgccgacaacgcctccctctacaacaccccgccctgcttcgccatctacgtctgcggtctcgtcttcgaggacctgctcgcgcagggcggcctcgccgaggtcgagaagaagaacgcgcgcaaggccggcgccctctacgacaccatcgacgccagcggagggtactacgtctgccccgtcgacaagtccgtgcggtcgcacatgaacgtgcccttcaccctggccaagggcccggatttcgagaagcagttcatcgccgaggcggccaaggagggcatggtgcagctcaaggggcacaggtctgtcggcggtgtccgcgcctctatctacaatgccatgccgctcgccggcgtggagaagctcgtcgccttcatgaaggacttccaagccaggaacccttgattgccttgtgcttatggtcatttggtattgctactcagtctttcttcctagcataagtgggctcgtgcaagagctgtctcgcgttgcgcactgggatctatctgtagtattagtaccataacgtaacggctactgtattttgcaatgttttttttctctctctcgcttttgttaggtgttcatggaatttcatttctatggatcaccattgcagttgtaatgtgtttttgctggaaataaggaataaggtagagatcc

SEQ ID NO: 16128 - protein, 425 aa, Zea mays subsp. mays
  peptide (1)..(425): Ceres Seq. ID no. 12383094
  misc_feature (74)..(413): Pfam Name: Aminotransferase class-V Pfam Description: Aminotransferase class-V
  misc_feature (59)..(420): Homolog of NCBI NO: 16741698 NR Description: Similar to phosphoserine aminotransferase [Homo
  misc_feature (59)..(420): Homolog of NCBI NO: 30583943 NR Description: Homo sapiens phosphoserine aminotransferase
  misc_feature (59)..(420): Homolog of NCBI NO: 17402893 NR Description: phosphoserine aminotransferase, isoform 1 [Homo
  misc_feature (64)..(420): Homolog of NCBI NO: 34497756 NR Description: phosphoserine transaminase [Chromobacterium
  misc_feature (52)..(424): Homolog of NCBI NO: 15227876 NR Description: putative phosphoserine aminotransferase; protein
  misc_feature (1)..(424): Homolog of NCBI NO: 1711381 NR Description: Phosphoserine aminotransferase, chloroplast
  misc_feature (35)..(424): Homolog of NCBI NO: 21592931 NR Description: phosphoserine aminotransferase [Arabidopsis
  misc_feature (35)..(424): Homolog of NCBI NO: 15237069 NR Description: phosphoserine aminotransferase
  misc_feature (35)..(424): Homolog of NCBI NO: 22135922 NR Description: phosphoserine aminotransferase [Arabidopsis
  misc_feature (2)..(425): Homolog of NCBI NO: 21397263 NR Description: Putative phosphoserine aminotransferase
MAAAATTPHSLLLQRAAIPAAPSRASAAASPVRLPVRAARISCAAVAAPSPAAAAAADEVERGVYNFAAGPATLPLSVLKRAQAELVDYHGSGMSIMEMSHRGKEFDAAIKKAESDLRALLAVPDTHAVLFLQGGATTQFAAVPLNLCTGPSDPADFVVSGSWSDKAFKEAKKFSAASVAWSGKDGKYTALPPFDAIAQNPEARFLHICSNETIHGVEFKDYPEPRNRSGILVADMSSNFCSKPVDVSRFGVIYAGAQKNVGPSGVTIAIVRKDLIGAAQPFTPVMLDFKTHADNASLYNTPPCFAIYVCGLVFEDLLAQGGLAEVEKKNARKAGALYDTIDASGGYYVCPVDKSVRSHMNVPFTLAKGPDFEKQFIAEAAKEGMVQLKGHRSVGGVRASIYNAMPLAGVEKLVAFMKDFQARNP

SEQ ID NO: 16129 - protein, 332 aa, Zea mays subsp. mays
  peptide (1)..(332): Ceres Seq. ID no. 12383095
  misc_feature (1)..(320): Pfam Name: Aminotransferase class-V Pfam Description: Aminotransferase class-V
  misc_feature (1)..(327): Homolog of NCBI NO: 16741698 NR Description: Similar to phosphoserine aminotransferase [Homo
  misc_feature (1)..(327): Homolog of NCBI NO: 30583943 NR Description: Homo sapiens phosphoserine aminotransferase
  misc_feature (1)..(327): Homolog of NCBI NO: 17402893 NR Description: phosphoserine aminotransferase, isoform 1 [Homo
  misc_feature (1)..(327): Homolog of NCBI NO: 34497756 NR Description: phosphoserine transaminase [Chromobacterium
  misc_feature (1)..(331): Homolog of NCBI NO: 15227876 NR Description: putative phosphoserine aminotransferase; protein
  misc_feature (1)..(331): Homolog of NCBI NO: 1711381 NR Description: Phosphoserine aminotransferase, chloroplast
  misc_feature (1)..(331): Homolog of NCBI NO: 21592931 NR Description: phosphoserine aminotransferase [Arabidopsis
  misc_feature (1)..(331): Homolog of NCBI NO: 15237069 NR Description: phosphoserine aminotransferase
  misc_feature (1)..(331): Homolog of NCBI NO: 22135922 NR Description: phosphoserine aminotransferase [Arabidopsis
  misc_feature (1)..(332): Homolog of NCBI NO: 21397263 NR Description: Putative phosphoserine aminotransferase
MSIMEMSHRGKEFDAAIKKAESDLRALLAVPDTHAVLFLQGGATTQFAAVPLNLCTGPSDPADFVVSGSWSDKAFKEAKKFSAASVAWSGKDGKYTALPPFDAIAQNPEARFLHICSNETIHGVEFKDYPEPRNRSGILVADMSSNFCSKPVDVSRFGVIYAGAQKNVGPSGVTIAIVRKDLIGAAQPFTPVMLDFKTHADNASLYNTPPCFAIYVCGLVFEDLLAQGGLAEVEKKNARKAGALYDTIDASGGYYVCPVDKSVRSHMNVPFTLAKGPDFEKQFIAEAAKEGMVQLKGHRSVGGVRASIYNAMPLAGVEKLVAFMKDFQARNP

SEQ ID NO: 16130 - protein, 329 aa, Zea mays subsp. mays
  peptide (1)..(329): Ceres Seq. ID no. 12383096
  misc_feature (1)..(317): Pfam Name: Aminotransferase class-V Pfam Description: Aminotransferase class-V
  misc_feature (1)..(324): Homolog of NCBI NO: 16741698 NR Description: Similar to phosphoserine aminotransferase [Homo
  misc_feature (1)..(324): Homolog of NCBI NO: 30583943 NR Description: Homo sapiens phosphoserine aminotransferase
  misc_feature (1)..(324): Homolog of NCBI NO: 17402893 NR Description: phosphoserine aminotransferase, isoform 1 [Homo
  misc_feature (1)..(324): Homolog of NCBI NO: 34497756 NR Description: phosphoserine transaminase [Chromobacterium
  misc_feature (1)..(328): Homolog of NCBI NO: 15227876 NR Description: putative phosphoserine aminotransferase; protein
  misc_feature (1)..(328): Homolog of NCBI NO: 1711381 NR Description: Phosphoserine aminotransferase, chloroplast
  misc_feature (1)..(328): Homolog of NCBI NO: 21592931 NR Description: phosphoserine aminotransferase [Arabidopsis
  misc_feature (1)..(328): Homolog of NCBI NO: 15237069 NR Description: phosphoserine aminotransferase
  misc_feature (1)..(328): Homolog of NCBI NO: 22135922 NR Description: phosphoserine aminotransferase [Arabidopsis
  misc_feature (1)..(329): Homolog of NCBI NO: 21397263 NR Description: Putative phosphoserine aminotransferase
MEMSHRGKEFDAAIKKAESDLRALLAVPDTHAVLFLQGGATTQFAAVPLNLCTGPSDPADFVVSGSWSDKAFKEAKKFSAASVAWSGKDGKYTALPPFDAIAQNPEARFLHICSNETIHGVEFKDYPEPRNRSGILVADMSSNFCSKPVDVSRFGVIYAGAQKNVGPSGVTIAIVRKDLIGAAQPFTPVMLDFKTHADNASLYNTPPCFAIYVCGLVFEDLLAQGGLAEVEKKNARKAGALYDTIDASGGYYVCPVDKSVRSHMNVPFTLAKGPDFEKQFIAEAAKEGMVQLKGHRSVGGVRASIYNAMPLAGVEKLVAFMKDFQARNP

SEQ ID NO: 16131 - DNA, 880 bp, Zea mays subsp. mays
  misc_feature (1)..(880): Ceres Seq. ID no. 12357013
  misc_feature: MA Experiment ID: 108504 Result: Up-regulated in Transcription
  misc_feature: MA Experiment 108504 PARAMETER Experiment Name: Zm_Drought_P Parameter: Age (day) Value: 8
  misc_feature: MA Experiment 108504 PARAMETER Experiment Name: Zm_Drought_P Parameter: Organism Value: Zea mays
  misc_feature: MA Experiment 108504 PARAMETER Experiment Name: Zm_Drought_P Parameter: Plant Line Value: 35A19
  misc_feature: MA Experiment 108504 PARAMETER Experiment Name: Zm_Drought_P Parameter: Timepoint (hr) Value: 12
  misc_feature: MA Experiment 108504 PARAMETER Experiment Name: Zm_Drought_P Parameter: Tissue Value: Aerial
  misc_feature: MA Experiment 108504 PARAMETER Experiment Name: Zm_Drought_P Parameter: Treatment Value: Drought vs. No Drought
  misc_feature: MA Experiment ID: 108527 Result: Down-regulated in Transcription
  misc_feature: MA Experiment 108527 PARAMETER Experiment Name: Zm_5mM_NO_P Parameter: Age (day) Value: 8
  misc_feature: MA Experiment 108527 PARAMETER Experiment Name: Zm_5mM_NO_P Parameter: Organism Value: Zea mays
  misc_feature: MA Experiment 108527 PARAMETER Experiment Name: Zm_5mM_NO_P Parameter: Plant Line Value: 35A19
  misc_feature: MA Experiment 108527 PARAMETER Experiment Name: Zm_5mM_NO_P Parameter: Timepoint (hr) Value: 6
  misc_feature: MA Experiment 108527 PARAMETER Experiment Name: Zm_5mM_NO_P Parameter: Tissue Value: Aerial
  misc_feature: MA Experiment 108527 PARAMETER Experiment Name: Zm_5mM_NO_P Parameter: Treatment Value: 5mM NO vs. No Treatment
  misc_feature: MA Experiment ID: 108528 Result: Up-regulated in Transcription
  misc_feature: MA Experiment 108528 PARAMETER Experiment Name: Zm_Imbibed_Seeds_P Parameter: Age (day) Value: 5 vs. 2
  misc_feature: MA Experiment 108528 PARAMETER Experiment Name: Zm_Imbibed_Seeds_P Parameter: Organism Value: Zea mays
  misc_feature: MA Experiment 108528 PARAMETER Experiment Name: Zm_Imbibed_Seeds_P Parameter: Plant Line Value: 35A19
  misc_feature: MA Experiment 108528 PARAMETER Experiment Name: Zm_Imbibed_Seeds_P Parameter: Tissue Value: Aerial vs. Embryo
  misc_feature: MA Experiment ID: 108529 Result: Up-regulated in Transcription
  misc_feature: MA Experiment 108529 PARAMETER Experiment Name: Zm_Imbibed_Seeds_P Parameter: Age (day) Value: 5 vs. 2
  misc_feature: MA Experiment 108529 PARAMETER Experiment Name: Zm_Imbibed_Seeds_P Parameter: Organism Value: Zea mays
  misc_feature: MA Experiment 108529 PARAMETER Experiment Name: Zm_Imbibed_Seeds_P Parameter: Plant Line Value: 35A19
  misc_feature: MA Experiment 108529 PARAMETER Experiment Name: Zm_Imbibed_Seeds_P Parameter: Tissue Value: Roots vs. Embryo
  misc_feature: MA Experiment ID: 108530 Result: Up-regulated in Transcription
  misc_feature: MA Experiment 108530 PARAMETER Experiment Name: Zm_Imbibed_Seeds_P Parameter: Age (day) Value: 6 vs. 2
  misc_feature: MA Experiment 108530 PARAMETER Experiment Name: Zm_Imbibed_Seeds_P Parameter: Organism Value: Zea mays
  misc_feature: MA Experiment 108530 PARAMETER Experiment Name: Zm_Imbibed_Seeds_P Parameter: Plant Line Value: 35A19
  misc_feature: MA Experiment 108530 PARAMETER Experiment Name: Zm_Imbibed_Seeds_P Parameter: Tissue Value: Aerial vs. Embryo
  misc_feature: MA Experiment ID: 108533 Result: Down-regulated in Transcription
  misc_feature: MA Experiment 108533 PARAMETER Experiment Name: Zm_4deg_Cold_P Parameter: Age (hr) Value: 8
  misc_feature: MA Experiment 108533 PARAMETER Experiment Name: Zm_4deg_Cold_P Parameter: Organism Value: Zea mays
  misc_feature: MA Experiment 108533 PARAMETER Experiment Name: Zm_4deg_Cold_P Parameter: Plant Line Value: 35A19
  misc_feature: MA Experiment 108533 PARAMETER Experiment Name: Zm_4deg_Cold_P Parameter: Temperature (deg C) Value: 4 vs. 22
  misc_feature: MA Experiment 108533 PARAMETER Experiment Name: Zm_4deg_Cold_P Parameter: Timepoint (hr) Value: 1
  misc_feature: MA Experiment 108533 PARAMETER Experiment Name: Zm_4deg_Cold_P Parameter: Tissue Value: Aerial
  misc_feature: MA Experiment ID: 108534 Result: Down-regulated in Transcription
  misc_feature: MA Experiment 108534 PARAMETER Experiment Name: Zm_4deg_Cold_P Parameter: Age (hr) Value: 8
  misc_feature: MA Experiment 108534 PARAMETER Experiment Name: Zm_4deg_Cold_P Parameter: Organism Value: Zea mays
  misc_feature: MA Experiment 108534 PARAMETER Experiment Name: Zm_4deg_Cold_P Parameter: Plant Line Value: 35A19
  misc_feature: MA Experiment 108534 PARAMETER Experiment Name: Zm_4deg_Cold_P Parameter: Temperature (deg C) Value: 4 vs. 22
  misc_feature: MA Experiment 108534 PARAMETER Experiment Name: Zm_4deg_Cold_P Parameter: Timepoint (hr) Value: 6
  misc_feature: MA Experiment 108534 PARAMETER Experiment Name: Zm_4deg_Cold_P Parameter: Tissue Value: Aerial
  misc_feature: MA Experiment ID: 108535 Result: Down-regulated in Transcription
  misc_feature: MA Experiment 108535 PARAMETER Experiment Name: Zm_Meristem_P Parameter: Age (day) Value: 8
  misc_feature: MA Experiment 108535 PARAMETER Experiment Name: Zm_Meristem_P Parameter: Organism Value: Zea mays
  misc_feature: MA Experiment 108535 PARAMETER Experiment Name: Zm_Meristem_P Parameter: Plant Line Value: 35A19
  misc_feature: MA Experiment 108535 PARAMETER Experiment Name: Zm_Meristem_P Parameter: Tissue Value: Root Meristem vs. Above Root Meristem
  misc_feature: MA Experiment ID: 108543 Result: Up-regulated in Transcription
  misc_feature: MA Experiment ID: 108544 Result: Up-regulated in Transcription
  misc_feature: MA Experiment ID: 108546 Result: Up-regulated in Transcription
  misc_feature: MA Experiment 108546 PARAMETER Experiment Name: Zm_Imbibed_Seeds_P Parameter: Age (day) Value: 3 vs. 2
  misc_feature: MA Experiment 108546 PARAMETER Experiment Name: Zm_Imbibed_Seeds_P Parameter: Organism Value: Zea mays
  misc_feature: MA Experiment 108546 PARAMETER Experiment Name: Zm_Imbibed_Seeds_P Parameter: Plant Line Value: 35A19
  misc_feature: MA Experiment 108546 PARAMETER Experiment Name: Zm_Imbibed_Seeds_P Parameter: Tissue Value: Roots vs. Embryo
  misc_feature: MA Experiment ID: 108547 Result: Up-regulated in Transcription
  misc_feature: MA Experiment 108547 PARAMETER Experiment Name: Zm_Imbibed_Seeds_P Parameter: Age (day) Value: 4 vs. 2
  misc_feature: MA Experiment 108547 PARAMETER Experiment Name: Zm_Imbibed_Seeds_P Parameter: Organism Value: Zea mays
  misc_feature: MA Experiment 108547 PARAMETER Experiment Name: Zm_Imbibed_Seeds_P Parameter: Plant Line Value: 35A19
  misc_feature: MA Experiment 108547 PARAMETER Experiment Name: Zm_Imbibed_Seeds_P Parameter: Tissue Value: Aerial vs. Embryo
  misc_feature: MA Experiment ID: 108556 Result: Up-regulated in Transcription
  misc_feature: MA Experiment 108556 PARAMETER Experiment Name: Zm_Drought_P Parameter: Age (day) Value: 9
  misc_feature: MA Experiment 108556 PARAMETER Experiment Name: Zm_Drought_P Parameter: Organism Value: Zea mays
  misc_feature: MA Experiment 108556 PARAMETER Experiment Name: Zm_Drought_P Parameter: Plant Line Value: 35A19
  misc_feature: MA Experiment 108556 PARAMETER Experiment Name: Zm_Drought_P Parameter: Timepoint (hr) Value: 24
  misc_feature: MA Experiment 108556 PARAMETER Experiment Name: Zm_Drought_P Parameter: Tissue Value: Aerial
  misc_feature: MA Experiment 108556 PARAMETER Experiment Name: Zm_Drought_P Parameter: Treatment Value: Drought vs. No Drought
  misc_feature: MA Experiment ID: 108687 Result: Down-regulated in Transcription
  misc_feature: MA Experiment 108687 PARAMETER Experiment Name: Zm_Embryos-Flowers__P Parameter: Tissue Value: Embryo vs. Aerial+
  misc_feature: MA Experiment ID: 20000480 Result: Up-regulated in Transcription
  misc_feature: MA Experiment 20000480 PARAMETER Experiment Name: Zm_Drought_P Parameter: Age (day) Value: 11
  misc_feature: MA Experiment 20000480 PARAMETER Experiment Name: Zm_Drought_P Parameter: Organism Value: Zea mays
  misc_feature: MA Experiment 20000480 PARAMETER Experiment Name: Zm_Drought_P Parameter: Plant Line Value: 35A19
  misc_feature: MA Experiment 20000480 PARAMETER Experiment Name: Zm_Drought_P Parameter: Timepoint (hr) Value: 72
  misc_feature: MA Experiment 20000480 PARAMETER Experiment Name: Zm_Drought_P Parameter: Tissue Value: Aerial
  misc_feature: MA Experiment 20000480 PARAMETER Experiment Name: Zm_Drought_P Parameter: Treatment Value: Drought vs. No Drought
  misc_feature: MA Experiment ID: 20000535 Result: Down-regulated in Transcription
  misc_feature: MA Experiment 20000535 PARAMETER Experiment Name: Zm_Hybrid_Seed_Dev_P Parameter: DAP Value: 30 vs. 12
  misc_feature: MA Experiment 20000535 PARAMETER Experiment Name: Zm_Hybrid_Seed_Dev_P Parameter: Organism Value: Zea mays
  misc_feature: MA Experiment 20000535 PARAMETER Experiment Name: Zm_Hybrid_Seed_Dev_P Parameter: Plant Line Value: 35A19
  misc_feature: MA Experiment 20000535 PARAMETER Experiment Name: Zm_Hybrid_Seed_Dev_P Parameter: Tissue Value: Embryo vs. Unfert Floret
gacaagcaagaacagctgtcgatccaattgtcacttgctctccctccaacaagctaattaaggccggtcatccctcttctagctcgtttcattatccatggcggaggagaagcaccaccaccaccacctgttccaccacaagaaggacgaggagcaggaggagcagctcgccggcggcgggtacggcgagtccgccgagtacacggaggccacggtgacggaggtcgtgtccacgggcgagaacgagtacgacgagtacaagaaggaggagaagcagcacaagcacaagcagcacctcggcgaggccggcgccatcgccgccggcgccttcgcactcgtacgtagtcctccgatcgatccgatcctccttgagtagtatatacatacatgaacgcgataacgaataatatattaatcgaacgaactgaatgatgatcacggatcacctcgtgtgacgtggacatgcacagtacgagaagcacgaggcaaagaaggacccggagcacgcgcaccgccacaagatcgaggaggaggtcgcggcggcggcggccgtcggctccggcggcttcgccttccacgagcaccacgagaagaagaaggaccacaaggacgccgaggaggccggcggcgagaagaagcaccacttcttcggctgattgatcctcccgtatcgtcgtccctccccgtgtgctacgcgtgcgtgtgtgagagtgatatcgagcgcccgccgtgttgtgcgcgcgtacgtatgtatgcgctcgtgtgatgcacgaataagcgtggctacgtaatctatcgtatgtatacgtgtgtgtatgcatgtgcttgtgtatgatcgtggtacgaggaccgaaaaaatgtatgcaactctgatttactt

SEQ ID NO: 16132 - protein, 92 aa, Zea mays subsp. mays
  peptide (1)..(92): Ceres Seq. ID no. 12357014
  misc_feature (1)..(80): Homolog of NCBI NO: 7484489 NR Description: abscisic acid- and water-stress-inducible protein
  misc_feature (1)..(80): Homolog of NCBI NO: 14582465 NR Description: putative transcription factor [Vitis vinifera]
  misc_feature (26)..(80): Homolog of NCBI NO: 2677824 NR Description: abscisic stress ripening protein homolog [Prunus
  misc_feature (26)..(80): Homolog of NCBI NO: 38532363 NR Description: abscisic acid and water deficit stress inducible
  misc_feature (26)..(80): Homolog of NCBI NO: 16588758 NR Description: abscisic stress ripening-like protein [Prunus
  misc_feature (1)..(80): Homolog of NCBI NO: 7484607 NR Description: ABA stress ripening protein - common ice plant
  misc_feature (1)..(80): Homolog of NCBI NO: 6525055 NR Description: anth [Lilium longiflorum]
  misc_feature (1)..(48): Homolog of NCBI NO: 7489708 NR Description: ABA- and ripening-inducible-like protein - maize
  misc_feature (1)..(80): Homolog of NCBI NO: 7489448 NR Description: abscisic acid- and stress-induced protein - rice
  misc_feature (1)..(80): Homolog of NCBI NO: 15667623 NR Description: drought inducible 22 kD protein [Saccharum
MAEEKHHHHHLFHHKKDEEQEEQLAGGGYGESAEYTEATVTEVVSTGENEYDEYKKEEKQHKHKQHLGEAGAIAAGAFALVRSPPIDPILLE

SEQ ID NO: 16133 - protein, 71 aa, Zea mays subsp. mays; identical to SEQ ID NO: 6335
  peptide (1)..(71): Ceres Seq. ID no. 12357015

SEQ ID NO: 16134 - protein, 65 aa, Zea mays subsp. mays
  peptide (1)..(65): Ceres Seq. ID no. 12357016
MHSTRSTRQRRTRSTRTATRSRRRSRRRRPSAPAASPSTSTTRRRRTTRTPRRPAARRSTTSSAD

SEQ ID NO: 16135 - DNA, 653 bp, Zea mays subsp. mays
  misc_feature (1)..(653): Ceres Seq. ID no. 12346489
  misc_feature: MA Experiment ID: 108528 Result: Up-regulated in Transcription
  misc_feature: MA Experiment 108528 PARAMETER Experiment Name: Zm_Imbibed_Seeds_P Parameter: Age (day) Value: 5 vs. 2
  misc_feature: MA Experiment 108528 PARAMETER Experiment Name: Zm_Imbibed_Seeds_P Parameter: Organism Value: Zea mays
  misc_feature: MA Experiment 108528 PARAMETER Experiment Name: Zm_Imbibed_Seeds_P Parameter: Plant Line Value: 35A19
  misc_feature: MA Experiment 108528 PARAMETER Experiment Name: Zm_Imbibed_Seeds_P Parameter: Tissue Value: Aerial vs. Embryo
  misc_feature: MA Experiment ID: 108530 Result: Up-regulated in Transcription
  misc_feature: MA Experiment 108530 PARAMETER Experiment Name: Zm_Imbibed_Seeds_P Parameter: Age (day) Value: 6 vs. 2
  misc_feature: MA Experiment 108530 PARAMETER Experiment Name: Zm_Imbibed_Seeds_P Parameter: Organism Value: Zea mays
  misc_feature: MA Experiment 108530 PARAMETER Experiment Name: Zm_Imbibed_Seeds_P Parameter: Plant Line Value: 35A19
  misc_feature: MA Experiment 108530 PARAMETER Experiment Name: Zm_Imbibed_Seeds_P Parameter: Tissue Value: Aerial vs. Embryo
  misc_feature: MA Experiment ID: 108547 Result: Up-regulated in Transcription
  misc_feature: MA Experiment 108547 PARAMETER Experiment Name: Zm_Imbibed_Seeds_P Parameter: Age (day) Value: 4 vs. 2
  misc_feature: MA Experiment 108547 PARAMETER Experiment Name: Zm_Imbibed_Seeds_P Parameter: Organism Value: Zea mays
  misc_feature: MA Experiment 108547 PARAMETER Experiment Name: Zm_Imbibed_Seeds_P Parameter: Plant Line Value: 35A19
  misc_feature: MA Experiment 108547 PARAMETER Experiment Name: Zm_Imbibed_Seeds_P Parameter: Tissue Value: Aerial vs. Embryo
  misc_feature: MA Experiment ID: 108556 Result: Down-regulated in Transcription
  misc_feature: MA Experiment 108556 PARAMETER Experiment Name: Zm_Drought_P Parameter: Age (day) Value: 9
  misc_feature: MA Experiment 108556 PARAMETER Experiment Name: Zm_Drought_P Parameter: Organism Value: Zea mays
  misc_feature: MA Experiment 108556 PARAMETER Experiment Name: Zm_Drought_P Parameter: Plant Line Value: 35A19
  misc_feature: MA Experiment 108556 PARAMETER Experiment Name: Zm_Drought_P Parameter: Timepoint (hr) Value: 24
  misc_feature: MA Experiment 108556 PARAMETER Experiment Name: Zm_Drought_P Parameter: Tissue Value: Aerial
  misc_feature: MA Experiment 108556 PARAMETER Experiment Name: Zm_Drought_P Parameter: Treatment Value: Drought vs. No Drought
  misc_feature: MA Experiment ID: 108559 Result: Down-regulated in Transcription
  misc_feature: MA Experiment 108559 PARAMETER Experiment Name: Zm_5mM_NO_P Parameter: Age (day) Value: 8
  misc_feature: MA Experiment 108559 PARAMETER Experiment Name: Zm_5mM_NO_P Parameter: Organism Value: Zea mays
  misc_feature: MA Experiment 108559 PARAMETER Experiment Name: Zm_5mM_NO_P Parameter: Plant Line Value: 35A19
  misc_feature: MA Experiment 108559 PARAMETER Experiment Name: Zm_5mM_NO_P Parameter: Timepoint (hr) Value: 12
  misc_feature: MA Experiment 108559 PARAMETER Experiment Name: Zm_5mM_NO_P Parameter: Tissue Value: Aerial
  misc_feature: MA Experiment 108559 PARAMETER Experiment Name: Zm_5mM_NO_P Parameter: Treatment Value: 5mM NO vs. No Treatment
  misc_feature: MA Experiment ID: 20000479 Result: Down-regulated in Transcription
  misc_feature: MA Experiment 20000479 PARAMETER Experiment Name: Zm_Drought_P Parameter: Age (day) Value: 10
  misc_feature: MA Experiment 20000479 PARAMETER Experiment Name: Zm_Drought_P Parameter: Organism Value: Zea mays
  misc_feature: MA Experiment 20000479 PARAMETER Experiment Name: Zm_Drought_P Parameter: Plant Line Value: 35A19
  misc_feature: MA Experiment 20000479 PARAMETER Experiment Name: Zm_Drought_P Parameter: Timepoint (hr) Value: 48
  misc_feature: MA Experiment 20000479 PARAMETER Experiment Name: Zm_Drought_P Parameter: Tissue Value: Aerial
  misc_feature: MA Experiment 20000479 PARAMETER Experiment Name: Zm_Drought_P Parameter: Treatment Value: Drought vs. No Drought
  misc_feature: MA Experiment ID: 20000480 Result: Down-regulated in Transcription
  misc_feature: MA Experiment 20000480 PARAMETER Experiment Name: Zm_Drought_P Parameter: Age (day) Value: 11
  misc_feature: MA Experiment 20000480 PARAMETER Experiment Name: Zm_Drought_P Parameter: Organism Value: Zea mays
  misc_feature: MA Experiment 20000480 PARAMETER Experiment Name: Zm_Drought_P Parameter: Plant Line Value: 35A19
  misc_feature: MA Experiment 20000480 PARAMETER Experiment Name: Zm_Drought_P Parameter: Timepoint (hr) Value: 72
  misc_feature: MA Experiment 20000480 PARAMETER Experiment Name: Zm_Drought_P Parameter: Tissue Value: Aerial
  misc_feature: MA Experiment 20000480 PARAMETER Experiment Name: Zm_Drought_P Parameter: Treatment Value: Drought vs. No Drought
  misc_feature: MA Experiment ID: 20000488 Result: Up-regulated in Transcription
  misc_feature: MA Experiment 20000488 PARAMETER Experiment Name: Zm_50mM_NH4NO3_L_to_H_P Parameter: Organism Value: Zea mays
  misc_feature: MA Experiment 20000488 PARAMETER Experiment Name: Zm_50mM_NH4NO3_L_to_H_P Parameter: Timepoint (hr) Value: 8
  misc_feature: MA Experiment 20000488 PARAMETER Experiment Name: Zm_50mM_NH4NO3_L_to_H_P Parameter: Tissue Value: Leaves
  misc_feature: MA Experiment 20000488 PARAMETER Experiment Name: Zm_50mM_NH4NO3_L_to_H_P Parameter: Treatment Value: 50mM NH4NO3 vs. 100mM Mannitol
  misc_feature: MA Experiment ID: 20001608 Result: Up-regulated in Transcription
  misc_feature: MA Experiment 20001608 PARAMETER Experiment Name: Zm_50ppm_KNO3_L-to-H_P Parameter: Age (day) Value: 21
  misc_feature: MA Experiment 20001608 PARAMETER Experiment Name: Zm_50ppm_KNO3_L-to-H_P Parameter: Organism Value: Zea mays
  misc_feature: MA Experiment 20001608 PARAMETER Experiment Name: Zm_50ppm_KNO3_L-to-H_P Parameter: Plant Line Value: 35A19
  misc_feature: MA Experiment 20001608 PARAMETER Experiment Name: Zm_50ppm_KNO3_L-to-H_P Parameter: Timepoint (hr) Value: 48
  misc_feature: MA Experiment 20001608 PARAMETER Experiment Name: Zm_50ppm_KNO3_L-to-H_P Parameter: Tissue Value: Shoots
  misc_feature: MA Experiment 20001608 PARAMETER Experiment Name: Zm_50ppm_KNO3_L-to-H_P Parameter: Treatment Value: 50ppm KNO3 vs. 50ppm KCl
acacgatcaaaaacaaaaccaagctccaagcacccatagccacacaccacaccaagtcaagcaaggagctcgatcgacagcaacaacggccatcatgaactccagcttcatcgggctcaagcccgctgcggcagcagcccaggccaccgcggctgcctcgtcgccgatgaagcagcagcaggtgcaggtcgcgccccagagccgccgcgccgcgctgctcggcctggcggccgtcttcgccgtcaccgccaccacggccggatcagccaaggctggggtcttcgacgagtacctcgagaagagcaaggctaacaaggagctgaacgacaagaagaggatggccaccagcgctgccaactttgcgcgcgcctacacagtcgagttcggcagctgccagttcccctacaacttcactgggtgccaggacctcgccaagcagaagaaagtccctttcctcagcgacgacctcgagatcgagtgcgaggggaaggagaagttcaagtgcggctccaacgtcttctggaagtggtgaagcagcgcgcgtctgatatgacggagacctgtgtatctagatgatgcatgtgcccagactgcaggaaaaatgatatcaaatttgactgctattctgtcaaccagggttcagttcttaaccg

SEQ ID NO: 16136 - protein, 176 aa, Zea mays subsp. mays
  peptide (1)..(176): Ceres Seq. ID no. 12346490
  misc_feature (37)..(176): Pfam Name: Photosystem I reaction centre subunit N (PSAN or PSI-N) Pfam Description: Photosystem I reaction centre subunit N (PSAN
  misc_feature (32)..(176): Homolog of NCBI NO: 400879 NR Description: Photosystem I reaction centre subunit N,
  misc_feature (92)..(141): Homolog of NCBI NO: 485082 NR Description: photosystem I 9K protein - rice (strain
  misc_feature (43)..(170): Homolog of NCBI NO: 12744797 NR Description: PsaN precursor [Chlamydomonas reinhardtii]
  misc_feature (43)..(170): Homolog of NCBI NO: 11134150 NR Description: Photosystem I reaction centre subunit N,
  misc_feature (68)..(176): Homolog of NCBI NO: 15237593 NR Description: photosystem I reaction center subunit PSI-N
  misc_feature (32)..(176): Homolog of NCBI NO: 28629385 NR Description: photosystem I-N subunit [Phaseolus vulgaris]
  misc_feature (84)..(176): Homolog of NCBI NO: 3914466 NR Description: Photosystem I reaction centre subunit N,
HDQKQNQAPSTHSHTPHQVKQGARSTATTAIMNSSFIGLKPAAAAAQATAAASSPMKQQQVQVAPQSRRAALLGLAAVFAVTATTAGSAKAGVFDEYLEKSKANKELNDKKRMATSAANFARAYTVEFGSCQFPYNFTGCQDLAKQKKVPFLSDDLEIECEGKEKFKCGSNVFWKW

SEQ ID NO: 16137 - protein, 145 aa, Zea mays subsp. mays
  peptide (1)..(145): Ceres Seq. ID no. 12346491
  misc_feature (6)..(145): Pfam Name: Photosystem I reaction centre subunit N (PSAN or PSI-N) Pfam Description: Photosystem I reaction centre subunit N (PSAN
  misc_feature (61)..(110): Homolog of NCBI NO: 485082 NR Description: photosystem I 9K protein - rice (strain
  misc_feature (12)..(139): Homolog of NCBI NO: 12744797 NR Description: PsaN precursor [Chlamydomonas reinhardtii]
  misc_feature (12)..(139): Homolog of NCBI NO: 11134150 NR Description: Photosystem I reaction centre subunit N,
  misc_feature (37)..(145): Homolog of NCBI NO: 15237593 NR Description: photosystem I reaction center subunit PSI-N
  misc_feature (1)..(145): Homolog of NCBI NO: 28629385 NR Description: photosystem I-N subunit [Phaseolus vulgaris]
  misc_feature (53)..(145): Homolog of NCBI NO: 3914466 NR Description: Photosystem I reaction centre subunit N,
  misc_feature (1)..(145): Homolog of NCBI NO: 400879 NR Description: Photosystem I reaction centre subunit N,
MNSSFIGLKPAAAAAQATAAASSPMKQQQVQVAPQSRRAALLGLAAVFAVTATTAGSAKAGVFDEYLEKSKANKELNDKKRMATSAANFARAYTVEFGSCQFPYNFTGCQDLAKQKKVPFLSDDLEIECEGKEKFKCGSNVFWKW

SEQ ID NO: 16138 - protein, 121 aa, Zea mays subsp. mays
  peptide (1)..(121): Ceres Seq. ID no. 12346492
  misc_feature (1)..(121): Pfam Name: Photosystem I reaction centre subunit N (PSAN or PSI-N) Pfam Description: Photosystem I reaction centre subunit N (PSAN
  misc_feature (37)..(86): Homolog of NCBI NO: 485082 NR Description: photosystem I 9K protein - rice (strain
  misc_feature (1)..(115): Homolog of NCBI NO: 12744797 NR Description: PsaN precursor [Chlamydomonas reinhardtii]
  misc_feature (1)..(115): Homolog of NCBI NO: 11134150 NR Description: Photosystem I reaction centre subunit N,
  misc_feature (13)..(121): Homolog of NCBI NO: 15237593 NR Description: photosystem I reaction center subunit PSI-N
  misc_feature (1)..(121): Homolog of NCBI NO: 28629385 NR Description: photosystem I-N subunit [Phaseolus vulgaris]
  misc_feature (29)..(121): Homolog of NCBI NO: 3914466 NR Description: Photosystem I reaction centre subunit N,
  misc_feature (1)..(121): Homolog of NCBI NO: 400879 NR Description: Photosystem I reaction centre subunit N,
MKQQQVQVAPQSRRAALLGLAAVFAVTATTAGSAKAGVFDEYLEKSKANKELNDKKRMATSAANFARAYTVEFGSCQFPYNFTGCQDLAKQKKVPFLSDDLEIECEGKEKFKCGSNVFWKW

SEQ ID NO: 16139 - DNA, 1336 bp, Zea mays subsp. mays
  misc_feature (1)..(1336): Ceres Seq. ID no. 12364240
  misc_feature: MA Experiment ID: 108527 Result: Down-regulated in Transcription
  misc_feature: MA Experiment 108527 PARAMETER Experiment Name: Zm_5mM_NO_P Parameter: Age (day) Value: 8
  misc_feature: MA Experiment 108527 PARAMETER Experiment Name: Zm_5mM_NO_P Parameter: Organism Value: Zea mays
  misc_feature: MA Experiment 108527 PARAMETER Experiment Name: Zm_5mM_NO_P Parameter: Plant Line Value: 35A19
  misc_feature: MA Experiment 108527 PARAMETER Experiment Name: Zm_5mM_NO_P Parameter: Timepoint (hr) Value: 6
  misc_feature: MA Experiment 108527 PARAMETER Experiment Name: Zm_5mM_NO_P Parameter: Tissue Value: Aerial
  misc_feature: MA Experiment 108527 PARAMETER Experiment Name: Zm_5mM_NO_P Parameter: Treatment Value: 5mM NO vs. No Treatment
  misc_feature: MA Experiment ID: 20000492 Result: Up-regulated in Transcription
  misc_feature: MA Experiment 20000492 PARAMETER Experiment Name: Zm_Hybrid_Seed_Dev_P Parameter: DAP Value: 12
  misc_feature: MA Experiment 20000492 PARAMETER Experiment Name: Zm_Hybrid_Seed_Dev_P Parameter: Organism Value: Zea mays
  misc_feature: MA Experiment 20000492 PARAMETER Experiment Name: Zm_Hybrid_Seed_Dev_P Parameter: Plant Line Value: 35A19
  misc_feature: MA Experiment 20000492 PARAMETER Experiment Name: Zm_Hybrid_Seed_Dev_P Parameter: Tissue Value: Fert Kernel vs. Unfert Floret
agagagagaaggtgagtgctttgacaaggggaaaaaacccaggtctgtgtgtgtgtgtgcgagagagagagagagagagagagagagagagagagagaggcgaaggcnnctcaggcgacgcgatggcgatggcggcgctgcgacgcnaggggaggcgcctcatcctntnctccnccgtcccnaacccgtctctggcggccgctttctctgnggngacgcnatcctccgccgtctcgcaaccggagatggctccacttggtgcacggtctatttcaactcaaatcgtgaggaaccggatgaagagtgtcaggaatatccagaagatcacaaaggctatgaagatggttgcagcatcaaagctccgggcagttcagacaaggactgaaaattcacgtggcttgtggcaaccgttcaccgcccttcttggggatgctcctagtgttgacgtcaagaagaatgtgattgtggccattacctctgataagggactctgtggtggtattaattcaacatcagtgaaagttagcagggcccttcacaaattgacatctggtccagaaaaagaaaccaagtatgttatattaggagaaaagggcaaagttcagctgttgcgtgactcaaaggacagcattgaaatgactgcaactgaactgcagaagaaccctatcaactacacacaggttgccgtgctcgcggatgacatattgaaaaatgtggaatatgatgctctgagggttattttcaacaagttccaatctgtcatatcgtttaagcccacaatggtaacaatactttcccccgaggttgcagaaaaagaatcagaagctggtgggaagatgggtgacctagattcttatgagattgaaggcggcgagacaaaatcagagattttgcagaatctagctgagttccagttttcttgtgtcctgtacaatggtgccctagagaatgcatgcagtgagcttggagcccgtatgtctgccatggacagctctagcagaaatgctggcgatatgcttgatcgtctcactctcacttacaacaggacacgccaagcatccatcaccacagagcttactgagattatatctggtgcatcggcccttgaggggtagtgaagagactgcggacttcttccttttgccgtttgtgttcctctcccatgaaggcttttttcctcgggagtctcagtttcagctcctttcatttcacttttccttgagaaacttgctctcatgctttgttgcaataatcaggccaacgacaatgatagtgccgtgcacccttggcacattgcagaaagagtgtaaacagctatggttaatgggtggttttc

SEQ ID NO: 16140 - protein, 370 aa, Zea mays subsp. mays
  peptide (1)..(370): Ceres Seq. ID no. 12364241
  misc_feature (95)..(226): Pfam Name: ATP synthase Pfam Description: ATP synthase
  misc_feature (87)..(368): Homolog of NCBI NO: 17544026 NR Description: ATP synthase (32.4 kD) [Caenorhabditis elegans]
  misc_feature (82)..(368): Homolog of NCBI NO: 23490546 NR Description: ATP synthase F1, gamma subunit [Plasmodium yoelii
  misc_feature (91)..(368): Homolog of NCBI NO: 11466530 NR Description: ATP synthase F1 subunit alpha [Reclinomonas
  misc_feature (207)..(370): Homolog of NCBI NO: 7436157 NR Description: probable H+-transporting two-sector ATPase (EC
  misc_feature (43)..(369): Homolog of NCBI NO: 7436158 NR Description: probable H+-transporting two-sector ATPase (EC
  misc_feature (41)..(369): Homolog of NCBI NO: 22530902 NR Description: mitochondrial F1-ATPase, gamma subunit
  misc_feature (41)..(369): Homolog of NCBI NO: 15227257 NR Description: mitochondrial F1-ATPase, gamma subunit
  misc_feature (95)..(226): Homolog of NCBI NO: 37532654 NR Description: putative ATP SYNTHASE GAMMA CHAIN, MITOCHONDRIAL
  misc_feature (227)..(370): Homolog of NCBI NO: 37532654 NR Description: putative ATP SYNTHASE GAMMA CHAIN, MITOCHONDRIAL
  misc_feature (41)..(370): Homolog of NCBI NO: 543867 NR Description: ATP synthase gamma chain, mitochondrial precursor
  misc_feature (36)..(36): Xaa is any aa, unknown or other
  misc_feature (49)..(49): Xaa is any aa, unknown or other
  misc_feature (55)..(55): Xaa is any aa, unknown or other
  misc_feature (56)..(56): Xaa is any aa, unknown or other
  misc_feature (58)..(58): Xaa is any aa, unknown or other
  misc_feature (60)..(60): Xaa is any aa, unknown or other
  misc_feature (70)..(70): Xaa is any aa, unknown or other
  misc_feature (71)..(71): Xaa is any aa, unknown or other
  misc_feature (73)..(73): Xaa is any aa, unknown or other
REKVSALTRGKNPGLCVCVRERERERERERERGEGXSGDAMAMAALRRXGRRLIXXSXVXNPSLAAAFSXXTXSSAVSQPEMAPLGARSISTQIVRNRMKSVRNIQKITKAMKMVAASKLRAVQTRTENSRGLWQPFTALLGDAPSVDVKKNVIVAITSDKGLCGGINSTSVKVSRALHKLTSGPEKETKYVILGEKGKVQLLRDSKDSIEMTATELQKNPINYTQVAVLADDILKNVEYDALRVIFNKFQSVISFKPTMVTILSPEVAEKESEAGGKMGDLDSYEIEGGETKSEILQNLAEFQFSCVLYNGALENACSELGARMSAMDSSSRNAGDMLDRLTLTYNRTRQASITTELTEIISGASALEG

SEQ ID NO: 16141 - protein, 330 aa, Zea mays subsp. mays
  peptide (1)..(330): Ceres Seq. ID no. 12364242
  misc_feature (55)..(186): Pfam Name: ATP synthase Pfam Description: ATP synthase
  misc_feature (47)..(328): Homolog of NCBI NO: 17544026 NR Description: ATP synthase (32.4 kD) [Caenorhabditis elegans]
  misc_feature (42)..(328): Homolog of NCBI NO: 23490546 NR Description: ATP synthase F1, gamma subunit [Plasmodium yoelii
  misc_feature (51)..(328): Homolog of NCBI NO: 11466530 NR Description: ATP synthase F1 subunit alpha [Reclinomonas
  misc_feature (167)..(330): Homolog of NCBI NO: 7436157 NR Description: probable H+-transporting two-sector ATPase (EC
  misc_feature (3)..(329): Homolog of NCBI NO: 7436158 NR Description: probable H+-transporting two-sector ATPase (EC
  misc_feature (1)..(329): Homolog of NCBI NO: 22530902 NR Description: mitochondrial F1-ATPase, gamma subunit
  misc_feature (1)..(329): Homolog of NCBI NO: 15227257 NR Description: mitochondrial F1-ATPase, gamma subunit
  misc_feature (55)..(186): Homolog of NCBI NO: 37532654 NR Description: putative ATP SYNTHASE GAMMA CHAIN, MITOCHONDRIAL
  misc_feature (187)..(330): Homolog of NCBI NO: 37532654 NR Description: putative ATP SYNTHASE GAMMA CHAIN, MITOCHONDRIAL
  misc_feature (1)..(330): Homolog of NCBI NO: 543867 NR Description: ATP synthase gamma chain, mitochondrial precursor
  misc_feature (9)..(9): Xaa is any aa, unknown or other
  misc_feature (15)..(15): Xaa is any aa, unknown or other
  misc_feature (16)..(16): Xaa is any aa, unknown or other
  misc_feature (18)..(18): Xaa is any aa, unknown or other
  misc_feature (20)..(20): Xaa is any aa, unknown or other
  misc_feature (30)..(30): Xaa is any aa, unknown or other
  misc_feature (31)..(31): Xaa is any aa, unknown or other
  misc_feature (33)..(33): Xaa is any aa, unknown or other
MAMAALRRXGRRLIXXSXVXNPSLAAAFSXXTXSSAVSQPEMAPLGARSISTQIVRNRMKSVRNIQKITKAMKMVAASKLRAVQTRTENSRGLWQPFTALLGDAPSVDVKKNVIVAITSDKGLCGGINSTSVKVSRALHKLTSGPEKETKYVILGEKGKVQLLRDSKDSIEMTATELQKNPINYTQVAVLADDILKNVEYDALRVIFNKFQSVISFKPTMVTILSPEVAEKESEAGGKMGDLDSYEIEGGETKSEILQNLAEFQFSCVLYNGALENACSELGARMSAMDSSSRNAGDMLDRLTLTYNRTRQASITTELTEIISGASALEG

SEQ ID NO: 16142 - protein, 328 aa, Zea mays subsp. mays
  peptide (1)..(328): Ceres Seq. ID no. 12364243
  misc_feature (53)..(184): Pfam Name: ATP synthase Pfam Description: ATP synthase
  misc_feature (45)..(326): Homolog of NCBI NO: 17544026 NR Description: ATP synthase (32.4 kD) [Caenorhabditis elegans]
  misc_feature (40)..(326): Homolog of NCBI NO: 23490546 NR Description: ATP synthase F1, gamma subunit [Plasmodium yoelii
  misc_feature (49)..(326): Homolog of NCBI NO: 11466530 NR Description: ATP synthase F1 subunit alpha [Reclinomonas
  misc_feature (165)..(328): Homolog of NCBI NO: 7436157 NR Description: probable H+-transporting two-sector ATPase (EC
  misc_feature (1)..(327): Homolog of NCBI NO: 7436158 NR Description: probable H+-transporting two-sector ATPase (EC
  misc_feature (1)..(327): Homolog of NCBI NO: 22530902 NR Description: mitochondrial F1-ATPase, gamma subunit
  misc_feature (1)..(327): Homolog of NCBI NO: 15227257 NR Description: mitochondrial F1-ATPase, gamma subunit
  misc_feature (53)..(184): Homolog of NCBI NO: 37532654 NR Description: putative ATP SYNTHASE GAMMA CHAIN, MITOCHONDRIAL
  misc_feature (185)..(328): Homolog of NCBI NO: 37532654 NR Description: putative ATP SYNTHASE GAMMA CHAIN, MITOCHONDRIAL
  misc_feature (1)..(328): Homolog of NCBI NO: 543867 NR Description: ATP synthase gamma chain, mitochondrial precursor
  misc_feature (7)..(7): Xaa is any aa, unknown or other
  misc_feature (13)..(13): Xaa is any aa, unknown or other
  misc_feature (14)..(14): Xaa is any aa, unknown or other
  misc_feature (16)..(16): Xaa is any aa, unknown or other
  misc_feature (18)..(18): Xaa is any aa, unknown or other
  misc_feature (28)..(28): Xaa is any aa, unknown or other
  misc_feature (29)..(29): Xaa is any aa, unknown or other
  misc_feature (31)..(31): Xaa is any aa, unknown or other
MAALRRXGRRLIXXSXVXNPSLAAAFSXXTXSSAVSQPEMAPLGARSISTQIVRNRMKSVRNIQKITKAMKMVAASKLRAVQTRTENSRGLWQPFTALLGDAPSVDVKKNVIVAITSDKGLCGGINSTSVKVSRALHKLTSGPEKETKYVILGEKGKVQLLRDSKDSIEMTATELQKNPINYTQVAVLADDILKNVEYDALRVIFNKFQSVISFKPTMVTILSPEVAEKESEAGGKMGDLDSYEIEGGETKSEILQNLAEFQFSCVLYNGALENACSELGARMSAMDSSSRNAGDMLDRLTLTYNRTRQASITTELTEIISGASALEG

SEQ ID NO: 16143 - DNA, 1431 bp, Zea mays subsp. mays
  misc_feature (1)..(1431): Ceres Seq. ID no. 12367949
  misc_feature: MA Experiment ID: 108687 Result: Up-regulated in Transcription
  misc_feature: MA Experiment 108687 PARAMETER Experiment Name: Zm_Embryos-Flowers__P Parameter: Tissue Value: Embryo vs. Aerial+
gtcttcctcacaaatcccacccaaaaaaaaaacgcctcccggttgctcgcctctatcctcattgaaaatctttgaaagaggtttggatcccgaaaccgccaagggcccgccccgcaagtgcatggcagtgaacttcctggccaatgaggtgtcggacctgtgcatcggcaagccggccgtgaggtcgctaccgctctccgccgccaccggcgaccttgccgccgccctccggagggtgtcccgctctggcgccgcagcctgcgtcgcggtgaccggaccagcgcgcgccgtcgtcggccgggtcggcctcgcggacgtcctctgcttcctctgcaccgaccccgaggcgctcgcgcgccccgccgcggtgttcgccaagccggtctccgcgctcctgcctaaggacggcgccggagaggtccgccgcgtcgatccccgctccagtatcttggaggcccttgatgcggttctgagcggggcgcaggtgctggccgtcccactccgcgctggcgggcgcaagaagcagctcgttggcgccgccgacgacggcgacttctgctggctcacgcaggaggacctcgtgcgctactttctcaactacatctgcctcgtctacaatgtggcggcgcgctccgtgtcctccctcgggctcgtgcgcgccgacttcctctcggtgcgccccggcgaggcgtccctgtccgccgtgcccctcatccgccgcgccgtcgccacggagacggcggtcgccgtggtcgccgaagacgggcacctcgtcggcgagatctcccctgcccttctcgcggcctgcgacgagacggcggcggcagccatcgccacgctctcggccgccgacctcatggcctacatcgaccactacgtgtcgccgccggagcacatcctgcgcgccgtcaaggccgggctgaaggacaagggcctggacgccttgcttgcgctggttgaggacgagacgctgtcgtccttctcgtccctctccgcgtcctcctcgtccgacgaggaggcaggccgggcgcagctgaggcgcccgtcgtcggggagctacgggcggcgggcggctgacgagccggtggtgtgcagccccgcgagctcactggtggccgtcttggtgcaggccctcgcgcacagggtgagctacgtctgggtcctcgacgaggacaacgactgccgcctcgccggcatcgtcaggttcgcggacgtgctgagggtgttccgggaccagctgctgtgaggtctgacgagtgcttactgtttcctggctcccatcttgtggtgtcatggaattgagaagaatatgagctcttgtttctgaaacatttttatttgaagagtatgtgtttgcttgcttggtagccagttcagaattcagatgaacagctttggcattggtgcgttttcattaaatttcttcctatt

SEQ ID NO: 16144 - protein, 414 aa, Zea mays subsp. mays
  peptide (1)..(414): Ceres Seq. ID no. 12367950
  misc_feature (355)..(410): Pfam Name: CBS domain Pfam Description: CBS domain
  misc_feature (185)..(412): Homolog of NCBI NO: 7487793 NR Description: hypothetical protein T8F5.10 - Arabidopsis
  misc_feature (185)..(412): Homolog of NCBI NO: 15218643 NR Description: hypothetical protein; protein id: At1g65320.1
  misc_feature (98)..(402): Homolog of NCBI NO: 7486257 NR Description: hypothetical protein F27G19.60 - Arabidopsis
  misc_feature (98)..(410): Homolog of NCBI NO: 30687603 NR Description: expressed protein [Arabidopsis thaliana]
  misc_feature (98)..(410): Homolog of NCBI NO: 27754524 NR Description: unknown protein [Arabidopsis thaliana]
  misc_feature (41)..(167): Homolog of NCBI NO: 15238832 NR Description: putative protein; protein id: At5g53750.1
  misc_feature (184)..(414): Homolog of NCBI NO: 15238832 NR Description: putative protein; protein id: At5g53750.1
  misc_feature (41)..(413): Homolog of NCBI NO: 37535750 NR Description: unknown protein [Oryza sativa (japonica
SSSQIPPKKKTPPGCSPLSSLKIFERGLDPETAKGPPRKCMAVNFLANEVSDLCIGKPAVRSLPLSAATGDLAAALRRVSRSGAAACVAVTGPARAVVGRVGLADVLCFLCTDPEALARPAAVFAKPVSALLPKDGAGEVRRVDPRSSILEALDAVLSGAQVLAVPLRAGGRKKQLVGAADDGDFCWLTQEDLVRYFLNYICLVYNVAARSVSSLGLVRADFLSVRPGEASLSAVPLIRRAVATETAVAVVAEDGHLVGEISPALLAACDETAAAAIATLSAADLMAYIDHYVSPPEHILRAVKAGLKDKGLDALLALVEDETLSSFSSLSASSSSDEEAGRAQLRRPSSGSYGRRAADEPVVCSPASSLVAVLVQALAHRVSYVWVLDEDNDCRLAGIVRFADVLRVFRDQLL

SEQ ID NO: 16145 - protein, 374 aa, Zea mays subsp. mays
  peptide (1)..(374): Ceres Seq. ID no. 12367951
  misc_feature (315)..(370): Pfam Name: CBS domain Pfam Description: CBS domain
  misc_feature (145)..(372): Homolog of NCBI NO: 7487793 NR Description: hypothetical protein T8F5.10 - Arabidopsis
  misc_feature (145)..(372): Homolog of NCBI NO: 15218643 NR Description: hypothetical protein; protein id: At1g65320.1
  misc_feature (58)..(362): Homolog of NCBI NO: 7486257 NR Description: hypothetical protein F27G19.60 - Arabidopsis
  misc_feature (58)..(370): Homolog of NCBI NO: 30687603 NR Description: expressed protein [Arabidopsis thaliana]
  misc_feature (58)..(370): Homolog of NCBI NO: 27754524 NR Description: unknown protein [Arabidopsis thaliana]
  misc_feature (1)..(127): Homolog of NCBI NO: 15238832 NR Description: putative protein; protein id: At5g53750.1
  misc_feature (144)..(374): Homolog of NCBI NO: 15238832 NR Description: putative protein; protein id: At5g53750.1
  misc_feature (1)..(373): Homolog of NCBI NO: 37535750 NR Description: unknown protein [Oryza sativa (japonica
MAVNFLANEVSDLCIGKPAVRSLPLSAATGDLAAALRRVSRSGAAACVAVTGPARAVVGRVGLADVLCFLCTDPEALARPAAVFAKPVSALLPKDGAGEVRRVDPRSSILEALDAVLSGAQVLAVPLRAGGRKKQLVGAADDGDFCWLTQEDLVRYFLNYICLVYNVAARSVSSLGLVRADFLSVRPGEASLSAVPLIRRAVATETAVAVVAEDGHLVGEISPALLAACDETAAAAIATLSAADLMAYIDHYVSPPEHILRAVKAGLKDKGLDALLALVEDETLSSFSSLSASSSSDEEAGRAQLRRPSSGSYGRRAADEPVVCSPASSLVAVLVQALAHRVSYVWVLDEDNDCRLAGIVRFADVLRVFRDQLL

SEQ ID NO: 16146 - DNA, 1541 bp, Zea mays subsp. mays
  misc_feature (1)..(1541): Ceres Seq. ID no. 12373039
  misc_feature: MA Experiment ID: 108528 Result: Up-regulated in Transcription
  misc_feature: MA Experiment 108528 PARAMETER Experiment Name: Zm_Imbibed_Seeds_P Parameter: Age (day) Value: 5 vs. 2
  misc_feature: MA Experiment 108528 PARAMETER Experiment Name: Zm_Imbibed_Seeds_P Parameter: Organism Value: Zea mays
  misc_feature: MA Experiment 108528 PARAMETER Experiment Name: Zm_Imbibed_Seeds_P Parameter: Plant Line Value: 35A19
  misc_feature: MA Experiment 108528 PARAMETER Experiment Name: Zm_Imbibed_Seeds_P Parameter: Tissue Value: Aerial vs. Embryo
  misc_feature: MA Experiment ID: 108529 Result: Up-regulated in Transcription
  misc_feature: MA Experiment 108529 PARAMETER Experiment Name: Zm_Imbibed_Seeds_P Parameter: Age (day) Value: 5 vs. 2
  misc_feature: MA Experiment 108529 PARAMETER Experiment Name: Zm_Imbibed_Seeds_P Parameter: Organism Value: Zea mays
  misc_feature: MA Experiment 108529 PARAMETER Experiment Name: Zm_Imbibed_Seeds_P Parameter: Plant Line Value: 35A19
  misc_feature: MA Experiment 108529 PARAMETER Experiment Name: Zm_Imbibed_Seeds_P Parameter: Tissue Value: Roots vs. Embryo
  misc_feature: MA Experiment ID: 108530 Result: Up-regulated in Transcription
  misc_feature: MA Experiment 108530 PARAMETER Experiment Name: Zm_Imbibed_Seeds_P Parameter: Age (day) Value: 6 vs. 2
  misc_feature: MA Experiment 108530 PARAMETER Experiment Name: Zm_Imbibed_Seeds_P Parameter: Organism Value: Zea mays
  misc_feature: MA Experiment 108530 PARAMETER Experiment Name: Zm_Imbibed_Seeds_P Parameter: Plant Line Value: 35A19
  misc_feature: MA Experiment 108530 PARAMETER Experiment Name: Zm_Imbibed_Seeds_P Parameter: Tissue Value: Aerial vs. Embryo
  misc_feature: MA Experiment ID: 108535 Result: Down-regulated in Transcription
  misc_feature: MA Experiment 108535 PARAMETER Experiment Name: Zm_Meristem_P Parameter: Age (day) Value: 8
  misc_feature: MA Experiment 108535 PARAMETER Experiment Name: Zm_Meristem_P Parameter: Organism Value: Zea mays
  misc_feature: MA Experiment 108535 PARAMETER Experiment Name: Zm_Meristem_P Parameter: Plant Line Value: 35A19
  misc_feature: MA Experiment 108535 PARAMETER Experiment Name: Zm_Meristem_P Parameter: Tissue Value: Root Meristem vs. Above Root Meristem
  misc_feature: MA Experiment ID: 108543 Result: Up-regulated in Transcription
cccgttcaacccacctttctgccacacacctcgagcgaagcaagcaccgcaagaattgaagagccagggagattttccgtcgctccgtccgatccatggccgaacagtggtggggcagtgcctctcacaggagtcacggcacgtcggcgtgctcggccgccgcgccaccgccgctcacggtcacgggcagggtggcctgcggcagcaccttccccaccgcagccgttgagtcgacgagctccgtaaccttccaggacccttatagaagctccacccatcagcctttgtctgatgccgcctcctcgctcggtgatccacacctggactggacgcaaaccttcttgagcgggaggagcgatgccagcttccaagccgtgctccaagaaccctccgcgacgaacgatccattaatcagggaccacatggacatgggtgccggcttcttggccgaccaggcgcagctagcgccgtcgccgtacggcgatacggagccatcgcaagctcaagctctattcgacgccacggcggccgtgcacaacattttgatgtacggagacagcgaatcctcggtcagctacgacgccggcgcggcatcgatgcagttttcccagctgctcaggacctcggtgcccgcgtctacgcctacgcctacgcaaggcgacggcgtcagcgtcggcgtcggcgctccgatgcagtacttgtccggcagcagttacctgcctttcggtggcccgctgccgtctcaccttctcttgcaggccctgcaggcggctaagcccaatagccgcagctccaacgctaactctccgtcggcgaaggacgactgctctccaccaccggcggcgacgaggaaaagcgtctccgagccgcctgccgccgcgaaaaggccacggatcgaggcgccatcgccgctaccgacttttaaggtgcggaaagagaagctaggggacagaatcactgcgctccagcaactcgtctcgccttttggaaagactgataccgcatcggttcttcacgaggccatcgaatacatcaaattccttcacgaccaagttgcgtcactgagctctccctacttgaaaaatgggatccccatgaagcaattccagcacaagggctctgaggattccaaggataacggcgacacgaagcaagcagacctgcggagccggggcctgtgccttgtcccagtagcgagcacatacacggtggcggccgagacaccggagttctggcaccctacatttggaggcacattccgatggtgatgatcgtccagttttagtagcaagctaagtagcctgctgagacggaaagcaagaagtcatgatgcggcccaaagcaatcgaaggatgttttgcaagggaaaagatgtacgagatggatatgataataggtttccagtggtctcttctaagacatgcatgctggatcaggtgcagaagagagaatgattaattgaggccgtgtgtatgtgtggcacctatactcatatatatgcatgcatgcaactttgcaagcaaataattagtgacagctat

SEQ ID NO: 16147 - protein, 390 aa, Zea mays subsp. mays
  peptide (1)..(390): Ceres Seq. ID no. 12373040
  misc_feature (279)..(316): Pfam Name: Helix-loop-helix DNA-binding domain Pfam Description: Helix-loop-helix DNA-binding domain
  misc_feature (253)..(389): Homolog of NCBI NO: 21553730 NR Description: unknown [Arabidopsis thaliana]
  misc_feature (253)..(389): Homolog of NCBI NO: 18407276 NR Description: expressed protein
  misc_feature (46)..(389): Homolog of NCBI NO: 15232315 NR Description: hypothetical protein; protein id: At3g20640.1
  misc_feature (261)..(384): Homolog of NCBI NO: 22093671 NR Description: similar to bHLH (Basic-helix-loop-helix)
  misc_feature (263)..(381): Homolog of NCBI NO: 22328848 NR Description: hypothetical protein
  misc_feature (6)..(389): Homolog of NCBI NO: 34910130 NR Description: B1070A12.8 [Oryza sativa (japonica
  misc_feature (259)..(374): Homolog of NCBI NO: 15234636 NR Description: putative protein; protein id: At4g05170.1
  misc_feature (221)..(390): Homolog of NCBI NO: 14488370 NR Description: putative ethylene-responsive protein
  misc_feature (46)..(389): Homolog of NCBI NO: 9294343 NR Description: gene_id:F3H11.2~unknown protein [Arabidopsis
  misc_feature (1)..(325): Homolog of NCBI NO: 34910130 NR Description: B1070A12.8 [Oryza sativa (japonica
MAEQWWGSASHRSHGTSACSAAAPPPLTVTGRVACGSTFPTAAVESTSSVTFQDPYRSSTHQPLSDAASSLGDPHLDWTQTFLSGRSDASFQAVLQEPSATNDPLIRDHMDMGAGFLADQAQLAPSPYGDTEPSQAQALFDATAAVHNILMYGDSESSVSYDAGAASMQFSQLLRTSVPASTPTPTQGDGVSVGVGAPMQYLSGSSYLPFGGPLPSHLLLQALQAAKPNSRSSNANSPSAKDDCSPPPAATRKSVSEPPAAAKRPRIEAPSPLPTFKVRKEKLGDRITALQQLVSPFGKTDTASVLHEAIEYIKFLHDQVASLSSPYLKNGIPMKQFQHKGSEDSKDNGDTKQADLRSRGLCLVPVASTYTVAAETPEFWHPTFGGTFRW

SEQ ID NO: 16148 - protein, 281 aa, Zea mays subsp. mays
  peptide (1)..(281): Ceres Seq. ID no. 12373041
  misc_feature (170)..(207): Pfam Name: Helix-loop-helix DNA-binding domain Pfam Description: Helix-loop-helix DNA-binding domain
  misc_feature (112)..(281): Homolog of NCBI NO: 14488370 NR Description: putative ethylene-responsive protein
  misc_feature (152)..(275): Homolog of NCBI NO: 22093671 NR Description: similar to bHLH (Basic-helix-loop-helix)
  misc_feature (150)..(265): Homolog of NCBI NO: 15234636 NR Description: putative protein; protein id: At4g05170.1
  misc_feature (154)..(272): Homolog of NCBI NO: 22328848 NR Description: hypothetical protein
  misc_feature (1)..(280): Homolog of NCBI NO: 34910130 NR Description: B1070A12.8 [Oryza sativa (japonica
  misc_feature (144)..(280): Homolog of NCBI NO: 21553730 NR Description: unknown [Arabidopsis thaliana]
  misc_feature (144)..(280): Homolog of NCBI NO: 18407276 NR Description: expressed protein
  misc_feature (1)..(280): Homolog of NCBI NO: 15232315 NR Description: hypothetical protein; protein id: At3g20640.1
  misc_feature (1)..(280): Homolog of NCBI NO: 9294343 NR Description: gene_id:F3H11.2~unknown protein [Arabidopsis
  misc_feature (1)..(216): Homolog of NCBI NO: 34910130 NR Description: B1070A12.8 [Oryza sativa (japonica
MDMGAGFLADQAQLAPSPYGDTEPSQAQALFDATAAVHNILMYGDSESSVSYDAGAASMQFSQLLRTSVPASTPTPTQGDGVSVGVGAPMQYLSGSSYLPFGGPLPSHLLLQALQAAKPNSRSSNANSPSAKDDCSPPPAATRKSVSEPPAAAKRPRIEAPSPLPTFKVRKEKLGDRITALQQLVSPFGKTDTASVLHEAIEYIKFLHDQVASLSSPYLKNGIPMKQFQHKGSEDSKDNGDTKQADLRSRGLCLVPVASTYTVAAETPEFWHPTFGGTFRW

SEQ ID NO: 16149 - protein, 279 aa, Zea mays subsp. mays
  peptide (1)..(279): Ceres Seq. ID no. 12373042
  misc_feature (168)..(205): Pfam Name: Helix-loop-helix DNA-binding domain Pfam Description: Helix-loop-helix DNA-binding domain
  misc_feature (110)..(279): Homolog of NCBI NO: 14488370 NR Description: putative ethylene-responsive protein
  misc_feature (150)..(273): Homolog of NCBI NO: 22093671 NR Description: similar to bHLH (Basic-helix-loop-helix)
  misc_feature (148)..(263): Homolog of NCBI NO: 15234636 NR Description: putative protein; protein id: At4g05170.1
  misc_feature (152)..(270): Homolog of NCBI NO: 22328848 NR Description: hypothetical protein
  misc_feature (1)..(278): Homolog of NCBI NO: 34910130 NR Description: B1070A12.8 [Oryza sativa (japonica
  misc_feature (142)..(278): Homolog of NCBI NO: 21553730 NR Description: unknown [Arabidopsis thaliana]
  misc_feature (142)..(278): Homolog of NCBI NO: 18407276 NR Description: expressed protein
  misc_feature (1)..(278): Homolog of NCBI NO: 15232315 NR Description: hypothetical protein; protein id: At3g20640.1
  misc_feature (1)..(278): Homolog of NCBI NO: 9294343 NR Description: gene_id:F3H11.2~unknown protein [Arabidopsis
  misc_feature (1)..(214): Homolog of NCBI NO: 34910130 NR Description: B1070A12.8 [Oryza sativa (japonica
MGAGFLADQAQLAPSPYGDTEPSQAQALFDATAAVHNILMYGDSESSVSYDAGAASMQFSQLLRTSVPASTPTPTQGDGVSVGVGAPMQYLSGSSYLPFGGPLPSHLLLQALQAAKPNSRSSNANSPSAKDDCSPPPAATRKSVSEPPAAAKRPRIEAPSPLPTFKVRKEKLGDRITALQQLVSPFGKTDTASVLHEAIEYIKFLHDQVASLSSPYLKNGIPMKQFQHKGSEDSKDNGDTKQADLRSRGLCLVPVASTYTVAAETPEFWHPTFGGTFRW

SEQ ID NO: 16150 - DNA, 1261 bp, Zea mays subsp. mays
  misc_feature (1)..(1261): Ceres Seq. ID no. 12383097
  misc_feature: MA Experiment ID: 108522 Result: Down-regulated in Transcription
  misc_feature: MA Experiment 108522 PARAMETER Experiment Name: Zm_42deg_Heat_P Parameter: Age (day) Value: 8
  misc_feature: MA Experiment 108522 PARAMETER Experiment Name: Zm_42deg_Heat_P Parameter: Organism Value: Zea mays
  misc_feature: MA Experiment 108522 PARAMETER Experiment Name: Zm_42deg_Heat_P Parameter: Plant Line Value: 35A19
  misc_feature: MA Experiment 108522 PARAMETER Experiment Name: Zm_42deg_Heat_P Parameter: Temperature (deg C) Value: 42 vs. 22
  misc_feature: MA Experiment 108522 PARAMETER Experiment Name: Zm_42deg_Heat_P Parameter: Timepoint (hr) Value: 1
  misc_feature: MA Experiment 108522 PARAMETER Experiment Name: Zm_42deg_Heat_P Parameter: Tissue Value: Aerial
  misc_feature: MA Experiment ID: 108527 Result: Down-regulated in Transcription
  misc_feature: MA Experiment 108527 PARAMETER Experiment Name: Zm_5mM_NO_P Parameter: Age (day) Value: 8
  misc_feature: MA Experiment 108527 PARAMETER Experiment Name: Zm_5mM_NO_P Parameter: Organism Value: Zea mays
  misc_feature: MA Experiment 108527 PARAMETER Experiment Name: Zm_5mM_NO_P Parameter: Plant Line Value: 35A19
  misc_feature: MA Experiment 108527 PARAMETER Experiment Name: Zm_5mM_NO_P Parameter: Timepoint (hr) Value: 6
  misc_feature: MA Experiment 108527 PARAMETER Experiment Name: Zm_5mM_NO_P Parameter: Tissue Value: Aerial
  misc_feature: MA Experiment 108527 PARAMETER Experiment Name: Zm_5mM_NO_P Parameter: Treatment Value: 5mM NO vs. No Treatment
  misc_feature: MA Experiment ID: 108528 Result: Up-regulated in Transcription
  misc_feature: MA Experiment 108528 PARAMETER Experiment Name: Zm_Imbibed_Seeds_P Parameter: Age (day) Value: 5 vs. 2
  misc_feature: MA Experiment 108528 PARAMETER Experiment Name: Zm_Imbibed_Seeds_P Parameter: Organism Value: Zea mays
  misc_feature: MA Experiment 108528 PARAMETER Experiment Name: Zm_Imbibed_Seeds_P Parameter: Plant Line Value: 35A19
  misc_feature: MA Experiment 108528 PARAMETER Experiment Name: Zm_Imbibed_Seeds_P Parameter: Tissue Value: Aerial vs. Embryo
  misc_feature: MA Experiment ID: 108530 Result: Up-regulated in Transcription
  misc_feature: MA Experiment 108530 PARAMETER Experiment Name: Zm_Imbibed_Seeds_P Parameter: Age (day) Value: 6 vs. 2
  misc_feature: MA Experiment 108530 PARAMETER Experiment Name: Zm_Imbibed_Seeds_P Parameter: Organism Value: Zea mays
  misc_feature: MA Experiment 108530 PARAMETER Experiment Name: Zm_Imbibed_Seeds_P Parameter: Plant Line Value: 35A19
  misc_feature: MA Experiment 108530 PARAMETER Experiment Name: Zm_Imbibed_Seeds_P Parameter: Tissue Value: Aerial vs. Embryo
  misc_feature: MA Experiment ID: 108544 Result: Down-regulated in Transcription
  misc_feature: MA Experiment ID: 108546 Result: Up-regulated in Transcription
  misc_feature: MA Experiment 108546 PARAMETER Experiment Name: Zm_Imbibed_Seeds_P Parameter: Age (day) Value: 3 vs. 2
  misc_feature: MA Experiment 108546 PARAMETER Experiment Name: Zm_Imbibed_Seeds_P Parameter: Organism Value: Zea mays
  misc_feature: MA Experiment 108546 PARAMETER Experiment Name: Zm_Imbibed_Seeds_P Parameter: Plant Line Value: 35A19
  misc_feature: MA Experiment 108546 PARAMETER Experiment Name: Zm_Imbibed_Seeds_P Parameter: Tissue Value: Roots vs. Embryo
  misc_feature: MA Experiment ID: 108556 Result: Down-regulated in Transcription
  misc_feature: MA Experiment 108556 PARAMETER Experiment Name: Zm_Drought_P Parameter: Age (day) Value: 9
  misc_feature: MA Experiment 108556 PARAMETER Experiment Name: Zm_Drought_P Parameter: Organism Value: Zea mays
  misc_feature: MA Experiment 108556 PARAMETER Experiment Name: Zm_Drought_P Parameter: Plant Line Value: 35A19
  misc_feature: MA Experiment 108556 PARAMETER Experiment Name: Zm_Drought_P Parameter: Timepoint (hr) Value: 24
  misc_feature: MA Experiment 108556 PARAMETER Experiment Name: Zm_Drought_P Parameter: Tissue Value: Aerial
  misc_feature: MA Experiment 108556 PARAMETER Experiment Name: Zm_Drought_P Parameter: Treatment Value: Drought vs. No Drought
  misc_feature: MA Experiment ID: 108559 Result: Down-regulated in Transcription
  misc_feature: MA Experiment 108559 PARAMETER Experiment Name: Zm_5mM_NO_P Parameter: Age (day) Value: 8
  misc_feature: MA Experiment 108559 PARAMETER Experiment Name: Zm_5mM_NO_P Parameter: Organism Value: Zea mays
  misc_feature: MA Experiment 108559 PARAMETER Experiment Name: Zm_5mM_NO_P Parameter: Plant Line Value: 35A19
  misc_feature: MA Experiment 108559 PARAMETER Experiment Name: Zm_5mM_NO_P Parameter: Timepoint (hr) Value: 12
  misc_feature: MA Experiment 108559 PARAMETER Experiment Name: Zm_5mM_NO_P Parameter: Tissue Value: Aerial
  misc_feature: MA Experiment 108559 PARAMETER Experiment Name: Zm_5mM_NO_P Parameter: Treatment Value: 5mM NO vs. No Treatment
  misc_feature: MA Experiment ID: 108688 Result: Down-regulated in Transcription
  misc_feature: MA Experiment 108688 PARAMETER Experiment Name: Zm_Embryos-Flowers__P Parameter: Tissue Value: Immature Flowers vs. Aerial+
  misc_feature: MA Experiment ID: 20000477 Result: Down-regulated in Transcription
  misc_feature: MA Experiment 20000477 PARAMETER Experiment Name: Zm_5mM_SA_P Parameter: Age (day) Value: 10
  misc_feature: MA Experiment 20000477 PARAMETER Experiment Name: Zm_5mM_SA_P Parameter: Organism Value: Zea mays
  misc_feature: MA Experiment 20000477 PARAMETER Experiment Name: Zm_5mM_SA_P Parameter: Plant Line Value: 35A19
  misc_feature: MA Experiment 20000477 PARAMETER Experiment Name: Zm_5mM_SA_P Parameter: Timepoint (hr) Value: 48
  misc_feature: MA Experiment 20000477 PARAMETER Experiment Name: Zm_5mM_SA_P Parameter: Tissue Value: Aerial
  misc_feature: MA Experiment 20000477 PARAMETER Experiment Name: Zm_5mM_SA_P Parameter: Treatment Value: 5mM SA vs. No Treatment
  misc_feature: MA Experiment ID: 20000478 Result: Down-regulated in Transcription
  misc_feature: MA Experiment 20000478 PARAMETER Experiment Name: Zm_5mM_SA_P Parameter: Age (day) Value: 11
  misc_feature: MA Experiment 20000478 PARAMETER Experiment Name: Zm_5mM_SA_P Parameter: Organism Value: Zea mays
  misc_feature: MA Experiment 20000478 PARAMETER Experiment Name: Zm_5mM_SA_P Parameter: Plant Line Value: 35A19
  misc_feature: MA Experiment 20000478 PARAMETER Experiment Name: Zm_5mM_SA_P Parameter: Timepoint (hr) Value: 72
  misc_feature: MA Experiment 20000478 PARAMETER Experiment Name: Zm_5mM_SA_P Parameter: Tissue Value: Aerial
  misc_feature: MA Experiment 20000478 PARAMETER Experiment Name: Zm_5mM_SA_P Parameter: Treatment Value: 5mM SA vs. No Treatment
  misc_feature: MA Experiment ID: 20000480 Result: Down-regulated in Transcription
  misc_feature: MA Experiment 20000480 PARAMETER Experiment Name: Zm_Drought_P Parameter: Age (day) Value: 11
  misc_feature: MA Experiment 20000480 PARAMETER Experiment Name: Zm_Drought_P Parameter: Organism Value: Zea mays
  misc_feature: MA Experiment 20000480 PARAMETER Experiment Name: Zm_Drought_P Parameter: Plant Line Value: 35A19
  misc_feature: MA Experiment 20000480 PARAMETER Experiment Name: Zm_Drought_P Parameter: Timepoint (hr) Value: 72
  misc_feature: MA Experiment 20000480 PARAMETER Experiment Name: Zm_Drought_P Parameter: Tissue Value: Aerial
  misc_feature: MA Experiment 20000480 PARAMETER Experiment Name: Zm_Drought_P Parameter: Treatment Value: Drought vs. No Drought
  misc_feature: MA Experiment ID: 20000535 Result: Down-regulated in Transcription
  misc_feature: MA Experiment 20000535 PARAMETER Experiment Name: Zm_Hybrid_Seed_Dev_P Parameter: DAP Value: 30 vs. 12
  misc_feature: MA Experiment 20000535 PARAMETER Experiment Name: Zm_Hybrid_Seed_Dev_P Parameter: Organism Value: Zea mays
  misc_feature: MA Experiment 20000535 PARAMETER Experiment Name: Zm_Hybrid_Seed_Dev_P Parameter: Plant Line Value: 35A19
  misc_feature: MA Experiment 20000535 PARAMETER Experiment Name: Zm_Hybrid_Seed_Dev_P Parameter: Tissue Value: Embryo vs. Unfert Floret
ttaaccctcactaaagggaacaaaagctggagctccaccgcggtggcggccgctctagaactagtggatcccccgggctgcaggaattcgacgagaccattacctagaacatcctaatcgaaaactcacacaccatcgaaacacaaaccagcagcaggcagagcaacgactagctgccaggcaagccggccgggggtgctgcaagagtgcaacaaacaatggccaccgcgctctccttcaaggccttggcactggccgcgctcctctccatggtcgtcgcctctggcgctcgcgccgagcaacagttcaagcgcaacgccaccaccgcctcgcaggacagatccttgttgtcctacagcagtggctggctgccggccaaggccacctggtacggcgcccccaccggcgccggccccctcgacaacggtggtgcgtgcgggttcaagggcaccaaccagtacccgttctcgtccatgacgtcctgtggcaacgagcccatcttcaaggacggcaagggttgcggctcatgctaccagatacggtgcctgaagagcaaccacccggcctgctccggcgtggctcagacggtgatcatcacggacatgaactactacccggtggccaagtaccacttcgacctgagcggcacggcgttcgggtccatggccagctggggcctgaacgacaagctccggcacgccgggatcatcgacatgcagttcaggcgggtgccgtgcaacttcccgggcctgaccatcaccttccgcgtccagcacggctccaaccccatgtacctggccgtgctcatcgagcacgagaacaaggacggcgacgtggtgcaggcggacatcatgcagagcaactccggccactgggagcccatgcacgagtcctggggctccatctggaggatcgaccccaaccgcccgctccgtggccccttctccatgcgcatcaccaacgagtccggcaggcagctggtggccaagaacgtcatcccggccaactacatccccgacgtcgactaccgctccttcgtccagtactaatgatcgagctagcttggtcattgcttaagcgtttaattgtttcttctttatttaattagtggctgccgttgccgacatgcatgtgggggaaattggaggaggcaagcatcaatgcaatgtgtgctctcccgcccactgtcactataccgttattaattaccagtgtgtaaccagcaaatcatactacatatatggttatataatttcatact

SEQ ID NO: 16151 - protein, 276 aa, Zea mays subsp. mays
  peptide (1)..(276): Ceres Seq. ID no. 12383098
  misc_feature (180)..(261): Pfam Name: Pollen allergen Pfam Description: Pollen allergen
  misc_feature (6)..(276): Homolog of NCBI NO: 37536762 NR Description: beta-expansin EXPB4 [Oryza sativa (japonica
  misc_feature (6)..(276): Homolog of NCBI NO: 8118425 NR Description: beta-expansin [Oryza sativa]
  misc_feature (36)..(276): Homolog of NCBI NO: 8118432 NR Description: beta-expansin [Oryza sativa]
  misc_feature (5)..(276): Homolog of NCBI NO: 4099919 NR Description: pollen allergen homolog [Triticum aestivum]
  misc_feature (1)..(276): Homolog of NCBI NO: 14193773 NR Description: beta-expansin 7 [Zea mays]
  misc_feature (1)..(276): Homolog of NCBI NO: 37536760 NR Description: beta-expansin EXPB3 [Oryza sativa (japonica
  misc_feature (1)..(276): Homolog of NCBI NO: 37536756 NR Description: beta-expansin EXPB6 [Oryza sativa (japonica
  misc_feature (3)..(276): Homolog of NCBI NO: 14330330 NR Description: beta expansin B3 [Festuca pratensis]
  misc_feature (1)..(276): Homolog of NCBI NO: 14330328 NR Description: beta expansin B2 [Festuca pratensis]
  misc_feature (1)..(276): Homolog of NCBI NO: 14193771 NR Description: beta-expansin 6 [Zea mays]
MATALSFKALALAALLSMVVASGARAEQQFKRNATTASQDRSLLSYSSGWLPAKATWYGAPTGAGPLDNGGACGFKGTNQYPFSSMTSCGNEPIFKDGKGCGSCYQIRCLKSNHPACSGVAQTVIITDMNYYPVAKYHFDLSGTAFGSMASWGLNDKLRHAGIIDMQFRRVPCNFPGLTITFRVQHGSNPMYLAVLIEHENKDGDVVQADIMQSNSGHWEPMHESWGSIWRIDPNRPLRGPFSMRITNESGRQLVAKNVIPANYIPDVDYRSFVQY

SEQ ID NO: 16152 - protein, 259 aa, Zea mays subsp. mays
  peptide (1)..(259): Ceres Seq. ID no. 12383099
  misc_feature (163)..(244): Pfam Name: Pollen allergen Pfam Description: Pollen allergen
  misc_feature (1)..(259): Homolog of NCBI NO: 37536762 NR Description: beta-expansin EXPB4 [Oryza sativa (japonica
  misc_feature (1)..(259): Homolog of NCBI NO: 8118425 NR Description: beta-expansin [Oryza sativa]
  misc_feature (19)..(259): Homolog of NCBI NO: 8118432 NR Description: beta-expansin [Oryza sativa]
  misc_feature (1)..(259): Homolog of NCBI NO: 4099919 NR Description: pollen allergen homolog [Triticum aestivum]
  misc_feature (1)..(259): Homolog of NCBI NO: 14193773 NR Description: beta-expansin 7 [Zea mays]
  misc_feature (1)..(259): Homolog of NCBI NO: 37536760 NR Description: beta-expansin EXPB3 [Oryza sativa (japonica
  misc_feature (1)..(259): Homolog of NCBI NO: 37536756 NR Description: beta-expansin EXPB6 [Oryza sativa (japonica
  misc_feature (1)..(259): Homolog of NCBI NO: 14330330 NR Description: beta expansin B3 [Festuca pratensis]
  misc_feature (1)..(259): Homolog of NCBI NO: 14330328 NR Description: beta expansin B2 [Festuca pratensis]
  misc_feature (1)..(259): Homolog of NCBI NO: 14193771 NR Description: beta-expansin 6 [Zea mays]
MVVASGARAEQQFKRNATTASQDRSLLSYSSGWLPAKATWYGAPTGAGPLDNGGACGFKGTNQYPFSSMTSCGNEPIFKDGKGCGSCYQIRCLKSNHPACSGVAQTVIITDMNYYPVAKYHFDLSGTAFGSMASWGLNDKLRHAGIIDMQFRRVPCNFPGLTITFRVQHGSNPMYLAVLIEHENKDGDVVQADIMQSNSGHWEPMHESWGSIWRIDPNRPLRGPFSMRITNESGRQLVAKNVIPANYIPDVDYRSFVQY

SEQ ID NO: 16153 - protein, 193 aa, Zea mays subsp. mays
  peptide (1)..(193): Ceres Seq. ID no. 12383100
MLPDTVPEEQPPGLLRRGSDGDHHGHELLPGGQVPLRPERHGVRVHGQLGPERQAPARRDHRHAVQAGAVQLPGPDHHLPRPARLQPHVPGRAHRAREQGRRRGAGGHHAEQLRPLGAHARVLGLHLEDRPQPPAPWPLLHAHHQRVRQAAGGQERHPGQLHPRRRLPLLRPVLMIELAWSLLKRLIVSSLFN

SEQ ID NO: 16154 - DNA, 1835 bp, Zea mays subsp. mays
  misc_feature (1)..(1835): Ceres Seq. ID no. 12349580
  misc_feature: MA Experiment ID: 108529 Result: Down-regulated in Transcription
  misc_feature: MA Experiment 108529 PARAMETER Experiment Name: Zm_Imbibed_Seeds_P Parameter: Age (day) Value: 5 vs. 2
  misc_feature: MA Experiment 108529 PARAMETER Experiment Name: Zm_Imbibed_Seeds_P Parameter: Organism Value: Zea mays
  misc_feature: MA Experiment 108529 PARAMETER Experiment Name: Zm_Imbibed_Seeds_P Parameter: Plant Line Value: 35A19
  misc_feature: MA Experiment 108529 PARAMETER Experiment Name: Zm_Imbibed_Seeds_P Parameter: Tissue Value: Roots vs. Embryo
  misc_feature: MA Experiment ID: 108535 Result: Up-regulated in Transcription
  misc_feature: MA Experiment 108535 PARAMETER Experiment Name: Zm_Meristem_P Parameter: Age (day) Value: 8
  misc_feature: MA Experiment 108535 PARAMETER Experiment Name: Zm_Meristem_P Parameter: Organism Value: Zea mays
  misc_feature: MA Experiment 108535 PARAMETER Experiment Name: Zm_Meristem_P Parameter: Plant Line Value: 35A19
  misc_feature: MA Experiment 108535 PARAMETER Experiment Name: Zm_Meristem_P Parameter: Tissue Value: Root Meristem vs. Above Root Meristem
  misc_feature: MA Experiment ID: 108544 Result: Down-regulated in Transcription
  misc_feature: MA Experiment ID: 20000533 Result: Down-regulated in Transcription
  misc_feature: MA Experiment 20000533 PARAMETER Experiment Name: Zm_0.001percent_MeJA_P Parameter: Age (day) Value: 11
  misc_feature: MA Experiment 20000533 PARAMETER Experiment Name: Zm_0.001percent_MeJA_P Parameter: Organism Value: Zea mays
  misc_feature: MA Experiment 20000533 PARAMETER Experiment Name: Zm_0.001percent_MeJA_P Parameter: Plant Line Value: 35A19
  misc_feature: MA Experiment 20000533 PARAMETER Experiment Name: Zm_0.001percent_MeJA_P Parameter: Timepoint (hr) Value: 72
  misc_feature: MA Experiment 20000533 PARAMETER Experiment Name: Zm_0.001percent_MeJA_P Parameter: Tissue Value: Aerial
  misc_feature: MA Experiment 20000533 PARAMETER Experiment Name: Zm_0.001percent_MeJA_P Parameter: Treatment Value: 0.001percent MeJA vs. No Treatment
  misc_feature: MA Experiment ID: 20000534 Result: Down-regulated in Transcription
  misc_feature: MA Experiment 20000534 PARAMETER Experiment Name: Zm_Hybrid_Pollen_P Parameter: Age (day) Value: 8
  misc_feature: MA Experiment 20000534 PARAMETER Experiment Name: Zm_Hybrid_Pollen_P Parameter: Organism Value: Zea mays
  misc_feature: MA Experiment 20000534 PARAMETER Experiment Name: Zm_Hybrid_Pollen_P Parameter: Plant Line Value: 35A19
  misc_feature: MA Experiment 20000534 PARAMETER Experiment Name: Zm_Hybrid_Pollen_P Parameter: Tissue Value: Pollen vs. Aerial
  misc_feature: MA Experiment ID: 20000535 Result: Up-regulated in Transcription
  misc_feature: MA Experiment 20000535 PARAMETER Experiment Name: Zm_Hybrid_Seed_Dev_P Parameter: DAP Value: 30 vs. 12
  misc_feature: MA Experiment 20000535 PARAMETER Experiment Name: Zm_Hybrid_Seed_Dev_P Parameter: Organism Value: Zea mays
  misc_feature: MA Experiment 20000535 PARAMETER Experiment Name: Zm_Hybrid_Seed_Dev_P Parameter: Plant Line Value: 35A19
  misc_feature: MA Experiment 20000535 PARAMETER Experiment Name: Zm_Hybrid_Seed_Dev_P Parameter: Tissue Value: Embryo vs. Unfert Floret
  misc_feature: MA Experiment ID: 20000626 Result: Down-regulated in Transcription
  misc_feature: MA Experiment 20000626 PARAMETER Experiment Name: Zm_Herbicide-Treatments_P Parameter: Timepoint (hr) Value: 12
  misc_feature: MA Experiment 20000626 PARAMETER Experiment Name: Zm_Herbicide-Treatments_P Parameter: Tissue Value: Aerial
  misc_feature: MA Experiment 20000626 PARAMETER Experiment Name: Zm_Herbicide-Treatments_P Parameter: Treatment Value: Roundup vs. No Treatment
aaatccagatatcagggcagctggaactgaaggtggcgggagccgagtgatccggcggtgagctgagcggggcgggatggcggcggagcaggggcggtcgctggcggagacgcccacctggtccgtggcaaccgtcaccacgctcatggtcgctgcctgcttcctcgtcgagcgctccctctcgcgcttcgccaagtggctgcgcaagaccaagcggaaggccatgctcgccgcgctcgagaagatccgcgaagagctgatgctgctcggagtcatctcgctgctgctcagccagacggcgcgcttcatatcggagatctgcgtgccgtcctcgctcttcaccagccgcttctacatctgctccgagagcgactaccaggacctgctgcgcaacacggacgccaaccagacggcgctcgacaagaacatgttcggtggccaacggctgcacgtctgtggcgagggccatgaaccttttgtttcgtacgagggccttgagcagctgcaccggtttctcttcatccttggtatcactcatgtgttgtacagttttgtaacagtggttctgtccatgatcaagatctatagctggaggaagtgggaaaccttagcaggtccaattgctgctgaggaattgaaagctaggagaaccaaggtgatgagaaggcagtcaacctttgtttttaacaatgcttctcatccatggagcaaaaataaaatacttatttggatgctttgctttttgcgtcaattcaagggctccataataaggtcagactatttggcactgaggttgggctttgtcacatatcacaagctaccacattcatatgacttccataaatacatggtacggagcatggaagatgattacaatgggactattggtatcagttggccactttgggcatatgcgattgtctgcatattaatcaatgttcatggtatcaatatatatttctggttgtcctttgttcctgttattctggtgcttctagtgggtactgaacttcagcacgtcattgctcagttggctttggaagtcgctgaggcaacagcgccttatgttggctcacaacttaaactgcgtgatgatctattttggtttggaaagcctcgggtactctggtggcttatacagttcatttcatttcagaatgcttttgagctggcgacattcttatggtctctgtgggaactcagtgcacatacatgtttcatgaagcactactacatggttgccattcggttgatttctgggctcctagttcagttttggtgcagctacagcacactgccgctgaatgtgattatttctcagatgggttccaagttcaagaaatcactggtctcggagaacgtgagggagtcgctgcacagctggtgcaagagggttaaggacaggagccgacacaacccgctcttctcgcggaacgggaccctcacgaccagatccgtgtgctccctagacaccacctacgagacggatcacgagacgaacacggtgtgcacgctgtcgaggacggcgtcggcaacgtcgctggacgaccagttgaccgtggtcaccgtcgatgacgagccgtcctgcattgagaaggatgtctgacgcagttgctgattcgccaaaactacatactgcatcgacctgtgtgttaggaggtactctaggactgaaatgaatgtatatgtgcagtggttgcccctatcgtggcagtgaccatgtgtatatatagaactaaaaaaactataatgtctcttagctgagagtgagaggctgtacatggaaatacttgaggcagcttggaccaaatacaaaactgcggccccgtttgttt

SEQ ID NO: 16155 - protein, 509 aa, Zea mays subsp. mays
  peptide (1)..(509): Ceres Seq. ID no. 12349581
  misc_feature (4)..(501): Pfam Name: Mlo family Pfam Description: Mlo family
  misc_feature (1)..(467): Homolog of NCBI NO: 13784977 NR Description: seven transmembrane protein Mlo2 [Zea mays]
  misc_feature (1)..(473): Homolog of NCBI NO: 37536520 NR Description: putative Mlo (pathogen resistance) protein
  misc_feature (127)..(473): Homolog of NCBI NO: 13784991 NR Description: seven transmembrane protein Mlo9 [Zea mays]
  misc_feature (3)..(443): Homolog of NCBI NO: 34907492 NR Description: putative seven transmembrane protein
  misc_feature (1)..(465): Homolog of NCBI NO: 32487408 NR Description: OSJNBb0017I01.22 [Oryza sativa (japonica
  misc_feature (7)..(509): Homolog of NCBI NO: 18396019 NR Description: Mlo protein, putative
  misc_feature (1)..(481): Homolog of NCBI NO: 15238833 NR Description: putative protein
  misc_feature (4)..(503): Homolog of NCBI NO: 33942041 NR Description: At1g11000 [Arabidopsis thaliana]
  misc_feature (4)..(503): Homolog of NCBI NO: 18391228 NR Description: Barley Mlo protein isolog
  misc_feature (1)..(509): Homolog of NCBI NO: 13784981 NR Description: seven transmembrane protein Mlo4 [Zea mays]
MAAEQGRSLAETPTWSVATVTTLMVAACFLVERSLSRFAKWLRKTKRKAMLAALEKIREELMLLGVISLLLSQTARFISEICVPSSLFTSRFYICSESDYQDLLRNTDANQTALDKNMFGGQRLHVCGEGHEPFVSYEGLEQLHRFLFILGITHVLYSFVTVVLSMIKIYSWRKWETLAGPIAAEELKARRTKVMRRQSTFVFNNASHPWSKNKILIWMLCFLRQFKGSIIRSDYLALRLGFVTYHKLPHSYDFHKYMVRSMEDDYNGTIGISWPLWAYAIVCILINVHGINIYFWLSFVPVILVLLVGTELQHVIAQLALEVAEATAPYVGSQLKLRDDLFWFGKPRVLWWLIQFISFQNAFELATFLWSLWELSAHTCFMKHYYMVAIRLISGLLVQFWCSYSTLPLNVIISQMGSKFKKSLVSENVRESLHSWCKRVKDRSRHNPLFSRNGTLTTRSVCSLDTTYETDHETNTVCTLSRTASATSLDDQLTVVTVDDEPSCIEKDV

SEQ ID NO: 16156 - protein, 486 aa, Zea mays subsp. mays
  peptide (1)..(486): Ceres Seq. ID no. 12349582
  misc_feature (1)..(478): Pfam Name: Mlo family Pfam Description: Mlo family
  misc_feature (1)..(444): Homolog of NCBI NO: 13784977 NR Description: seven transmembrane protein Mlo2 [Zea mays]
  misc_feature (1)..(450): Homolog of NCBI NO: 37536520 NR Description: putative Mlo (pathogen resistance) protein
  misc_feature (104)..(450): Homolog of NCBI NO: 13784991 NR Description: seven transmembrane protein Mlo9 [Zea mays]
  misc_feature (1)..(420): Homolog of NCBI NO: 34907492 NR Description: putative seven transmembrane protein
  misc_feature (1)..(442): Homolog of NCBI NO: 32487408 NR Description: OSJNBb0017I01.22 [Oryza sativa (japonica
  misc_feature (1)..(486): Homolog of NCBI NO: 18396019 NR Description: Mlo protein, putative
  misc_feature (1)..(458): Homolog of NCBI NO: 15238833 NR Description: putative protein
  misc_feature (1)..(480): Homolog of NCBI NO: 33942041 NR Description: At1g11000 [Arabidopsis thaliana]
  misc_feature (1)..(480): Homolog of NCBI NO: 18391228 NR Description: Barley Mlo protein isolog
  misc_feature (1)..(486): Homolog of NCBI NO: 13784981 NR Description: seven transmembrane protein Mlo4 [Zea mays]
MVAACFLVERSLSRFAKWLRKTKRKAMLAALEKIREELMLLGVISLLLSQTARFISEICVPSSLFTSRFYICSESDYQDLLRNTDANQTALDKNMFGGQRLHVCGEGHEPFVSYEGLEQLHRFLFILGITHVLYSFVTVVLSMIKIYSWRKWETLAGPIAAEELKARRTKVMRRQSTFVFNNASHPWSKNKILIWMLCFLRQFKGSIIRSDYLALRLGFVTYHKLPHSYDFHKYMVRSMEDDYNGTIGISWPLWAYAIVCILINVHGINIYFWLSFVPVILVLLVGTELQHVIAQLALEVAEATAPYVGSQLKLRDDLFWFGKPRVLWWLIQFISFQNAFELATFLWSLWELSAHTCFMKHYYMVAIRLISGLLVQFWCSYSTLPLNVIISQMGSKFKKSLVSENVRESLHSWCKRVKDRSRHNPLFSRNGTLTTRSVCSLDTTYETDHETNTVCTLSRTASATSLDDQLTVVTVDDEPSCIEKDV

SEQ ID NO: 16157 - protein, 460 aa, Zea mays subsp. mays
  peptide (1)..(460): Ceres Seq. ID no. 12349583
  misc_feature (1)..(452): Pfam Name: Mlo family Pfam Description: Mlo family
  misc_feature (1)..(418): Homolog of NCBI NO: 13784977 NR Description: seven transmembrane protein Mlo2 [Zea mays]
  misc_feature (1)..(424): Homolog of NCBI NO: 37536520 NR Description: putative Mlo (pathogen resistance) protein
  misc_feature (78)..(424): Homolog of NCBI NO: 13784991 NR Description: seven transmembrane protein Mlo9 [Zea mays]
  misc_feature (1)..(394): Homolog of NCBI NO: 34907492 NR Description: putative seven transmembrane protein
  misc_feature (1)..(416): Homolog of NCBI NO: 32487408 NR Description: OSJNBb0017I01.22 [Oryza sativa (japonica
  misc_feature (1)..(460): Homolog of NCBI NO: 18396019 NR Description: Mlo protein, putative
  misc_feature (1)..(432): Homolog of NCBI NO: 15238833 NR Description: putative protein
  misc_feature (1)..(454): Homolog of NCBI NO: 33942041 NR Description: At1g11000 [Arabidopsis thaliana]
  misc_feature (1)..(454): Homolog of NCBI NO: 18391228 NR Description: Barley Mlo protein isolog
  misc_feature (1)..(460): Homolog of NCBI NO: 13784981 NR Description: seven transmembrane protein Mlo4 [Zea mays]
MLAALEKIREELMLLGVISLLLSQTARFISEICVPSSLFTSRFYICSESDYQDLLRNTDANQTALDKNMFGGQRLHVCGEGHEPFVSYEGLEQLHRFLFILGITHVLYSFVTVVLSMIKIYSWRKWETLAGPIAAEELKARRTKVMRRQSTFVFNNASHPWSKNKILIWMLCFLRQFKGSIIRSDYLALRLGFVTYHKLPHSYDFHKYMVRSMEDDYNGTIGISWPLWAYAIVCILINVHGINIYFWLSFVPVILVLLVGTELQHVIAQLALEVAEATAPYVGSQLKLRDDLFWFGKPRVLWWLIQFISFQNAFELATFLWSLWELSAHTCFMKHYYMVAIRLISGLLVQFWCSYSTLPLNVIISQMGSKFKKSLVSENVRESLHSWCKRVKDRSRHNPLFSRNGTLTTRSVCSLDTTYETDHETNTVCTLSRTASATSLDDQLTVVTVDDEPSCIEKDV

SEQ ID NO: 16158 - DNA, 1825 bp, Zea mays subsp. mays
  misc_feature (1)..(1825): Ceres Seq. ID no. 12368369
  misc_feature: MA Experiment ID: 108523 Result: Up-regulated in Transcription
  misc_feature: MA Experiment 108523 PARAMETER Experiment Name: Zm_42deg_Heat_P Parameter: Age (day) Value: 8
  misc_feature: MA Experiment 108523 PARAMETER Experiment Name: Zm_42deg_Heat_P Parameter: Organism Value: Zea mays
  misc_feature: MA Experiment 108523 PARAMETER Experiment Name: Zm_42deg_Heat_P Parameter: Plant Line Value: 35A19
  misc_feature: MA Experiment 108523 PARAMETER Experiment Name: Zm_42deg_Heat_P Parameter: Temperature (deg C) Value: 42 vs. 22
  misc_feature: MA Experiment 108523 PARAMETER Experiment Name: Zm_42deg_Heat_P Parameter: Timepoint (hr) Value: 6
  misc_feature: MA Experiment 108523 PARAMETER Experiment Name: Zm_42deg_Heat_P Parameter: Tissue Value: Aerial
  misc_feature: MA Experiment ID: 20000479 Result: Up-regulated in Transcription
  misc_feature: MA Experiment 20000479 PARAMETER Experiment Name: Zm_Drought_P Parameter: Age (day) Value: 10
  misc_feature: MA Experiment 20000479 PARAMETER Experiment Name: Zm_Drought_P Parameter: Organism Value: Zea mays
  misc_feature: MA Experiment 20000479 PARAMETER Experiment Name: Zm_Drought_P Parameter: Plant Line Value: 35A19
  misc_feature: MA Experiment 20000479 PARAMETER Experiment Name: Zm_Drought_P Parameter: Timepoint (hr) Value: 48
  misc_feature: MA Experiment 20000479 PARAMETER Experiment Name: Zm_Drought_P Parameter: Tissue Value: Aerial
  misc_feature: MA Experiment 20000479 PARAMETER Experiment Name: Zm_Drought_P Parameter: Treatment Value: Drought vs. No Drought
  misc_feature: MA Experiment ID: 20000480 Result: Up-regulated in Transcription
  misc_feature: MA Experiment 20000480 PARAMETER Experiment Name: Zm_Drought_P Parameter: Age (day) Value: 11
  misc_feature: MA Experiment 20000480 PARAMETER Experiment Name: Zm_Drought_P Parameter: Organism Value: Zea mays
  misc_feature: MA Experiment 20000480 PARAMETER Experiment Name: Zm_Drought_P Parameter: Plant Line Value: 35A19
  misc_feature: MA Experiment 20000480 PARAMETER Experiment Name: Zm_Drought_P Parameter: Timepoint (hr) Value: 72
  misc_feature: MA Experiment 20000480 PARAMETER Experiment Name: Zm_Drought_P Parameter: Tissue Value: Aerial
  misc_feature: MA Experiment 20000480 PARAMETER Experiment Name: Zm_Drought_P Parameter: Treatment Value: Drought vs. No Drought
gcacgagaccattacctagaacatcctaatcgaaaagtgggctggtcctcagtcctcttccgttcttcctcctcgctcccgccccctcgcgcccctcgcctttcagttttggatgccacggaggcctgccagtggtgggccaccgccgtacgcgcgcgacgatgccggtgaagcgttcggcgtccgcgctggcgctcccgccggtcggccgccgcgcgcgggcccgcctctgcatccgcctcgccgcgccgctctccttcctgctcctcttcgtggcgctgttccacgcccagccgctcctgggcgttccgcccgctgcgcagccgccctccgcggggcccggtaaggtcgccttccttttcctcgtccgcgcgggggtgccgctcgacttcctctgggacgccttcttccgcaacggcgaggaggggaagttctcggtgtacgtgcactccgcgccggggttccagctcgaccgcaccaccacgggatccccatacttctatgggcggcaacttgcgaggagcgtcaaggtggtgtggggcgaggccaccatggtggaggcagagaggatgttgtttgccgccgcgcttcaggatcccgcgaaccagcgctttgttttgctctctgatagctgtgtcccactctacaatttcagctccatatatacttacctgatggcttcacctaaaagttttgtagacagctttgttgataagacggagaagcgttataatcaaaacatgtctcctgccattccaaaggataaatggaggaaaggatctcagtgggtagtattaatcagaaaacatgctgaagttgttgttggtgacaaaaacgtattaaaagtattcagaagacattgcaagatggtagtaaccaagagcttgtttagacgaaggccaaatgctagacaactggggttcacctttcggagaaagcagatactgaaaggagtagctcaacaggagcatgattgtattccggatgaacattatgtgcagacattattttctatcaaaggacttgaagatgaactggagagaagaactttgacctatacctcgtggaaccaatcatcaaatccgaaagacaaaatgacttggcatcctatgaaatttgagtatgatacatctagccctgagcatatcaatgctatcaagagaattgatcatgtcaactatcaaatggagcacaggacagagtggtgccaatgcaatggtacctcggccccatgttttttatttgccaggaagttctcctatagtgcggccatgcatcttttggaacaaggagccattggcacaccgaaatctgctcagctgatgattaacttttaacaaaattgtttacacaagtctgcgctcacttttttgatgggtcattataccgttcacaatttcaccagcctcaatgggagctgtacattagcagcggtagctacagagacatggagtatcagagtattgacagcgaccagaatgcgcttagacagctaaggacttgaagagagttgatgcacaaactacagagcctcggttttgaagtttgtcagctctatcagtatgcgatttccaggggacagatggtagtgaaggacagagtacacacaacccttaccctaacaggacaggaaagttataacaatagcttgattttccttataaatattcttccccttgtatgattaaagaatagatagttttttttacttgcatacaggttatcagacatagcgaatagggaaacatgcaagaagatacatgtgtccataggacctactgtttagaacattggtcacattggcaagaagataagctgccttttc

SEQ ID NO: 16159 - protein, 391 aa, Zea mays subsp. mays
  peptide (1)..(391): Ceres Seq. ID no. 12368370
  misc_feature (101)..(210): Pfam Name: Arabidopsis protein of unknown function, DUF266 Pfam Description: Arabidopsis protein of unknown function, DUF266
  misc_feature (268)..(333): Homolog of NCBI NO: 30684956 NR Description: expressed protein [Arabidopsis thaliana]
  misc_feature (62)..(235): Homolog of NCBI NO: 30684956 NR Description: expressed protein [Arabidopsis thaliana]
  misc_feature (282)..(387): Homolog of NCBI NO: 25402693 NR Description: hypothetical protein [imported] - Arabidopsis
  misc_feature (13)..(235): Homolog of NCBI NO: 25402693 NR Description: hypothetical protein [imported] - Arabidopsis
  misc_feature (62)..(84): Homolog of NCBI NO: 22330381 NR Description: hypothetical protein; protein id: At1g62305.1
  misc_feature (120)..(236): Homolog of NCBI NO: 22330381 NR Description: hypothetical protein; protein id: At1g62305.1
  misc_feature (268)..(376): Homolog of NCBI NO: 15241437 NR Description: putative protein; protein id: At5g14550.1
  misc_feature (62)..(235): Homolog of NCBI NO: 15241437 NR Description: putative protein; protein id: At5g14550.1
  misc_feature (13)..(387): Homolog of NCBI NO: 30682534 NR Description: expressed protein [Arabidopsis thaliana]
  misc_feature (1)..(333): Homolog of NCBI NO: 34911442 NR Description: P0431H09.21 [Oryza sativa (japonica
MPVKRSASALALPPVGRRARARLCIRLAAPLSFLLLFVALFHAQPLLGVPPAAQPPSAGPGKVAFLFLVRAGVPLDFLWDAFFRNGEEGKFSVYVHSAPGFQLDRTTTGSPYFYGRQLARSVKVVWGEATMVEAERMLFAAALQDPANQRFVLLSDSCVPLYNFSSIYTYLMASPKSFVDSFVDKTEKRYNQNMSPAIPKDKWRKGSQWVVLIRKHAEVVVGDKNVLKVFRRHCKMVVTKSLFRRRPNARQLGFTFRRKQILKGVAQQEHDCIPDEHYVQTLFSIKGLEDELERRTLTYTSWNQSSNPKDKMTWHPMKFEYDTSSPEHINAIKRIDHVNYQMEHRTEWCQCNGTSAPCFLFARKFSYSAAMHLLEQGAIGTPKSAQLMINF

SEQ ID NO: 16160 - protein, 261 aa, Zea mays subsp. mays
  peptide (1)..(261): Ceres Seq. ID no. 12368371
  misc_feature (1)..(80): Pfam Name: Arabidopsis protein of unknown function, DUF266 Pfam Description: Arabidopsis protein of unknown function, DUF266
  misc_feature (1)..(104): Homolog of NCBI NO: 37531372 NR Description: hypothetical protein [Oryza sativa (japonica
  misc_feature (1)..(106): Homolog of NCBI NO: 22330381 NR Description: hypothetical protein; protein id: At1g62305.1
  misc_feature (138)..(203): Homolog of NCBI NO: 30684956 NR Description: expressed protein [Arabidopsis thaliana]
  misc_feature (1)..(105): Homolog of NCBI NO: 30684956 NR Description: expressed protein [Arabidopsis thaliana]
  misc_feature (152)..(257): Homolog of NCBI NO: 25402693 NR Description: hypothetical protein [imported] - Arabidopsis
  misc_feature (1)..(105): Homolog of NCBI NO: 25402693 NR Description: hypothetical protein [imported] - Arabidopsis
  misc_feature (138)..(246): Homolog of NCBI NO: 15241437 NR Description: putative protein; protein id: At5g14550.1
  misc_feature (1)..(105): Homolog of NCBI NO: 15241437 NR Description: putative protein; protein id: At5g14550.1
  misc_feature (1)..(257): Homolog of NCBI NO: 30682534 NR Description: expressed protein [Arabidopsis thaliana]
  misc_feature (1)..(203): Homolog of NCBI NO: 34911442 NR Description: P0431H09.21 [Oryza sativa (japonica
MVEAERMLFAAALQDPANQRFVLLSDSCVPLYNFSSIYTYLMASPKSFVDSFVDKTEKRYNQNMSPAIPKDKWRKGSQWVVLIRKHAEVVVGDKNVLKVFRRHCKMVVTKSLFRRRPNARQLGFTFRRKQILKGVAQQEHDCIPDEHYVQTLFSIKGLEDELERRTLTYTSWNQSSNPKDKMTWHPMKFEYDTSSPEHINAIKRIDHVNYQMEHRTEWCQCNGTSAPCFLFARKFSYSAAMHLLEQGAIGTPKSAQLMINF

SEQ ID NO: 16161 - protein, 255 aa, Zea mays subsp. mays
  peptide (1)..(255): Ceres Seq. ID no. 12368372
  misc_feature (1)..(74): Pfam Name: Arabidopsis protein of unknown function, DUF266 Pfam Description: Arabidopsis protein of unknown function, DUF266
  misc_feature (1)..(98): Homolog of NCBI NO: 37531372 NR Description: hypothetical protein [Oryza sativa (japonica
  misc_feature (1)..(100): Homolog of NCBI NO: 22330381 NR Description: hypothetical protein; protein id: At1g62305.1
  misc_feature (132)..(197): Homolog of NCBI NO: 30684956 NR Description: expressed protein [Arabidopsis thaliana]
  misc_feature (1)..(99): Homolog of NCBI NO: 30684956 NR Description: expressed protein [Arabidopsis thaliana]
  misc_feature (146)..(251): Homolog of NCBI NO: 25402693 NR Description: hypothetical protein [imported] - Arabidopsis
  misc_feature (1)..(99): Homolog of NCBI NO: 25402693 NR Description: hypothetical protein [imported] - Arabidopsis
  misc_feature (132)..(240): Homolog of NCBI NO: 15241437 NR Description: putative protein; protein id: At5g14550.1
  misc_feature (1)..(99): Homolog of NCBI NO: 15241437 NR Description: putative protein; protein id: At5g14550.1
  misc_feature (1)..(251): Homolog of NCBI NO: 30682534 NR Description: expressed protein [Arabidopsis thaliana]
  misc_feature (1)..(197): Homolog of NCBI NO: 34911442 NR Description: P0431H09.21 [Oryza sativa (japonica
MLFAAALQDPANQRFVLLSDSCVPLYNFSSIYTYLMASPKSFVDSFVDKTEKRYNQNMSPAIPKDKWRKGSQWVVLIRKHAEVVVGDKNVLKVFRRHCKMVVTKSLFRRRPNARQLGFTFRRKQILKGVAQQEHDCIPDEHYVQTLFSIKGLEDELERRTLTYTSWNQSSNPKDKMTWHPMKFEYDTSSPEHINAIKRIDHVNYQMEHRTEWCQCNGTSAPCFLFARKFSYSAAMHLLEQGAIGTPKSAQLMINF

SEQ ID NO: 16162 - DNA, 1372 bp, Zea mays subsp. mays
  misc_feature (1)..(1372): Ceres Seq. ID no. 12377676
  misc_feature: MA Experiment ID: 108527 Result: Up-regulated in Transcription
  misc_feature: MA Experiment 108527 PARAMETER Experiment Name: Zm_5mM_NO_P Parameter: Age (day) Value: 8
  misc_feature: MA Experiment 108527 PARAMETER Experiment Name: Zm_5mM_NO_P Parameter: Organism Value: Zea mays
  misc_feature: MA Experiment 108527 PARAMETER Experiment Name: Zm_5mM_NO_P Parameter: Plant Line Value: 35A19
  misc_feature: MA Experiment 108527 PARAMETER Experiment Name: Zm_5mM_NO_P Parameter: Timepoint (hr) Value: 6
  misc_feature: MA Experiment 108527 PARAMETER Experiment Name: Zm_5mM_NO_P Parameter: Tissue Value: Aerial
  misc_feature: MA Experiment 108527 PARAMETER Experiment Name: Zm_5mM_NO_P Parameter: Treatment Value: 5mM NO vs. No Treatment
  misc_feature: MA Experiment ID: 108528 Result: Down-regulated in Transcription
  misc_feature: MA Experiment 108528 PARAMETER Experiment Name: Zm_Imbibed_Seeds_P Parameter: Age (day) Value: 5 vs. 2
  misc_feature: MA Experiment 108528 PARAMETER Experiment Name: Zm_Imbibed_Seeds_P Parameter: Organism Value: Zea mays
  misc_feature: MA Experiment 108528 PARAMETER Experiment Name: Zm_Imbibed_Seeds_P Parameter: Plant Line Value: 35A19
  misc_feature: MA Experiment 108528 PARAMETER Experiment Name: Zm_Imbibed_Seeds_P Parameter: Tissue Value: Aerial vs. Embryo
  misc_feature: MA Experiment ID: 108530 Result: Down-regulated in Transcription
  misc_feature: MA Experiment 108530 PARAMETER Experiment Name: Zm_Imbibed_Seeds_P Parameter: Age (day) Value: 6 vs. 2
  misc_feature: MA Experiment 108530 PARAMETER Experiment Name: Zm_Imbibed_Seeds_P Parameter: Organism Value: Zea mays
  misc_feature: MA Experiment 108530 PARAMETER Experiment Name: Zm_Imbibed_Seeds_P Parameter: Plant Line Value: 35A19
  misc_feature: MA Experiment 108530 PARAMETER Experiment Name: Zm_Imbibed_Seeds_P Parameter: Tissue Value: Aerial vs. Embryo
  misc_feature: MA Experiment ID: 108534 Result: Up-regulated in Transcription
  misc_feature: MA Experiment 108534 PARAMETER Experiment Name: Zm_4deg_Cold_P Parameter: Age (hr) Value: 8
  misc_feature: MA Experiment 108534 PARAMETER Experiment Name: Zm_4deg_Cold_P Parameter: Organism Value: Zea mays
  misc_feature: MA Experiment 108534 PARAMETER Experiment Name: Zm_4deg_Cold_P Parameter: Plant Line Value: 35A19
  misc_feature: MA Experiment 108534 PARAMETER Experiment Name: Zm_4deg_Cold_P Parameter: Temperature (deg C) Value: 4 vs. 22
  misc_feature: MA Experiment 108534 PARAMETER Experiment Name: Zm_4deg_Cold_P Parameter: Timepoint (hr) Value: 6
  misc_feature: MA Experiment 108534 PARAMETER Experiment Name: Zm_4deg_Cold_P Parameter: Tissue Value: Aerial
  misc_feature: MA Experiment ID: 108545 Result: Down-regulated in Transcription
  misc_feature: MA Experiment 108545 PARAMETER Experiment Name: Zm_Imbibed_Seeds_P Parameter: Age (day) Value: 3 vs. 2
  misc_feature: MA Experiment 108545 PARAMETER Experiment Name: Zm_Imbibed_Seeds_P Parameter: Organism Value: Zea mays
  misc_feature: MA Experiment 108545 PARAMETER Experiment Name: Zm_Imbibed_Seeds_P Parameter: Plant Line Value: 35A19
  misc_feature: MA Experiment 108545 PARAMETER Experiment Name: Zm_Imbibed_Seeds_P Parameter: Tissue Value: Aerial vs. Embryo
  misc_feature: MA Experiment ID: 108559 Result: Up-regulated in Transcription
  misc_feature: MA Experiment 108559 PARAMETER Experiment Name: Zm_5mM_NO_P Parameter: Age (day) Value: 8
  misc_feature: MA Experiment 108559 PARAMETER Experiment Name: Zm_5mM_NO_P Parameter: Organism Value: Zea mays
  misc_feature: MA Experiment 108559 PARAMETER Experiment Name: Zm_5mM_NO_P Parameter: Plant Line Value: 35A19
  misc_feature: MA Experiment 108559 PARAMETER Experiment Name: Zm_5mM_NO_P Parameter: Timepoint (hr) Value: 12
  misc_feature: MA Experiment 108559 PARAMETER Experiment Name: Zm_5mM_NO_P Parameter: Tissue Value: Aerial
  misc_feature: MA Experiment 108559 PARAMETER Experiment Name: Zm_5mM_NO_P Parameter: Treatment Value: 5mM NO vs. No Treatment
  misc_feature: MA Experiment ID: 20000477 Result: Up-regulated in Transcription
  misc_feature: MA Experiment 20000477 PARAMETER Experiment Name: Zm_5mM_SA_P Parameter: Age (day) Value: 10
  misc_feature: MA Experiment 20000477 PARAMETER Experiment Name: Zm_5mM_SA_P Parameter: Organism Value: Zea mays
  misc_feature: MA Experiment 20000477 PARAMETER Experiment Name: Zm_5mM_SA_P Parameter: Plant Line Value: 35A19
  misc_feature: MA Experiment 20000477 PARAMETER Experiment Name: Zm_5mM_SA_P Parameter: Timepoint (hr) Value: 48
  misc_feature: MA Experiment 20000477 PARAMETER Experiment Name: Zm_5mM_SA_P Parameter: Tissue Value: Aerial
  misc_feature: MA Experiment 20000477 PARAMETER Experiment Name: Zm_5mM_SA_P Parameter: Treatment Value: 5mM SA vs. No Treatment
  misc_feature: MA Experiment ID: 20000479 Result: Up-regulated in Transcription
  misc_feature: MA Experiment 20000479 PARAMETER Experiment Name: Zm_Drought_P Parameter: Age (day) Value: 10
  misc_feature: MA Experiment 20000479 PARAMETER Experiment Name: Zm_Drought_P Parameter: Organism Value: Zea mays
  misc_feature: MA Experiment 20000479 PARAMETER Experiment Name: Zm_Drought_P Parameter: Plant Line Value: 35A19
  misc_feature: MA Experiment 20000479 PARAMETER Experiment Name: Zm_Drought_P Parameter: Timepoint (hr) Value: 48
  misc_feature: MA Experiment 20000479 PARAMETER Experiment Name: Zm_Drought_P Parameter: Tissue Value: Aerial
  misc_feature: MA Experiment 20000479 PARAMETER Experiment Name: Zm_Drought_P Parameter: Treatment Value: Drought vs. No Drought
  misc_feature: MA Experiment ID: 20000480 Result: Up-regulated in Transcription
  misc_feature: MA Experiment 20000480 PARAMETER Experiment Name: Zm_Drought_P Parameter: Age (day) Value: 11
  misc_feature: MA Experiment 20000480 PARAMETER Experiment Name: Zm_Drought_P Parameter: Organism Value: Zea mays
  misc_feature: MA Experiment 20000480 PARAMETER Experiment Name: Zm_Drought_P Parameter: Plant Line Value: 35A19
  misc_feature: MA Experiment 20000480 PARAMETER Experiment Name: Zm_Drought_P Parameter: Timepoint (hr) Value: 72
  misc_feature: MA Experiment 20000480 PARAMETER Experiment Name: Zm_Drought_P Parameter: Tissue Value: Aerial
  misc_feature: MA Experiment 20000480 PARAMETER Experiment Name: Zm_Drought_P Parameter: Treatment Value: Drought vs. No Drought
agctcgggctgtggccatatcacgatggaatggaatgaacgagaacaaggaacgccgaaagaaaaagcgtgtccacatactcctccattcaccgcctctgccgctcacacgtctacacctgacgaagtgaacgcggcacacagatttggctttgctgaagaatccggctcctttcatttgttagaaggatcccagatctagatgcagcagcgcgatctgaaaccgtgttgtcggccagccaagctgcggagtacttagtatttgtttagtcaaatttgacggtggaaaccgaagctgccattgccagtaccgctgctgctagaggctatctgctgcctgccgactgccgggcctacctggtcaaacttcgcgagcagggggaagaagacgaagccgcgcccgtgcgccgagcctggggtgtggggtcgcgtcgcatcgcgtccgcccttcgccgcagccgtcggtccgggtccggccctccctagcgcggcgatggatacggaggcggtcccggcgctggcggtggtggacgcgcggttctgcgcggcgggcgcggccacgctggccgtggccaaggcgctgagcatgtccggcagcgacttcgccgtcacggacgcggccacgggcgcgcccgtgctgcgcgtcgacggcgtgctcttcagcctgcgccggcgctgcgtgctcgtcgacgccgaccgccgccccgtcctcaccgtccaagaatcggcgctgatgctgaacacgcggtggaaggtgttccggggcgacagcacccgccggcgggacctcatgttcagcgtcgtgaagccgtccgtgatccagctgcggggccccaccaaggtcagcgtcttcctcgccagcaacgacgccgagcaggcctgcgacttcaggatcaccggcagctaccacgacggcgcctgcgccgtctccctcggcgactccgacaccgtcatcgccaagatcgaccggcggttcagcgtggtcagcgcgctgctggggaagaactcgtacagcgtcaccgtcaacccggggatcgactacgccttcgtcgtcgcgctcgtcgtcatcctcgacgagatccattaccagcgatgacacgcacgcttcagttttggttccaagccgcgcgccttcccttctgctgttggctgttgcgtggaataaggctcgccccgttctcgaatgtttgtcgcgagagactacttaatttccatacgaggatcttaaccttcctaggcacttggcagttccatctggctgtgtactcgacacggacgttctctatttgttaaatacctatgctatttattgtacacttaaatattctacatattttacttttaattaatttattgtctaaagtataaaatct

SEQ ID NO: 16163 - protein, 200 aa, Zea mays subsp. mays
  peptide (1)..(200): Ceres Seq. ID no. 12377677
  misc_feature (11)..(192): Pfam Name: Protein of unknown function (DUF567) Pfam Description: Protein of unknown function (DUF567)
  misc_feature (9)..(193): Homolog of NCBI NO: 15217694 NR Description: unknown protein; protein id: At1g33840.1
  misc_feature (1)..(193): Homolog of NCBI NO: 9665105 NR Description: Hypothetical protein [Arabidopsis thaliana]
  misc_feature (11)..(196): Homolog of NCBI NO: 15225960 NR Description: unknown protein
  misc_feature (11)..(196): Homolog of NCBI NO: 17979321 NR Description: unknown protein [Arabidopsis thaliana]
  misc_feature (1)..(178): Homolog of NCBI NO: 28876019 NR Description: hypothetical protein [Oryza sativa (japonica
  misc_feature (1)..(197): Homolog of NCBI NO: 30679390 NR Description: expressed protein [Arabidopsis thaliana]
  misc_feature (1)..(200): Homolog of NCBI NO: 27818079 NR Description: OSJNBa0086N05.7 [Oryza sativa (japonica
  misc_feature (155)..(199): Homolog of NCBI NO: 28876016 NR Description: hypothetical protein [Oryza sativa (japonica
  misc_feature (1)..(78): Homolog of NCBI NO: 28876016 NR Description: hypothetical protein [Oryza sativa (japonica
  misc_feature (79)..(159): Homolog of NCBI NO: 28876016 NR Description: hypothetical protein [Oryza sativa (japonica
MDTEAVPALAVVDARFCAAGAATLAVAKALSMSGSDFAVTDAATGAPVLRVDGVLFSLRRRCVLVDADRRPVLTVQESALMLNTRWKVFRGDSTRRRDLMFSVVKPSVIQLRGPTKVSVFLASNDAEQACDFRITGSYHDGACAVSLGDSDTVIAKIDRRFSVVSALLGKNSYSVTVNPGIDYAFVVALVVILDEIHYQR

SEQ ID NO: 16164 - protein, 169 aa, Zea mays subsp. mays
  peptide (1)..(169): Ceres Seq. ID no. 12377678
  misc_feature (1)..(161): Pfam Name: Protein of unknown function (DUF567) Pfam Description: Protein of unknown function (DUF567)
  misc_feature (1)..(162): Homolog of NCBI NO: 15217694 NR Description: unknown protein; protein id: At1g33840.1
  misc_feature (1)..(162): Homolog of NCBI NO: 9665105 NR Description: Hypothetical protein [Arabidopsis thaliana]
  misc_feature (1)..(165): Homolog of NCBI NO: 15225960 NR Description: unknown protein
  misc_feature (1)..(165): Homolog of NCBI NO: 17979321 NR Description: unknown protein [Arabidopsis thaliana]
  misc_feature (1)..(147): Homolog of NCBI NO: 28876019 NR Description: hypothetical protein [Oryza sativa (japonica
  misc_feature (1)..(166): Homolog of NCBI NO: 30679390 NR Description: expressed protein [Arabidopsis thaliana]
  misc_feature (1)..(169): Homolog of NCBI NO: 27818079 NR Description: OSJNBa0086N05.7 [Oryza sativa (japonica
  misc_feature (124)..(168): Homolog of NCBI NO: 28876016 NR Description: hypothetical protein [Oryza sativa (japonica
  misc_feature (1)..(47): Homolog of NCBI NO: 28876016 NR Description: hypothetical protein [Oryza sativa (japonica
  misc_feature (48)..(128): Homolog of NCBI NO: 28876016 NR Description: hypothetical protein [Oryza sativa (japonica
MSGSDFAVTDAATGAPVLRVDGVLFSLRRRCVLVDADRRPVLTVQESALMLNTRWKVFRGDSTRRRDLMFSVVKPSVIQLRGPTKVSVFLASNDAEQACDFRITGSYHDGACAVSLGDSDTVIAKIDRRFSVVSALLGKNSYSVTVNPGIDYAFVVALVVILDEIHYQR

SEQ ID NO: 16165 - protein, 120 aa, Zea mays subsp. mays
  peptide (1)..(120): Ceres Seq. ID no. 12377679
  misc_feature (1)..(112): Pfam Name: Protein of unknown function (DUF567) Pfam Description: Protein of unknown function (DUF567)
  misc_feature (1)..(77): Homolog of NCBI NO: 21553506 NR Description: unknown [Arabidopsis thaliana]
  misc_feature (1)..(113): Homolog of NCBI NO: 15217694 NR Description: unknown protein; protein id: At1g33840.1
  misc_feature (1)..(113): Homolog of NCBI NO: 9665105 NR Description: Hypothetical protein [Arabidopsis thaliana]
  misc_feature (1)..(116): Homolog of NCBI NO: 15225960 NR Description: unknown protein
  misc_feature (1)..(116): Homolog of NCBI NO: 17979321 NR Description: unknown protein [Arabidopsis thaliana]
  misc_feature (1)..(98): Homolog of NCBI NO: 28876019 NR Description: hypothetical protein [Oryza sativa (japonica
  misc_feature (1)..(117): Homolog of NCBI NO: 30679390 NR Description: expressed protein [Arabidopsis thaliana]
  misc_feature (1)..(120): Homolog of NCBI NO: 27818079 NR Description: OSJNBa0086N05.7 [Oryza sativa (japonica
  misc_feature (75)..(119): Homolog of NCBI NO: 28876016 NR Description: hypothetical protein [Oryza sativa (japonica
  misc_feature (1)..(79): Homolog of NCBI NO: 28876016 NR Description: hypothetical protein [Oryza sativa (japonica
MLNTRWKVFRGDSTRRRDLMFSVVKPSVIQLRGPTKVSVFLASNDAEQACDFRITGSYHDGACAVSLGDSDTVIAKIDRRFSVVSALLGKNSYSVTVNPGIDYAFVVALVVILDEIHYQR

SEQ ID NO: 16166 - DNA, 1694 bp, Zea mays subsp. mays
  misc_feature (1)..(1694): Ceres Seq. ID no. 12366041
  misc_feature: MA Experiment ID: 108522 Result: Down-regulated in Transcription
  misc_feature: MA Experiment 108522 PARAMETER Experiment Name: Zm_42deg_Heat_P Parameter: Age (day) Value: 8
  misc_feature: MA Experiment 108522 PARAMETER Experiment Name: Zm_42deg_Heat_P Parameter: Organism Value: Zea mays
  misc_feature: MA Experiment 108522 PARAMETER Experiment Name: Zm_42deg_Heat_P Parameter: Plant Line Value: 35A19
  misc_feature: MA Experiment 108522 PARAMETER Experiment Name: Zm_42deg_Heat_P Parameter: Temperature (deg C) Value: 42 vs. 22
  misc_feature: MA Experiment 108522 PARAMETER Experiment Name: Zm_42deg_Heat_P Parameter: Timepoint (hr) Value: 1
  misc_feature: MA Experiment 108522 PARAMETER Experiment Name: Zm_42deg_Heat_P Parameter: Tissue Value: Aerial
  misc_feature: MA Experiment ID: 108556 Result: Down-regulated in Transcription
  misc_feature: MA Experiment 108556 PARAMETER Experiment Name: Zm_Drought_P Parameter: Age (day) Value: 9
  misc_feature: MA Experiment 108556 PARAMETER Experiment Name: Zm_Drought_P Parameter: Organism Value: Zea mays
  misc_feature: MA Experiment 108556 PARAMETER Experiment Name: Zm_Drought_P Parameter: Plant Line Value: 35A19
  misc_feature: MA Experiment 108556 PARAMETER Experiment Name: Zm_Drought_P Parameter: Timepoint (hr) Value: 24
  misc_feature: MA Experiment 108556 PARAMETER Experiment Name: Zm_Drought_P Parameter: Tissue Value: Aerial
  misc_feature: MA Experiment 108556 PARAMETER Experiment Name: Zm_Drought_P Parameter: Treatment Value: Drought vs. No Drought
  misc_feature: MA Experiment ID: 108559 Result: Down-regulated in Transcription
  misc_feature: MA Experiment 108559 PARAMETER Experiment Name: Zm_5mM_NO_P Parameter: Age (day) Value: 8
  misc_feature: MA Experiment 108559 PARAMETER Experiment Name: Zm_5mM_NO_P Parameter: Organism Value: Zea mays
  misc_feature: MA Experiment 108559 PARAMETER Experiment Name: Zm_5mM_NO_P Parameter: Plant Line Value: 35A19
  misc_feature: MA Experiment 108559 PARAMETER Experiment Name: Zm_5mM_NO_P Parameter: Timepoint (hr) Value: 12
  misc_feature: MA Experiment 108559 PARAMETER Experiment Name: Zm_5mM_NO_P Parameter: Tissue Value: Aerial
  misc_feature: MA Experiment 108559 PARAMETER Experiment Name: Zm_5mM_NO_P Parameter: Treatment Value: 5mM NO vs. No Treatment
  misc_feature: MA Experiment ID: 20000478 Result: Down-regulated in Transcription
  misc_feature: MA Experiment 20000478 PARAMETER Experiment Name: Zm_5mM_SA_P Parameter: Age (day) Value: 11
  misc_feature: MA Experiment 20000478 PARAMETER Experiment Name: Zm_5mM_SA_P Parameter: Organism Value: Zea mays
  misc_feature: MA Experiment 20000478 PARAMETER Experiment Name: Zm_5mM_SA_P Parameter: Plant Line Value: 35A19
  misc_feature: MA Experiment 20000478 PARAMETER Experiment Name: Zm_5mM_SA_P Parameter: Timepoint (hr) Value: 72
  misc_feature: MA Experiment 20000478 PARAMETER Experiment Name: Zm_5mM_SA_P Parameter: Tissue Value: Aerial
  misc_feature: MA Experiment 20000478 PARAMETER Experiment Name: Zm_5mM_SA_P Parameter: Treatment Value: 5mM SA vs. No Treatment
  misc_feature: MA Experiment ID: 20000479 Result: Down-regulated in Transcription
  misc_feature: MA Experiment 20000479 PARAMETER Experiment Name: Zm_Drought_P Parameter: Age (day) Value: 10
  misc_feature: MA Experiment 20000479 PARAMETER Experiment Name: Zm_Drought_P Parameter: Organism Value: Zea mays
  misc_feature: MA Experiment 20000479 PARAMETER Experiment Name: Zm_Drought_P Parameter: Plant Line Value: 35A19
  misc_feature: MA Experiment 20000479 PARAMETER Experiment Name: Zm_Drought_P Parameter: Timepoint (hr) Value: 48
  misc_feature: MA Experiment 20000479 PARAMETER Experiment Name: Zm_Drought_P Parameter: Tissue Value: Aerial
  misc_feature: MA Experiment 20000479 PARAMETER Experiment Name: Zm_Drought_P Parameter: Treatment Value: Drought vs. No Drought
  misc_feature: MA Experiment ID: 20000480 Result: Down-regulated in Transcription
  misc_feature: MA Experiment 20000480 PARAMETER Experiment Name: Zm_Drought_P Parameter: Age (day) Value: 11
  misc_feature: MA Experiment 20000480 PARAMETER Experiment Name: Zm_Drought_P Parameter: Organism Value: Zea mays
  misc_feature: MA Experiment 20000480 PARAMETER Experiment Name: Zm_Drought_P Parameter: Plant Line Value: 35A19
  misc_feature: MA Experiment 20000480 PARAMETER Experiment Name: Zm_Drought_P Parameter: Timepoint (hr) Value: 72
  misc_feature: MA Experiment 20000480 PARAMETER Experiment Name: Zm_Drought_P Parameter: Tissue Value: Aerial
  misc_feature: MA Experiment 20000480 PARAMETER Experiment Name: Zm_Drought_P Parameter: Treatment Value: Drought vs. No Drought
  misc_feature: MA Experiment ID: 20000488 Result: Down-regulated in Transcription
  misc_feature: MA Experiment 20000488 PARAMETER Experiment Name: Zm_50mM_NH4NO3_L_to_H_P Parameter: Organism Value: Zea mays
  misc_feature: MA Experiment 20000488 PARAMETER Experiment Name: Zm_50mM_NH4NO3_L_to_H_P Parameter: Timepoint (hr) Value: 8
  misc_feature: MA Experiment 20000488 PARAMETER Experiment Name: Zm_50mM_NH4NO3_L_to_H_P Parameter: Tissue Value: Leaves
  misc_feature: MA Experiment 20000488 PARAMETER Experiment Name: Zm_50mM_NH4NO3_L_to_H_P Parameter: Treatment Value: 50mM NH4NO3 vs. 100mM Mannitol
  misc_feature: MA Experiment ID: 20000492 Result: Up-regulated in Transcription
  misc_feature: MA Experiment 20000492 PARAMETER Experiment Name: Zm_Hybrid_Seed_Dev_P Parameter: DAP Value: 12
  misc_feature: MA Experiment 20000492 PARAMETER Experiment Name: Zm_Hybrid_Seed_Dev_P Parameter: Organism Value: Zea mays
  misc_feature: MA Experiment 20000492 PARAMETER Experiment Name: Zm_Hybrid_Seed_Dev_P Parameter: Plant Line Value: 35A19
  misc_feature: MA Experiment 20000492 PARAMETER Experiment Name: Zm_Hybrid_Seed_Dev_P Parameter: Tissue Value: Fert Kernel vs. Unfert Floret
  misc_feature: MA Experiment ID: 20000535 Result: Up-regulated in Transcription
  misc_feature: MA Experiment 20000535 PARAMETER Experiment Name: Zm_Hybrid_Seed_Dev_P Parameter: DAP Value: 30 vs. 12
  misc_feature: MA Experiment 20000535 PARAMETER Experiment Name: Zm_Hybrid_Seed_Dev_P Parameter: Organism Value: Zea mays
  misc_feature: MA Experiment 20000535 PARAMETER Experiment Name: Zm_Hybrid_Seed_Dev_P Parameter: Plant Line Value: 35A19
  misc_feature: MA Experiment 20000535 PARAMETER Experiment Name: Zm_Hybrid_Seed_Dev_P Parameter: Tissue Value: Embryo vs. Unfert Floret
acccggttgtcatcgtcagccgctcgctccctcggtcactcactcactcactcccctctagtacatcactcaccgcccgccaagcgcgaagctgtcactctgctgaccgcttgacagagcagagcacggcacctagccgccctctcaccgacccatggccatgggcggcgcgttccccttccagtggcccgagggccccgcggatcctgttctcgacgacgtgaccttgcctccgctgcccacggcggcgcccgacgccggggtcgccgcgtactacgcggacgcggcggacgtgcacgcgatgcacatggcgctgcccgatttcgcggcggcgctggctgcgatgcggcgggaggaggaggaggccgcgggcatccgcctggtgcacctcctcatgagctgcgccggcgccgtcgaggcggccgaccacgcgggcgcgtccgcgcacctggcggacgcgcacgccgcgctcgccgccgtctcgcccacatccggcatcggccgcgtgtgccgtgcacttcaccgccgcgctgtcccgccggctgttccctcccacgccttcgccttcgcctccgcccccggccccgcacgccgccgacgccgaccgagccttcctctaccaccgcttctacgaggcgggtccctacctcaagtttgcgcacttcacggccaaccaggccatcctggaggccgtccagggctgcaagcacgtgcacatcatcgacttcagcatcatgcagggcctccagtggccagcgctaatccaggccctcgcgctccggcccggcgggccgccgtcggtccgcctcacgggcattgggccgccgtccccgccagggcgcgacgacctccgcgacgtcggggtccgcctcgccgacctggcgcgctccgtgcgcgtccacttctccttccgcggcgtggccgccaaccgcctcgacgaggtgcggccctggatgctgcaggtctcgcagggcgaggccgtggccgtgaactccgtgctccagctgcaccgcctcctcgccgacgctccctcgtcgggcgacgcccgggcgcccatcgacgccgtgctggagtgcgtcgcgtccgtgcgccccagggtgttcacggtggtggagcaggaggcggaccacaacaagtcggggttcctggaccggttcacggaggcgctcttctactactcggcggtgttcgactccctggacgcggcgagcggcggcgcgggcgacgcggcggcggaggcctacctggagcgcgagatctgcgacatcgtgtgcggcgagggcgcggagcgcagggagcggcacgagccgctgtggcggtggcgggacaggctgggtcgcacggggctggccgccgtgccgctgggggccaacgcgctgcggcaggcgaggatgctggtggggctcttctccggggaaggacactgcgtggaggaggccgaggggtgcctgacactgggctgacacgggcgcccgctcttctcggcgtccgcgtggcgcgcggaagagaacaatcagagtgacagcaggagcaggagcagcggcagtgaggagagcaatatcagctgcagcagctagagcgtcgctactttactgtaaattccttcggtgagaggctagtagcggggtttactgtaaaatcgcggtgcccgcgatccaaatggttcgattgagagagcgttggcatcggtcgtc

SEQ ID NO: 16167 - protein, 455 aa, Zea mays subsp. mays
  peptide (1)..(455): Ceres Seq. ID no. 12366042
  misc_feature (55)..(138): Pfam Name: GRAS family transcription factor Pfam Description: GRAS family transcription factor
  misc_feature (177)..(429): Homolog of NCBI NO: 29830954 NR Description: putative GntR-family transcriptional regulator
  misc_feature (68)..(108): Homolog of NCBI NO: 6970472 NR Description: OsGAI [Oryza sativa (japonica cultivar-group)]
  misc_feature (7)..(138): Homolog of NCBI NO: 39841619 NR Description: GAI protein [Oryza sativa]
  misc_feature (7)..(138): Homolog of NCBI NO: 34911732 NR Description: putative OsGAI [Oryza sativa (japonica
MAMGGAFPFQWPEGPADPVLDDVTLPPLPTAAPDAGVAAYYADAADVHAMHMALPDFAAALAAMRREEEEAAGIRLVHLLMSCAGAVEAADHAGASAHLADAHAALAAVSPTSGIGRVCRALHRRAVPPAVPSHAFAFASAPGPARRRRRPSLPLPPLLRGGSLPQVCALHGQPGHPGGRPGLQARAHHRLQHHAGPPVASANPGPRAPARRAAVGPPHGHWAAVPARARRPPRRRGPPRRPGALRARPLLLPRRGRQPPRRGAALDAAGLAGRGRGRELRAPAAPPPRRRSLVGRRPGAHRRRAGVRRVRAPQGVHGGGAGGGPQQVGVPGPVHGGALLLLGGVRLPGRGERRRGRRGGGGLPGARDLRHRVRRGRGAQGAARAAVAVAGQAGSHGAGRRAAGGQRAAAGEDAGGALLRGRTLRGGGRGVPDTGLTRAPALLGVRVARGREQSE

SEQ ID NO: 16168 - protein, 453 aa, Zea mays subsp. mays
  peptide (1)..(453): Ceres Seq. ID no. 12366043
  misc_feature (53)..(136): Pfam Name: GRAS family transcription factor Pfam Description: GRAS family transcription factor
  misc_feature (175)..(427): Homolog of NCBI NO: 29830954 NR Description: putative GntR-family transcriptional regulator
  misc_feature (66)..(106): Homolog of NCBI NO: 6970472 NR Description: OsGAI [Oryza sativa (japonica cultivar-group)]
  misc_feature (5)..(136): Homolog of NCBI NO: 39841619 NR Description: GAI protein [Oryza sativa]
  misc_feature (5)..(136): Homolog of NCBI NO: 34911732 NR Description: putative OsGAI [Oryza sativa (japonica
MGGAFPFQWPEGPADPVLDDVTLPPLPTAAPDAGVAAYYADAADVHAMHMALPDFAAALAAMRREEEEAAGIRLVHLLMSCAGAVEAADHAGASAHLADAHAALAAVSPTSGIGRVCRALHRRAVPPAVPSHAFAFASAPGPARRRRRPSLPLPPLLRGGSLPQVCALHGQPGHPGGRPGLQARAHHRLQHHAGPPVASANPGPRAPARRAAVGPPHGHWAAVPARARRPPRRRGPPRRPGALRARPLLLPRRGRQPPRRGAALDAAGLAGRGRGRELRAPAAPPPRRRSLVGRRPGAHRRRAGVRRVRAPQGVHGGGAGGGPQQVGVPGPVHGGALLLLGGVRLPGRGERRRGRRGGGGLPGARDLRHRVRRGRGAQGAARAAVAVAGQAGSHGAGRRAAGGQRAAAGEDAGGALLRGRTLRGGGRGVPDTGLTRAPALLGVRVARGREQSE

SEQ ID NO: 16169 - protein, 406 aa, Zea mays subsp. mays
  peptide (1)..(406): Ceres Seq. ID no. 12366044
  misc_feature (6)..(89): Pfam Name: GRAS family transcription factor Pfam Description: GRAS family transcription factor
  misc_feature (128)..(380): Homolog of NCBI NO: 29830954 NR Description: putative GntR-family transcriptional regulator
  misc_feature (19)..(59): Homolog of NCBI NO: 6970472 NR Description: OsGAI [Oryza sativa (japonica cultivar-group)]
  misc_feature (1)..(89): Homolog of NCBI NO: 39841619 NR Description: GAI protein [Oryza sativa]
  misc_feature (1)..(89): Homolog of NCBI NO: 34911732 NR Description: putative OsGAI [Oryza sativa (japonica
MHMALPDFAAALAAMRREEEEAAGIRLVHLLMSCAGAVEAADHAGASAHLADAHAALAAVSPTSGIGRVCRALHRRAVPPAVPSHAFAFASAPGPARRRRRPSLPLPPLLRGGSLPQVCALHGQPGHPGGRPGLQARAHHRLQHHAGPPVASANPGPRAPARRAAVGPPHGHWAAVPARARRPPRRRGPPRRPGALRARPLLLPRRGRQPPRRGAALDAAGLAGRGRGRELRAPAAPPPRRRSLVGRRPGAHRRRAGVRRVRAPQGVHGGGAGGGPQQVGVPGPVHGGALLLLGGVRLPGRGERRRGRRGGGGLPGARDLRHRVRRGRGAQGAARAAVAVAGQAGSHGAGRRAAGGQRAAAGEDAGGALLRGRTLRGGGRGVPDTGLTRAPALLGVRVARGREQSE

SEQ ID NO: 16170 - DNA, 495 bp, Zea mays subsp. mays
  misc_feature (1)..(495): Ceres Seq. ID no. 13565414
  misc_feature: MA Experiment ID: 20000479 Result: Down-regulated in Transcription
  misc_feature: MA Experiment 20000479 PARAMETER Experiment Name: Zm_Drought_P Parameter: Age (day) Value: 10
  misc_feature: MA Experiment 20000479 PARAMETER Experiment Name: Zm_Drought_P Parameter: Organism Value: Zea mays
  misc_feature: MA Experiment 20000479 PARAMETER Experiment Name: Zm_Drought_P Parameter: Plant Line Value: 35A19
  misc_feature: MA Experiment 20000479 PARAMETER Experiment Name: Zm_Drought_P Parameter: Timepoint (hr) Value: 48
  misc_feature: MA Experiment 20000479 PARAMETER Experiment Name: Zm_Drought_P Parameter: Tissue Value: Aerial
  misc_feature: MA Experiment 20000479 PARAMETER Experiment Name: Zm_Drought_P Parameter: Treatment Value: Drought vs. No Drought
agcgcccgcaggccgcagctgcagtctgcagagcacagccgtgcgcggtttgcaaccgtaccagcacaagcaccccaggcgggcaggaaacaagcctcctccgctgctccgccgcaatggcgtccccgcgcggccatcgccgggccagcgtgctgcagaaggcggcggcgctcctcctgctcgccctgtcctgctgcggctgcaccggtgccggcgccggtccatcggcgccaaccccgaaggtgccggcggtgatcgtgttcggggactcgacggtggacacgggcaacaacaacgcgatcgggaccatcctgaagagcaacttcccgccgtacgggcgcgacatggccggcggggcccagcccacggggcggttctgcaacgggcgcctgccgccggacttcatctccgaggcgctcggcctgccgccgctggtcccggcctacctcgaccccgcctacggcatccaggacttcgcccgcggcgtctgcttcg

SEQ ID NO: 16171 - protein, 164 aa, Zea mays subsp. mays
  peptide (1)..(164): Ceres Seq. ID no. 13565415
  misc_feature (84)..(163): Pfam Name: GDSL-like Lipase/Acylhydrolase Pfam Description: GDSL-like Lipase/Acylhydrolase
  misc_feature (70)..(163): Homolog of NCBI NO: 15229719 NR Description: lipase, putative [Arabidopsis thaliana]
  misc_feature (57)..(163): Homolog of NCBI NO: 15217977 NR Description: lipase, putative [Arabidopsis thaliana]
  misc_feature (57)..(163): Homolog of NCBI NO: 18406327 NR Description: lipase, putative [Arabidopsis thaliana]
  misc_feature (43)..(163): Homolog of NCBI NO: 21536954 NR Description: GDSL-motif lipase/hydrolase-like protein
  misc_feature (43)..(163): Homolog of NCBI NO: 15237351 NR Description: GDSL-motif lipase/hydrolase protein [Arabidopsis
  misc_feature (80)..(163): Homolog of NCBI NO: 18416824 NR Description: GDSL-motif lipase/hydrolase protein [Arabidopsis
  misc_feature (80)..(163): Homolog of NCBI NO: 7485330 NR Description: hypothetical protein F10M23.130 - Arabidopsis
  misc_feature (80)..(163): Homolog of NCBI NO: 21593518 NR Description: putative GDSL-motif lipase/hydrolase [Arabidopsis
  misc_feature (80)..(163): Homolog of NCBI NO: 15228157 NR Description: GDSL-motif lipase/hydrolase protein [Arabidopsis
  misc_feature (80)..(163): Homolog of NCBI NO: 40641607 NR Description: putative GDSL-motif lipase [Triticum aestivum]
RPQAAAAVCRAQPCAVCNRTSTSTPGGQETSLLRCSAAMASPRGHRRASVLQKAAALLLLALSCCGCTGAGAGPSAPTPKVPAVIVFGDSTVDTGNNNAIGTILKSNFPPYGRDMAGGAQPTGRFCNGRLPPDFISEALGLPPLVPAYLDPAYGIQDFARGVCF

SEQ ID NO: 16172 - protein, 164 aa, Zea mays subsp. mays
  peptide (1)..(164): Ceres Seq. ID no. 13565416
APAGRSCSLQSTAVRGLQPYQHKHPRRAGNKPPPLLRRNGVPARPSPGQRAAEGGGAPPARPVLLRLHRCRRRSIGANPEGAGGDRVRGLDGGHGQQQRDRDHPEEQLPAVRARHGRRGPAHGAVLQRAPAAGLHLRGARPAAAGPGLPRPRLRHPGLRPRRLL

SEQ ID NO: 16173 - protein, 126 aa, Zea mays subsp. mays
  peptide (1)..(126): Ceres Seq. ID no. 13565417
  misc_feature (46)..(125): Pfam Name: GDSL-like Lipase/Acylhydrolase Pfam Description: GDSL-like Lipase/Acylhydrolase
  misc_feature (19)..(125): Homolog of NCBI NO: 15217977 NR Description: lipase, putative [Arabidopsis thaliana]
  misc_feature (19)..(125): Homolog of NCBI NO: 18406327 NR Description: lipase, putative [Arabidopsis thaliana]
  misc_feature (5)..(125): Homolog of NCBI NO: 21536954 NR Description: GDSL-motif lipase/hydrolase-like protein
  misc_feature (5)..(125): Homolog of NCBI NO: 15237351 NR Description: GDSL-motif lipase/hydrolase protein [Arabidopsis
  misc_feature (42)..(125): Homolog of NCBI NO: 18416824 NR Description: GDSL-motif lipase/hydrolase protein [Arabidopsis
  misc_feature (32)..(125): Homolog of NCBI NO: 15229719 NR Description: lipase, putative [Arabidopsis thaliana]
  misc_feature (42)..(125): Homolog of NCBI NO: 7485330 NR Description: hypothetical protein F10M23.130 - Arabidopsis
  misc_feature (42)..(125): Homolog of NCBI NO: 21593518 NR Description: putative GDSL-motif lipase/hydrolase [Arabidopsis
  misc_feature (42)..(125): Homolog of NCBI NO: 15228157 NR Description: GDSL-motif lipase/hydrolase protein [Arabidopsis
  misc_feature (42)..(125): Homolog of NCBI NO: 40641607 NR Description: putative GDSL-motif lipase [Triticum aestivum]
MASPRGHRRASVLQKAAALLLLALSCCGCTGAGAGPSAPTPKVPAVIVFGDSTVDTGNNNAIGTILKSNFPPYGRDMAGGAQPTGRFCNGRLPPDFISEALGLPPLVPAYLDPAYGIQDFARGVCF

SEQ ID NO: 16174 - DNA, 1740 bp, Zea mays subsp. mays
  misc_feature (1)..(1740): Ceres Seq. ID no. 12566955
  misc_feature: MA Experiment ID: 108559 Result: Up-regulated in Transcription
  misc_feature: MA Experiment 108559 PARAMETER Experiment Name: Zm_5mM_NO_P Parameter: Age (day) Value: 8
  misc_feature: MA Experiment 108559 PARAMETER Experiment Name: Zm_5mM_NO_P Parameter: Organism Value: Zea mays
  misc_feature: MA Experiment 108559 PARAMETER Experiment Name: Zm_5mM_NO_P Parameter: Plant Line Value: 35A19
  misc_feature: MA Experiment 108559 PARAMETER Experiment Name: Zm_5mM_NO_P Parameter: Timepoint (hr) Value: 12
  misc_feature: MA Experiment 108559 PARAMETER Experiment Name: Zm_5mM_NO_P Parameter: Tissue Value: Aerial
  misc_feature: MA Experiment 108559 PARAMETER Experiment Name: Zm_5mM_NO_P Parameter: Treatment Value: 5mM NO vs. No Treatment
gcacgagaccattacctagaacatcctaatcaaaagtttatattcttgtgaggaagaaacattcccatccccgtcattgaggaattcggaatcggggatcgagtacatctccacttcttcccaggcggccaggccctggcccgcggccgcaccgcaccgtagtttgttccttccgccaggaagcgagagaaaatcgagtgaaaaggaaggggaaataaggctgaatcacagtttctggatcggaggagcatccccgcctaggtctctgcagccatggttcgcggatcgctcggcaagcttgcatcgcgcgccctctccgtcgccgggagatggcagcaccagcagctccgccgcctcaacatccacgagtaccagggcgcggagttgatgggtaaatacgggatcaacgtgcccaggggcgcggcggctgggtccgtacacgaggtcaaggacgccttgaagaacatgttccccagcgagaaagagatagttgttaaaagtcaaatccttgctggtggccgagggctgggaactttcaaaagcggactgcaaggtggtgtccatattgttaaggctgaggaagctgaattgattgcaagtaaaatgttaggccagattctgataacgaaacaaactggtccagagggaaagattgtgagcaaggtctacttgtgtgagaaactatctcttactaatgagatgtactttgccatcacccttgataggaaaactgctggtccgctcattattgcttgcagcaagggaggaaccagtattgaagatcttgcggagaagtatcctgatatgattattaaggttcctattgatgtatttaaaggaatcacagatgaggatgcagctaaagttgttgatggtctagctctaaaggcagcggataggcagtcttctatagaacagattaagaagctgtatgaacttttctgcaagtgtgattgcacattgctggagataaatcctctggcggagacagctgacaacaagcttgttgctgctgatgcaaaattgaactttgatgataatgctgcatttagacagaaagaaatatttgcactgcgtgatacaactcaggaagaccccagggaggtcgctgctgccaaagcagatttgaactatattggtcttgatggagagattggttgcatggtgaatggagcaggattggccatggcgaccatggatattataaagttgcatggtggtacgcccgccaattttcttgatgtcggtggaagtgcatcagaggggcaggttgtggaagcttttaagatactgacttcagatgatagagtgaaggcaattctagtgaacatttttggtggcattatgaaatgtgatgtgatagcaagtggaattgttaatgctgccaaacaggttgacctgaaagttcctgttgttgttcggttggaaggcaccaatgtagaccaaggaaagaggattcttaaggaaagtggaatgactttgatcactgcagaagatcttgatgatgcggcagagaaagctgtaaaagcatccgtcaaataactagtgtatcaatctgaagtttttttttcactggtacaagatgagcagtgctcttttacggatttcgatttggagcagaagtcgtgaactgcaacatttttgaagtggggttattttggccttgttttgctgttaaatgttgccagtgccgaaattgtggtctcgttttaataaacaaatctatcggtcccattggtc

SEQ ID NO: 16175 - protein, 422 aa, Zea mays subsp. mays
  peptide (1)..(422): Ceres Seq. ID no. 12566956
  misc_feature (71)..(233): Pfam Name: ATP-grasp domain Pfam Description: ATP-grasp domain
  misc_feature (1)..(420): Homolog of NCBI NO: 20876884 NR Description: succinate-Coenzyme A ligase, ADP-forming, beta
  misc_feature (1)..(420): Homolog of NCBI NO: 7023369 NR Description: unnamed protein product [Homo sapiens]
  misc_feature (1)..(420): Homolog of NCBI NO: 34364605 NR Description: hypothetical protein [Homo sapiens]
  misc_feature (1)..(420): Homolog of NCBI NO: 21263997 NR Description: Succinyl-CoA ligase
  misc_feature (1)..(420): Homolog of NCBI NO: 11321583 NR Description: succinate-CoA ligase, ADP-forming, beta subunit
  misc_feature (24)..(422): Homolog of NCBI NO: 28828953 NR Description: similar to Mus musculus (Mouse). 16 days embryo cDNA, RIKEN full-length enriched library, clone:C130090E04
  misc_feature (24)..(422): Homolog of NCBI NO: 28829983 NR Description: similar to Sus scrofa (Pig). Succinyl-CoA ligase
  misc_feature (6)..(419): Homolog of NCBI NO: 27803873 NR Description: succinyl CoA ligase beta subunit [Lycopersicon
  misc_feature (2)..(419): Homolog of NCBI NO: 21593189 NR Description: succinyl-CoA ligase beta subunit [Arabidopsis
  misc_feature (2)..(419): Homolog of NCBI NO: 15225353 NR Description: succinyl-CoA ligase beta subunit
MVRGSLGKLASRALSVAGRWQHQQLRRLNIHEYQGAELMGKYGINVPRGAAAGSVHEVKDALKNMFPSEKEIVVKSQILAGGRGLGTFKSGLQGGVHIVKAEEAELIASKMLGQILITKQTGPEGKIVSKVYLCEKLSLTNEMYFAITLDRKTAGPLIIACSKGGTSIEDLAEKYPDMIIKVPIDVFKGITDEDAAKVVDGLALKAADRQSSIEQIKKLYELFCKCDCTLLEINPLAETADNKLVAADAKLNFDDNAAFRQKEIFALRDTTQEDPREVAAAKADLNYIGLDGEIGCMVNGAGLAMATMDIIKLHGGTPANFLDVGGSASEGQVVEAFKILTSDDRVKAILVNIFGGIMKCDVIASGIVNAAKQVDLKVPVVVRLEGTNVDQGKRILKESGMTLITAEDLDDAAEKAVKASVK

SEQ ID NO: 16176 - protein, 384 aa, Zea mays subsp. mays
  peptide (1)..(384): Ceres Seq. ID no. 12566957
  misc_feature (33)..(195): Pfam Name: ATP-grasp domain Pfam Description: ATP-grasp domain
  misc_feature (1)..(382): Homolog of NCBI NO: 20876884 NR Description: succinate-Coenzyme A ligase, ADP-forming, beta
  misc_feature (1)..(382): Homolog of NCBI NO: 7023369 NR Description: unnamed protein product [Homo sapiens]
  misc_feature (1)..(382): Homolog of NCBI NO: 34364605 NR Description: hypothetical protein [Homo sapiens]
  misc_feature (1)..(382): Homolog of NCBI NO: 21263997 NR Description: Succinyl-CoA ligase
  misc_feature (1)..(382): Homolog of NCBI NO: 11321583 NR Description: succinate-CoA ligase, ADP-forming, beta subunit
  misc_feature (1)..(384): Homolog of NCBI NO: 28828953 NR Description: similar to Mus musculus (Mouse). 16 days embryo cDNA, RIKEN full-length enriched library, clone:C130090E04
  misc_feature (1)..(384): Homolog of NCBI NO: 28829983 NR Description: similar to Sus scrofa (Pig). Succinyl-CoA ligase
  misc_feature (1)..(381): Homolog of NCBI NO: 27803873 NR Description: succinyl CoA ligase beta subunit [Lycopersicon
  misc_feature (1)..(381): Homolog of NCBI NO: 21593189 NR Description: succinyl-CoA ligase beta subunit [Arabidopsis
  misc_feature (1)..(381): Homolog of NCBI NO: 15225353 NR Description: succinyl-CoA ligase beta subunit
MGKYGINVPRGAAAGSVHEVKDALKNMFPSEKEIVVKSQILAGGRGLGTFKSGLQGGVHIVKAEEAELIASKMLGQILITKQTGPEGKIVSKVYLCEKLSLTNEMYFAITLDRKTAGPLIIACSKGGTSIEDLAEKYPDMIIKVPIDVFKGITDEDAAKVVDGLALKAADRQSSIEQIKKLYELFCKCDCTLLEINPLAETADNKLVAADAKLNFDDNAAFRQKEIFALRDTTQEDPREVAAAKADLNYIGLDGEIGCMVNGAGLAMATMDIIKLHGGTPANFLDVGGSASEGQVVEAFKILTSDDRVKAILVNIFGGIMKCDVIASGIVNAAKQVDLKVPVVVRLEGTNVDQGKRILKESGMTLITAEDLDDAAEKAVKASVK

SEQ ID NO: 16177 - protein, 358 aa, Zea mays subsp. mays
  peptide (1)..(358): Ceres Seq. ID no. 12566958
  misc_feature (7)..(169): Pfam Name: ATP-grasp domain Pfam Description: ATP-grasp domain
  misc_feature (1)..(356): Homolog of NCBI NO: 20876884 NR Description: succinate-Coenzyme A ligase, ADP-forming, beta
  misc_feature (1)..(356): Homolog of NCBI NO: 7023369 NR Description: unnamed protein product [Homo sapiens]
  misc_feature (1)..(356): Homolog of NCBI NO: 34364605 NR Description: hypothetical protein [Homo sapiens]
  misc_feature (1)..(356): Homolog of NCBI NO: 21263997 NR Description: Succinyl-CoA ligase
  misc_feature (1)..(356): Homolog of NCBI NO: 11321583 NR Description: succinate-CoA ligase, ADP-forming, beta subunit
  misc_feature (1)..(358): Homolog of NCBI NO: 28828953 NR Description: similar to Mus musculus (Mouse). 16 days embryo cDNA, RIKEN full-length enriched library, clone:C130090E04
  misc_feature (1)..(358): Homolog of NCBI NO: 28829983 NR Description: similar to Sus scrofa (Pig). Succinyl-CoA ligase
  misc_feature (1)..(355): Homolog of NCBI NO: 27803873 NR Description: succinyl CoA ligase beta subunit [Lycopersicon
  misc_feature (1)..(355): Homolog of NCBI NO: 21593189 NR Description: succinyl-CoA ligase beta subunit [Arabidopsis
  misc_feature (1)..(355): Homolog of NCBI NO: 15225353 NR Description: succinyl-CoA ligase beta subunit
MFPSEKEIVVKSQILAGGRGLGTFKSGLQGGVHIVKAEEAELIASKMLGQILITKQTGPEGKIVSKVYLCEKLSLTNEMYFAITLDRKTAGPLIIACSKGGTSIEDLAEKYPDMIIKVPIDVFKGITDEDAAKVVDGLALKAADRQSSIEQIKKLYELFCKCDCTLLEINPLAETADNKLVAADAKLNFDDNAAFRQKEIFALRDTTQEDPREVAAAKADLNYIGLDGEIGCMVNGAGLAMATMDIIKLHGGTPANFLDVGGSASEGQVVEAFKILTSDDRVKAILVNIFGGIMKCDVIASGIVNAAKQVDLKVPVVVRLEGTNVDQGKRILKESGMTLITAEDLDDAAEKAVKASVK

SEQ ID NO: 16178 - DNA, 1405 bp, Zea mays subsp. mays
  misc_feature (1)..(1405): Ceres Seq. ID no. 13577701
  misc_feature: MA Experiment ID: 108523 Result: Up-regulated in Transcription
  misc_feature: MA Experiment 108523 PARAMETER Experiment Name: Zm_42deg_Heat_P Parameter: Age (day) Value: 8
  misc_feature: MA Experiment 108523 PARAMETER Experiment Name: Zm_42deg_Heat_P Parameter: Organism Value: Zea mays
  misc_feature: MA Experiment 108523 PARAMETER Experiment Name: Zm_42deg_Heat_P Parameter: Plant Line Value: 35A19
  misc_feature: MA Experiment 108523 PARAMETER Experiment Name: Zm_42deg_Heat_P Parameter: Temperature (deg C) Value: 42 vs. 22
  misc_feature: MA Experiment 108523 PARAMETER Experiment Name: Zm_42deg_Heat_P Parameter: Timepoint (hr) Value: 6
  misc_feature: MA Experiment 108523 PARAMETER Experiment Name: Zm_42deg_Heat_P Parameter: Tissue Value: Aerial
  misc_feature: MA Experiment ID: 108543 Result: Down-regulated in Transcription
gcacgagaccattacctagaacatcctaatcgaaaaacccctaggaaacgacgaccgcaactacataccagccagccgacccgacccccagcagtcttgcaggctacagcccctgcggcaccagagggagcggccgcggcagggcgtcctcgtcgccgcggcagggcgctagggcaggcaggcatgcgctgatggaattcacggcccaggagggggaggagcccgtctcggaggagatgggcgcgagctccgcgccgccgccctgcctcggccccggccgcggcacggggaaccagaaccacgccgccgaggcgacgtaccacgagtgtctgcgcaaccacgcggcggcgctgggcggacacgtcgtcgatggctgcggcgagttcatgcccgaggacgccgacaggctcaagtgcgcagcctgcggctgccaccgcagcttccaccgcaagggcgacgcggggcgccgccaccagctcctgctgccgccgcccgccgcggcggtcccgcgcgtcccgctgctcctgcctccgccccacccctacgcggccggctgctgcccacccccactacgcgtcgccgccgctgttcccgtaccacggcacgcccagcggcaccacgaccgagtcgtccagcgaggagcgtggcccgccgtccgggttcgccgccgcgccgcacgcgcacgcgcagggccacgtccggcggaagcggatccggaccaagttcacgccggagcagaaggagcagatgctggcgttcgcggaacgcctcggctggcggatgcagaagcaggacgacgcgctggtgcagcacttctgcgaccaggtcggcgtccggcggcaggtcttcaaggtctggatgcacaacaacaagcacatcggcagcggcggcaggaggcagccgccgccgcacctgccgcctcccgaggggcagcaacagccccagcagccccagtagccacggtgggagacaaggctcagcagtcagcagcaccaccaccaccaccaccatttgcttaatcccccgcctcatttttttatgggctccgagagggggtgtgggattaaacaagggaagtcaggaggggttcctatcctttcttcccttccgtttttgggttcaccttatccttgattttttgtagtcacttcacgtcttcaccatcctcttttgcttcacgattcttgcttgcatatctttggttttattctgttcttactagcttgggggatcaattggaaggaggaggaggcactgtgcatgttttgtagctacaatcctgctaccttattgccatttagcccccttcggcgagcaaggttaaccaatctaaattccgatctatatttccatcttcacttaatctgttaatcaatagcgaatatagccggtggtctctcctccg

SEQ ID NO: 16179 - protein, 275 aa, Zea mays subsp. mays
  peptide (1)..(275): Ceres Seq. ID no. 13577702
  misc_feature (38)..(89): Pfam Name: ZF-HD protein dimerisation region Pfam Description: ZF-HD protein dimerisation region
  misc_feature (18)..(138): Homolog of NCBI NO: 5091602 NR Description: 10A19I.6 [Oryza sativa]
  misc_feature (1)..(137): Homolog of NCBI NO: 15228530 NR Description: expressed protein [Arabidopsis thaliana]
  misc_feature (35)..(132): Homolog of NCBI NO: 13277220 NR Description: ZF-HD homeobox protein [Flaveria bidentis]
  misc_feature (1)..(87): Homolog of NCBI NO: 18398714 NR Description: expressed protein [Arabidopsis thaliana]
  misc_feature (41)..(100): Homolog of NCBI NO: 15230335 NR Description: expressed protein [Arabidopsis thaliana]
  misc_feature (43)..(99): Homolog of NCBI NO: 20148768 NR Description: hypothetical protein At2g02540/T822.16
  misc_feature (43)..(99): Homolog of NCBI NO: 15226993 NR Description: expressed protein [Arabidopsis thaliana]
  misc_feature (43)..(112): Homolog of NCBI NO: 15223757 NR Description: expressed protein [Arabidopsis thaliana]
  misc_feature (38)..(87): Homolog of NCBI NO: 18410804 NR Description: expressed protein [Arabidopsis thaliana]
  misc_feature (43)..(160): Homolog of NCBI NO: 15238445 NR Description: expressed protein [Arabidopsis thaliana]
MEFTAQEGEEPVSEEMGASSAPPPCLGPGRGTGNQNHAAEATYHECLRNHAAALGGHVVDGCGEFMPEDADRLKCAACGCHRSFHRKGDAGRRHQLLLPPPAAAVPRVPLLLPPPHPYAAGCCPPPLRVAAAVPVPRHAQRHHDRVVQRGAWPAVRVRRRAARARAGPRPAEADPDQVHAGAEGADAGVRGTPRLADAEAGRRAGAALLRPGRRPAAGLQGLDAQQQAHRQRRQEAAAAAPAASRGAATAPAAPVATVGDKAQQSAAPPPPPPFA

SEQ ID NO: 16180 - protein, 260 aa, Zea mays subsp. mays
  peptide (1)..(260): Ceres Seq. ID no. 13577703
  misc_feature (23)..(74): Pfam Name: ZF-HD protein dimerisation region Pfam Description: ZF-HD protein dimerisation region
  misc_feature (3)..(123): Homolog of NCBI NO: 5091602 NR Description: 10A19I.6 [Oryza sativa]
  misc_feature (1)..(122): Homolog of NCBI NO: 15228530 NR Description: expressed protein [Arabidopsis thaliana]
  misc_feature (20)..(117): Homolog of NCBI NO: 13277220 NR Description: ZF-HD homeobox protein [Flaveria bidentis]
  misc_feature (1)..(72): Homolog of NCBI NO: 18398714 NR Description: expressed protein [Arabidopsis thaliana]
  misc_feature (26)..(85): Homolog of NCBI NO: 15230335 NR Description: expressed protein [Arabidopsis thaliana]
  misc_feature (28)..(84): Homolog of NCBI NO: 20148768 NR Description: hypothetical protein At2g02540/T822.16
  misc_feature (28)..(84): Homolog of NCBI NO: 15226993 NR Description: expressed protein [Arabidopsis thaliana]
  misc_feature (28)..(97): Homolog of NCBI NO: 15223757 NR Description: expressed protein [Arabidopsis thaliana]
  misc_feature (23)..(72): Homolog of NCBI NO: 18410804 NR Description: expressed protein [Arabidopsis thaliana]
  misc_feature (28)..(145): Homolog of NCBI NO: 15238445 NR Description: expressed protein [Arabidopsis thaliana]
MGASSAPPPCLGPGRGTGNQNHAAEATYHECLRNHAAALGGHVVDGCGEFMPEDADRLKCAACGCHRSFHRKGDAGRRHQLLLPPPAAAVPRVPLLLPPPHPYAAGCCPPPLRVAAAVPVPRHAQRHHDRVVQRGAWPAVRVRRRAARARAGPRPAEADPDQVHAGAEGADAGVRGTPRLADAEAGRRAGAALLRPGRRPAAGLQGLDAQQQAHRQRRQEAAAAAPAASRGAATAPAAPVATVGDKAQQSAAPPPPPPFA

SEQ ID NO: 16181 - protein, 210 aa, Zea mays subsp. mays
  peptide (1)..(210): Ceres Seq. ID no. 13577704
  misc_feature (97)..(208): Pfam Name: MARCKS family Pfam Description: MARCKS family
  misc_feature (1)..(73): Homolog of NCBI NO: 5091602 NR Description: 10A19I.6 [Oryza sativa]
  misc_feature (1)..(72): Homolog of NCBI NO: 15228530 NR Description: expressed protein [Arabidopsis thaliana]
  misc_feature (1)..(67): Homolog of NCBI NO: 13277220 NR Description: ZF-HD homeobox protein [Flaveria bidentis]
  misc_feature (1)..(22): Homolog of NCBI NO: 18398714 NR Description: expressed protein [Arabidopsis thaliana]
  misc_feature (1)..(35): Homolog of NCBI NO: 15230335 NR Description: expressed protein [Arabidopsis thaliana]
  misc_feature (1)..(34): Homolog of NCBI NO: 20148768 NR Description: hypothetical protein At2g02540/T822.16
  misc_feature (1)..(34): Homolog of NCBI NO: 15226993 NR Description: expressed protein [Arabidopsis thaliana]
  misc_feature (1)..(47): Homolog of NCBI NO: 15223757 NR Description: expressed protein [Arabidopsis thaliana]
  misc_feature (1)..(22): Homolog of NCBI NO: 18410804 NR Description: expressed protein [Arabidopsis thaliana]
  misc_feature (1)..(95): Homolog of NCBI NO: 15238445 NR Description: expressed protein [Arabidopsis thaliana]
MPEDADRLKCAACGCHRSFHRKGDAGRRHQLLLPPPAAAVPRVPLLLPPPHPYAAGCCPPPLRVAAAVPVPRHAQRHHDRVVQRGAWPAVRVRRRAARARAGPRPAEADPDQVHAGAEGADAGVRGTPRLADAEAGRRAGAALLRPGRRPAAGLQGLDAQQQAHRQRRQEAAAAAPAASRGAATAPAAPVATVGDKAQQSAAPPPPPPFA

SEQ ID NO: 16182 - protein, 195 aa, Zea mays subsp. mays
  peptide (1)..(195): Ceres Seq. ID no. 13577705
  misc_feature (56)..(169): Homolog of NCBI NO: 15228530 NR Description: expressed protein [Arabidopsis thaliana]
  misc_feature (57)..(182): Homolog of NCBI NO: 13277220 NR Description: ZF-HD homeobox protein [Flaveria bidentis]
  misc_feature (60)..(168): Homolog of NCBI NO: 18398714 NR Description: expressed protein [Arabidopsis thaliana]
  misc_feature (111)..(168): Homolog of NCBI NO: 15230335 NR Description: expressed protein [Arabidopsis thaliana]
  misc_feature (73)..(168): Homolog of NCBI NO: 20148768 NR Description: hypothetical protein At2g02540/T822.16
  misc_feature (73)..(168): Homolog of NCBI NO: 15226993 NR Description: expressed protein [Arabidopsis thaliana]
  misc_feature (63)..(168): Homolog of NCBI NO: 15223757 NR Description: expressed protein [Arabidopsis thaliana]
  misc_feature (40)..(180): Homolog of NCBI NO: 18410804 NR Description: expressed protein [Arabidopsis thaliana]
  misc_feature (50)..(193): Homolog of NCBI NO: 5091602 NR Description: 10A19I.6 [Oryza sativa]
  misc_feature (104)..(195): Homolog of NCBI NO: 15238445 NR Description: expressed protein [Arabidopsis thaliana]
MAAASSCPRTPTGSSAQPAAATAASTARATRGAATSSCCRRPPRRSRASRCSCLRPTPTRPAAAHPHYASPPLFPYHGTPSGTTTESSSEERGPPSGFAAAPHAHAQGHVRRKRIRTKFTPEQKEQMLAFAERLGWRMQKQDDALVQHFCDQVGVRRQVFKVWMHNNKHIGSGGRRQPPPHLPPPEGQQQPQQPQ

SEQ ID NO: 16183 - DNA, 1801 bp, Zea mays subsp. mays
  misc_feature (1)..(1801): Ceres Seq. ID no. 12358426
  misc_feature: MA Experiment ID: 108687 Result: Down-regulated in Transcription
  misc_feature: MA Experiment 108687 PARAMETER Experiment Name: Zm_Embryos-Flowers__P Parameter: Tissue Value: Embryo vs. Aerial+
aggagaaaggttgccatctcgtgtgtgtgtgtctgttggatggatctctgtgagccatgccctctttgtcttcttgcttttgctttcttggtcccttcccttctcttttctagcagagctctcgtggttcttggccttccgtgtgtctgccaggtagaaattttaaccgaaaaaaagattcttccgagcaaaggagcgctgccagctttcacataaacaagttggggaagcagttgaggttttctaattcttcttggaaggattgagatctccagttctgataatgggttcttttgggatgaactggaatcagaaggaccccatggtgtgggattgggaacatctagtaccgtctgtctcaaatgcagttacaaggcacggatctgctaattcatctggtggtactcttacttctaactcagagctagggcatggttcatccaagagctctatttcagcgtccattgattcaccctctggagtagggaacagcttagagttcaacttcgccgctgttgagaggcatgttaagaacacgggcacgaacggcagagtcgatgactcggggaattctccatcgtcaatgatagctttcaaccaaggagagccattaatcagcctgaaacttgggaagagggcttacttcgaaaacgcctgcggaggacaggatgccaaggtttctgcagcttcagacgttacttctgcagccagcgtggtcaagaagactaaggtgtctcagcagaatgcaaagaactggtactgtcaggttgaagggtgcaaagttgacctgtcttctgctaaagattacaatcgcaagcacaaggtctgtgtagtccattctaaagctaccaaggtggttgttgctggtctagagcgtcggttttgtcaacagtgtagccgttttcatggtttagcggagtttgatcagaacaaacgaagctgtcgtaggcgtctgatgcatcataatgcacggaggaggaaacctcaggcagacacaatttcattcaattcatcgacaatgttttatgatacaaggcagcggacaaatcttttctttagtcaaccactttatggccaagtgaggagcaatgcagggtcttcatgggataacttgggaggcttaaaattcatggagacgaaacatccgccagtgcatccaacaaaaacagcatcccctgatgaactgcatttctcagccctccagataactagtgctgcggctcacaccggacatcatcatgatctcgatgggttcatggcgttcaagggaaccagcacaaaggtccttaaccaaggcgtggaggcttgggcggccgcttccagctcgaacaacggaggcccagaaggtgggcgtgctctctctcttctgtcagacggctcgtggggctcgagttcagccgtcatccagcagcccacatctcacgcggacgccggtgcattgctgccgcccctcgccaccgttgccgtctccaacgccgccgccgccgccgggcatcctctggacccgtccccgggaaggttctggccgcaagacgatcatcccccgctcgtcgacggacccgccacgcagattccggagctggcgcacctccggatatggtgaaaggaaacgcatgtgatgcggtgactggtgacatgccagttcgagggcctggctgggaacacatctggttggttagcctgccgctctggcttgaatttgccggcgacgacagtctttgtttgtatcttttgatcagaacggacacagacatgtttgcacaatataatgtgacgagtccctctttggggttgaggagtt

SEQ ID NO: 16184 - protein, 439 aa, Zea mays subsp. mays
  peptide (1)..(439): Ceres Seq. ID no. 12358427
  misc_feature (160)..(235): Pfam Name: SBP domain Pfam Description: SBP domain
  misc_feature (13)..(385): Homolog of NCBI NO: 25456646 NR Description: squamosa promoter binding protein 2
  misc_feature (94)..(315): Homolog of NCBI NO: 15230904 NR Description: squamosa promoter-binding protein homolog
  misc_feature (160)..(419): Homolog of NCBI NO: 25352582 NR Description: squamosa promoter binding protein-homolog 5
  misc_feature (110)..(332): Homolog of NCBI NO: 25352584 NR Description: squamosa promoter binding protein-homolog 4
  misc_feature (1)..(366): Homolog of NCBI NO: 25403307 NR Description: protein F17L21.14 [imported] - Arabidopsis
  misc_feature (1)..(366): Homolog of NCBI NO: 18396302 NR Description: putative squamosa-promoter binding protein 2
  misc_feature (1)..(377): Homolog of NCBI NO: 18650611 NR Description: At1g27370/F17L21_16 [Arabidopsis thaliana]
  misc_feature (1)..(377): Homolog of NCBI NO: 22329813 NR Description: putative squamosa-promoter binding protein 2
  misc_feature (1)..(377): Homolog of NCBI NO: 9802546 NR Description: F17L21.15 [Arabidopsis thaliana]
  misc_feature (13)..(379): Homolog of NCBI NO: 15239820 NR Description: squamosa promoter binding protein-like 2
MGSFGMNWNQKDPMVWDWEHLVPSVSNAVTRHGSANSSGGTLTSNSELGHGSSKSSISASIDSPSGVGNSLEFNFAAVERHVKNTGTNGRVDDSGNSPSSMIAFNQGEPLISLKLGKRAYFENACGGQDAKVSAASDVTSAASVVKKTKVSQQNAKNWYCQVEGCKVDLSSAKDYNRKHKVCVVHSKATKVVVAGLERRFCQQCSRFHGLAEFDQNKRSCRRRLMHHNARRRKPQADTISFNSSTMFYDTRQRTNLFFSQPLYGQVRSNAGSSWDNLGGLKFMETKHPPVHPTKTASPDELHFSALQITSAAAHTGHHHDLDGFMAFKGTSTKVLNQGVEAWAAASSSNNGGPEGGRALSLLSDGSWGSSSAVIQQPTSHADAGALLPPLATVAVSNAAAAAGHPLDPSPGRFWPQDDHPPLVDGPATQIPELAHLRIW

SEQ ID NO: 16185 - protein, 434 aa, Zea mays subsp. mays
  peptide (1)..(434): Ceres Seq. ID no. 12358428
  misc_feature (155)..(230): Pfam Name: SBP domain Pfam Description: SBP domain
  misc_feature (89)..(310): Homolog of NCBI NO: 15230904 NR Description: squamosa promoter-binding protein homolog
  misc_feature (155)..(414): Homolog of NCBI NO: 25352582 NR Description: squamosa promoter binding protein-homolog 5
  misc_feature (105)..(327): Homolog of NCBI NO: 25352584 NR Description: squamosa promoter binding protein-homolog 4
  misc_feature (1)..(361): Homolog of NCBI NO: 25403307 NR Description: protein F17L21.14 [imported] - Arabidopsis
  misc_feature (1)..(361): Homolog of NCBI NO: 18396302 NR Description: putative squamosa-promoter binding protein 2
  misc_feature (1)..(372): Homolog of NCBI NO: 18650611 NR Description: At1g27370/F17L21_16 [Arabidopsis thaliana]
  misc_feature (1)..(372): Homolog of NCBI NO: 22329813 NR Description: putative squamosa-promoter binding protein 2
  misc_feature (1)..(372): Homolog of NCBI NO: 9802546 NR Description: F17L21.15 [Arabidopsis thaliana]
  misc_feature (8)..(374): Homolog of NCBI NO: 15239820 NR Description: squamosa promoter binding protein-like 2
  misc_feature (8)..(380): Homolog of NCBI NO: 25456646 NR Description: squamosa promoter binding protein 2
MNWNQKDPMVWDWEHLVPSVSNAVTRHGSANSSGGTLTSNSELGHGSSKSSISASIDSPSGVGNSLEFNFAAVERHVKNTGTNGRVDDSGNSPSSMIAFNQGEPLISLKLGKRAYFENACGGQDAKVSAASDVTSAASVVKKTKVSQQNAKNWYCQVEGCKVDLSSAKDYNRKHKVCVVHSKATKVVVAGLERRFCQQCSRFHGLAEFDQNKRSCRRRLMHHNARRRKPQADTISFNSSTMFYDTRQRTNLFFSQPLYGQVRSNAGSSWDNLGGLKFMETKHPPVHPTKTASPDELHFSALQITSAAAHTGHHHDLDGFMAFKGTSTKVLNQGVEAWAAASSSNNGGPEGGRALSLLSDGSWGSSSAVIQQPTSHADAGALLPPLATVAVSNAAAAAGHPLDPSPGRFWPQDDHPPLVDGPATQIPELAHLRIW

SEQ ID NO: 16186 - protein, 426 aa, Zea mays subsp. mays
  peptide (1)..(426): Ceres Seq. ID no. 12358429
  misc_feature (147)..(222): Pfam Name: SBP domain Pfam Description: SBP domain
  misc_feature (81)..(302): Homolog of NCBI NO: 15230904 NR Description: squamosa promoter-binding protein homolog
  misc_feature (147)..(406): Homolog of NCBI NO: 25352582 NR Description: squamosa promoter binding protein-homolog 5
  misc_feature (97)..(319): Homolog of NCBI NO: 25352584 NR Description: squamosa promoter binding protein-homolog 4
  misc_feature (1)..(353): Homolog of NCBI NO: 25403307 NR Description: protein F17L21.14 [imported] - Arabidopsis
  misc_feature (1)..(353): Homolog of NCBI NO: 18396302 NR Description: putative squamosa-promoter binding protein 2
  misc_feature (1)..(364): Homolog of NCBI NO: 18650611 NR Description: At1g27370/F17L21_16 [Arabidopsis thaliana]
  misc_feature (1)..(364): Homolog of NCBI NO: 22329813 NR Description: putative squamosa-promoter binding protein 2
  misc_feature (1)..(364): Homolog of NCBI NO: 9802546 NR Description: F17L21.15 [Arabidopsis thaliana]
  misc_feature (1)..(366): Homolog of NCBI NO: 15239820 NR Description: squamosa promoter binding protein-like 2
  misc_feature (1)..(372): Homolog of NCBI NO: 25456646 NR Description: squamosa promoter binding protein 2
MVWDWEHLVPSVSNAVTRHGSANSSGGTLTSNSELGHGSSKSSISASIDSPSGVGNSLEFNFAAVERHVKNTGTNGRVDDSGNSPSSMIAFNQGEPLISLKLGKRAYFENACGGQDAKVSAASDVTSAASVVKKTKVSQQNAKNWYCQVEGCKVDLSSAKDYNRKHKVCVVHSKATKVVVAGLERRFCQQCSRFHGLAEFDQNKRSCRRRLMHHNARRRKPQADTISFNSSTMFYDTRQRTNLFFSQPLYGQVRSNAGSSWDNLGGLKFMETKHPPVHPTKTASPDELHFSALQITSAAAHTGHHHDLDGFMAFKGTSTKVLNQGVEAWAAASSSNNGGPEGGRALSLLSDGSWGSSSAVIQQPTSHADAGALLPPLATVAVSNAAAAAGHPLDPSPGRFWPQDDHPPLVDGPATQIPELAHLRIW

SEQ ID NO: 16187 - DNA, 1774 bp, Zea mays subsp. mays
  misc_feature (1)..(1774): Ceres Seq. ID no. 13565630
  misc_feature: MA Experiment ID: 108543 Result: Up-regulated in Transcription
atccatctatccatcatcaccagctagcacctcctttcccacgactcccgagcgctctgcgtgtggcgcgcggcagcatggcgactgcgaacgggagcagcaaggggtcgttcgaggtgcccaaggtggaggtcaggttcaccaagctcttcatcgacggcaagttcgtcgacgccgtctccggcaagacgttcgagacccgggaccctcgcaccggcgaggtgatcgccagcatcgcggagggaggcaaggccgacgtcgacctcgccgtcaaggccgcccgggaggccttcgacaacgggccctggcccaggatgacgggatacgagcgtggtcggatcctccacaggttcgcggacctgatcgacgagcacgtggaggagctggcggcgctggacacggtggacgccggcaagctgttcgccgtgggcaaggcgcgggacatcccgggcgccgcgcacctgctgcgctactacgccggcgccgccgacaaggtgcacggcgcgacgctcaagatggcgcagcggatgcacgggtacacgctcaaggagcccgtgggcgtggtgggccacatcgtgccctggaactaccccaccaccatgttcttcttcaaggtagggcccgcgctcgccgccggctgcgccgtcgtcgtcaagcccgccgagcagacgccgctgtccgcgctcttctacgcgcacctcgccagggaggccggcgtcccagccggcgtgctcaacgtcgtgccgggattcgggcccacggccggggccgccgtcgccgcccacatggacgtcgacaaggtcagcttcaccgggtccacggaggtcggccgcctcgtcatgagggccgcggccgagagcaacctcaagcccgtgtcgctcgagctgggcggcaagtctcccgtcatcgtcttcgacgacgccgacctcgacatggccgttaacctcgtcaacttcgccacctacaccaacaagggcgagatctgtgtggccggcacacgcatctacgtgcaggaagggatctacgacgagttcgtgaagaaggccgccgagctcgccagcaagtccgtggtcggagacccgttcaacccgagtgtcagccagggcccccaggttgacaaggaccagtacgagaaggtcctcaggtacattgacatcggaaagcgcgaaggcgccacgctggtcaccggagggaagccctgcggcgacaataagggctactacatcgagcccaccatcttcacggacgtcaaggacgacatgacgatcgcacaggatgaaatctttgggccggtgatggctctcatgaaattcaagaccgtggaggaggtgatccagaaagcgaacaacacccggtacggcctggccgccggcatcgtgaccaagaacatcgacgtcgccaacaccgtgtcgcggtccatccgcgccggcgccatctggatcaactgctacttcgcgttcgacccggacgcgccgttcggcgggtacaagatgagcgggttcggcaaggacatgggcatggacgcgctcgacaagtacctgcagaccaagaccgtcgtcactccgctgtacaacactccatggctctgaccgaccgacctctcatcctgtccgatgaacagttcaacatcacaaacaagaagaaacatgtcttgtaagatactcctccaaaggatcgggtgcctgtagctgtactcttacacctgcatggattgatgtcttgatgatgtagtgcaatgtagcattcagaacaataaagacatgtttcggactgc

SEQ ID NO: 16188 - protein, 528 aa, Zea mays subsp. mays
  peptide (1)..(528): Ceres Seq. ID no. 13565631
  misc_feature (40)..(528): Homolog of NCBI NO: 7431451 NR Description: rf2 nuclear restorer protein - maize
  misc_feature (9)..(528): Homolog of NCBI NO: 20530131 NR Description: mitochondrial aldehyde dehydrogenase [Sorghum
  misc_feature (13)..(528): Homolog of NCBI NO: 11691926 NR Description: aldehyde dehydrogenase ALDH2b
  misc_feature (13)..(528): Homolog of NCBI NO: 8163730 NR Description: aldehyde dehydrogenase [Oryza sativa]
  misc_feature (30)..(528): Homolog of NCBI NO: 18404212 NR Description: aldehyde dehydrogenase (ALDH1a) [Arabidopsis
  misc_feature (62)..(527): Homolog of NCBI NO: 19850245 NR Description: cytosolic aldehyde dehydrogenase RF2D [Zea mays]
  misc_feature (22)..(527): Homolog of NCBI NO: 19850247 NR Description: cytosolic aldehyde dehydrogenase RF2D [Zea mays]
  misc_feature (26)..(528): Homolog of NCBI NO: 34912248 NR Description: cytosolic aldehyde dehydrogenase
  misc_feature (26)..(528): Homolog of NCBI NO: 19850241 NR Description: cytosolic aldehyde dehydrogenase RF2C [Zea mays]
  misc_feature (26)..(528): Homolog of NCBI NO: 19850243 NR Description: cytosolic aldehyde dehydrogenase RF2C [Zea mays]
PSIHHHQLAPPFPRLPSALRVARGSMATANGSSKGSFEVPKVEVRFTKLFIDGKFVDAVSGKTFETRDPRTGEVIASIAEGGKADVDLAVKAAREAFDNGPWPRMTGYERGRILHRFADLIDEHVEELAALDTVDAGKLFAVGKARDIPGAAHLLRYYAGAADKVHGATLKMAQRMHGYTLKEPVGVVGHIVPWNYPTTMFFFKVGPALAAGCAVVVKPAEQTPLSALFYAHLAREAGVPAGVLNVVPGFGPTAGAAVAAHMDVDKVSFTGSTEVGRLVMRAAAESNLKPVSLELGGKSPVIVFDDADLDMAVNLVNFATYTNKGEICVAGTRIYVQEGIYDEFVKKAAELASKSVVGDPFNPSVSQGPQVDKDQYEKVLRYIDIGKREGATLVTGGKPCGDNKGYYIEPTIFTDVKDDMTIAQDEIFGPVMALMKFKTVEEVIQKANNTRYGLAAGIVTKNIDVANTVSRSIRAGAIWINCYFAFDPDAPFGGYKMSGFGKDMGMDALDKYLQTKTVVTPLYNTPWL

SEQ ID NO: 16189 - protein, 503 aa, Zea mays subsp. mays
  peptide (1)..(503): Ceres Seq. ID no. 13565632
  misc_feature (15)..(503): Homolog of NCBI NO: 7431451 NR Description: rf2 nuclear restorer protein - maize
  misc_feature (1)..(503): Homolog of NCBI NO: 20530131 NR Description: mitochondrial aldehyde dehydrogenase [Sorghum
  misc_feature (1)..(503): Homolog of NCBI NO: 11691926 NR Description: aldehyde dehydrogenase ALDH2b
  misc_feature (1)..(503): Homolog of NCBI NO: 8163730 NR Description: aldehyde dehydrogenase [Oryza sativa]
  misc_feature (5)..(503): Homolog of NCBI NO: 18404212 NR Description: aldehyde dehydrogenase (ALDH1a) [Arabidopsis
  misc_feature (37)..(502): Homolog of NCBI NO: 19850245 NR Description: cytosolic aldehyde dehydrogenase RF2D [Zea mays]
  misc_feature (1)..(502): Homolog of NCBI NO: 19850247 NR Description: cytosolic aldehyde dehydrogenase RF2D [Zea mays]
  misc_feature (1)..(503): Homolog of NCBI NO: 34912248 NR Description: cytosolic aldehyde dehydrogenase
  misc_feature (1)..(503): Homolog of NCBI NO: 19850241 NR Description: cytosolic aldehyde dehydrogenase RF2C [Zea mays]
  misc_feature (1)..(503): Homolog of NCBI NO: 19850243 NR Description: cytosolic aldehyde dehydrogenase RF2C [Zea mays]
MATANGSSKGSFEVPKVEVRFTKLFIDGKFVDAVSGKTFETRDPRTGEVIASIAEGGKADVDLAVKAAREAFDNGPWPRMTGYERGRILHRFADLIDEHVEELAALDTVDAGKLFAVGKARDIPGAAHLLRYYAGAADKVHGATLKMAQRMHGYTLKEPVGVVGHIVPWNYPTTMFFFKVGPALAAGCAVVVKPAEQTPLSALFYAHLAREAGVPAGVLNVVPGFGPTAGAAVAAHMDVDKVSFTGSTEVGRLVMRAAAESNLKPVSLELGGKSPVIVFDDADLDMAVNLVNFATYTNKGEICVAGTRIYVQEGIYDEFVKKAAELASKSVVGDPFNPSVSQGPQVDKDQYEKVLRYIDIGKREGATLVTGGKPCGDNKGYYIEPTIFTDVKDDMTIAQDEIFGPVMALMKFKTVEEVIQKANNTRYGLAAGIVTKNIDVANTVSRSIRAGAIWINCYFAFDPDAPFGGYKMSGFGKDMGMDALDKYLQTKTVVTPLYNTPWL

SEQ ID NO: 16190 - protein, 424 aa, Zea mays subsp. mays
  peptide (1)..(424): Ceres Seq. ID no. 13565633
  misc_feature (1)..(424): Homolog of NCBI NO: 7431451 NR Description: rf2 nuclear restorer protein - maize
  misc_feature (1)..(424): Homolog of NCBI NO: 20530131 NR Description: mitochondrial aldehyde dehydrogenase [Sorghum
  misc_feature (1)..(424): Homolog of NCBI NO: 11691926 NR Description: aldehyde dehydrogenase ALDH2b
  misc_feature (1)..(424): Homolog of NCBI NO: 8163730 NR Description: aldehyde dehydrogenase [Oryza sativa]
  misc_feature (1)..(424): Homolog of NCBI NO: 18404212 NR Description: aldehyde dehydrogenase (ALDH1a) [Arabidopsis
  misc_feature (1)..(423): Homolog of NCBI NO: 19850245 NR Description: cytosolic aldehyde dehydrogenase RF2D [Zea mays]
  misc_feature (1)..(423): Homolog of NCBI NO: 19850247 NR Description: cytosolic aldehyde dehydrogenase RF2D [Zea mays]
  misc_feature (1)..(424): Homolog of NCBI NO: 34912248 NR Description: cytosolic aldehyde dehydrogenase
  misc_feature (1)..(424): Homolog of NCBI NO: 19850241 NR Description: cytosolic aldehyde dehydrogenase RF2C [Zea mays]
  misc_feature (1)..(424): Homolog of NCBI NO: 19850243 NR Description: cytosolic aldehyde dehydrogenase RF2C [Zea mays]
MTGYERGRILHRFADLIDEHVEELAALDTVDAGKLFAVGKARDIPGAAHLLRYYAGAADKVHGATLKMAQRMHGYTLKEPVGVVGHIVPWNYPTTMFFFKVGPALAAGCAVVVKPAEQTPLSALFYAHLAREAGVPAGVLNVVPGFGPTAGAAVAAHMDVDKVSFTGSTEVGRLVMRAAAESNLKPVSLELGGKSPVIVFDDADLDMAVNLVNFATYTNKGEICVAGTRIYVQEGIYDEFVKKAAELASKSVVGDPFNPSVSQGPQVDKDQYEKVLRYIDIGKREGATLVTGGKPCGDNKGYYIEPTIFTDVKDDMTIAQDEIFGPVMALMKFKTVEEVIQKANNTRYGLAAGIVTKNIDVANTVSRSIRAGAIWINCYFAFDPDAPFGGYKMSGFGKDMGMDALDKYLQTKTVVTPLYNTPWL

SEQ ID NO: 16191 - DNA, 1478 bp, Zea mays subsp. mays
  misc_feature (1)..(1478): Ceres Seq. ID no. 12407112
  misc_feature: MA Experiment ID: 20000535 Result: Down-regulated in Transcription
  misc_feature: MA Experiment 20000535 PARAMETER Experiment Name: Zm_Hybrid_Seed_Dev_P Parameter: DAP Value: 30 vs. 12
  misc_feature: MA Experiment 20000535 PARAMETER Experiment Name: Zm_Hybrid_Seed_Dev_P Parameter: Organism Value: Zea mays
  misc_feature: MA Experiment 20000535 PARAMETER Experiment Name: Zm_Hybrid_Seed_Dev_P Parameter: Plant Line Value: 35A19
  misc_feature: MA Experiment 20000535 PARAMETER Experiment Name: Zm_Hybrid_Seed_Dev_P Parameter: Tissue Value: Embryo vs. Unfert Floret
actactacagcgcgccaccaggcagtacactgcagccagccagccacctccctcctctcagttcagttggctccctcccggctcccgccccactagtcgttgtagtcaatactgtgcagtacgccacccaccacctctccaagtctccattaaagaaaaggggaggcaagtcggggcctcggggagaaggggctgagcatcagaccatgacgtccggggcggcggcggcggcaggaggtctggggcggacgccgacgtggaaggagcgggagaacaacaagcgccgggagcgccggcggagggccatcgccgccaagatcttcacgggcctgcgcgcgctcggcaactacaagctgcccaagcactgcgacaacaacgaggtgctcaaggcgctctgccgcgaggcggggtgggtcgtcgaggacgacggcaccacctaccggaagggttgcaggccgccgccggggatgctgagcccgtgctcgtcgtcgcagctgctgagcgcgccgtcctcgagcttcccgagcccggtgccgtcctaccacgccagcccggcgtcgtcgagcttcccgagcccgacgcgcctcgaccacagcagcggcggcagcagcacccacaaccccgccgcggcggccgccgccgccgcctccctgctcccgttcctccggggcctgccgaacctgccgccgctccgcgtgtccagcagcgcgcccgtcacgccgccgctctcctctcccacggccgcggcggcggcgtcgcgaccgcccaccaaggtccgcaggcccgactgggacgccgccgccgaccccttccggcaccccttcttcgcggtctccgcccccgccagccccacccgcgcgcgccggcgcgagcacccggacaccatcccggagtgcgacgagtccgacgtctgctccgcggccgactccgcccggtggatcagcttccaggccaccacggcgcccgcgtcgcccacgtacaacctcgtccacccggcctccgactccatggagctggacgggacgacggcagccgtcgaggagttcgagttcgacaagggccgcgtcgtcacgccatgggaaggcgagcggatccacgaggtggccgccgaggagctcgagctcacgctcggcgtcggcgccaagtgaagcgaagctctcaagcaaagctcggatctttgagctcccgtactgcaaatgccgcgattggcagaaaaaaaaatgtgtacgtactacgtagcgtcgtagccgcgtgaagaaatcgtggatgcattcgtgctgagtttcgatcggaggcacattcggtgtagggcgtaggtgttgtttcattcatggacagctgatcaggtgaaagaacaatcgttgttcgtccgtccctccgcctgtattgcattgcattattgatcacagactgtatgctgactccattcggatgtagtactaggtggatctttggcatctacttactgtttgttctgc

SEQ ID NO: 16192 - protein, 381 aa, Zea mays subsp. mays
  peptide (1)..(381): Ceres Seq. ID no. 12407113
  misc_feature (174)..(292): Pfam Name: Atrophin-1 family Pfam Description: Atrophin-1 family
  misc_feature (69)..(245): Homolog of NCBI NO: 15230298 NR Description: putative protein; protein id: At3g50750.1
  misc_feature (47)..(379): Homolog of NCBI NO: 14626761 NR Description: mature anther-specific protein LAT61
  misc_feature (62)..(379): Homolog of NCBI NO: 25352558 NR Description: unknown protein F9E10.7 [imported] - Arabidopsis
  misc_feature (68)..(379): Homolog of NCBI NO: 6651069 NR Description: 107 protein [Arabidopsis thaliana]
  misc_feature (68)..(379): Homolog of NCBI NO: 18394728 NR Description: expressed protein
  misc_feature (68)..(379): Homolog of NCBI NO: 21592457 NR Description: unknown [Arabidopsis thaliana]
  misc_feature (62)..(379): Homolog of NCBI NO: 18410764 NR Description: expressed protein
  misc_feature (62)..(379): Homolog of NCBI NO: 18086461 NR Description: At1g75080/F9E10_7 [Arabidopsis thaliana]
  misc_feature (69)..(381): Homolog of NCBI NO: 15215731 NR Description: AT4g36780/C7A10_580 [Arabidopsis thaliana]
  misc_feature (69)..(381): Homolog of NCBI NO: 33146833 NR Description: putative mature anther-specific protein LAT61
YYSAPPGSTLQPASHLPPLSSVGSLPAPAPLVVVVNTVQYATHHLSKSPLKKRGGKSGPRGEGAEHQTMTSGAAAAAGGLGRTPTWKERENNKRRERRRRAIAAKIFTGLRALGNYKLPKHCDNNEVLKALCREAGWVVEDDGTTYRKGCRPPPGMLSPCSSSQLLSAPSSSFPSPVPSYHASPASSSFPSPTRLDHSSGGSSTHNPAAAAAAAASLLPFLRGLPNLPPLRVSSSAPVTPPLSSPTAAAAASRPPTKVRRPDWDAAADPFRHPFFAVSAPASPTRARRREHPDTIPECDESDVCSAADSARWISFQATTAPASPTYNLVHPASDSMELDGTTAAVEEFEFDKGRVVTPWEGERIHEVAAEELELTLGVGAK

SEQ ID NO: 16193 - protein, 313 aa, Zea mays subsp. mays
  peptide (1)..(313): Ceres Seq. ID no. 12407114
  misc_feature (106)..(224): Pfam Name: Atrophin-1 family Pfam Description: Atrophin-1 family
  misc_feature (1)..(177): Homolog of NCBI NO: 15230298 NR Description: putative protein; protein id: At3g50750.1
  misc_feature (1)..(311): Homolog of NCBI NO: 14626761 NR Description: mature anther-specific protein LAT61
  misc_feature (1)..(311): Homolog of NCBI NO: 25352558 NR Description: unknown protein F9E10.7 [imported] - Arabidopsis
  misc_feature (1)..(311): Homolog of NCBI NO: 6651069 NR Description: 107 protein [Arabidopsis thaliana]
  misc_feature (1)..(311): Homolog of NCBI NO: 18394728 NR Description: expressed protein
  misc_feature (1)..(311): Homolog of NCBI NO: 21592457 NR Description: unknown [Arabidopsis thaliana]
  misc_feature (1)..(311): Homolog of NCBI NO: 18410764 NR Description: expressed protein
  misc_feature (1)..(311): Homolog of NCBI NO: 18086461 NR Description: At1g75080/F9E10_7 [Arabidopsis thaliana]
  misc_feature (1)..(313): Homolog of NCBI NO: 15215731 NR Description: AT4g36780/C7A10_580 [Arabidopsis thaliana]
  misc_feature (1)..(313): Homolog of NCBI NO: 33146833 NR Description: putative mature anther-specific protein LAT61
MTSGAAAAAGGLGRTPTWKERENNKRRERRRRAIAAKIFTGLRALGNYKLPKHCDNNEVLKALCREAGWVVEDDGTTYRKGCRPPPGMLSPCSSSQLLSAPSSSFPSPVPSYHASPASSSFPSPTRLDHSSGGSSTHNPAAAAAAAASLLPFLRGLPNLPPLRVSSSAPVTPPLSSPTAAAAASRPPTKVRRPDWDAAADPFRHPFFAVSAPASPTRARRREHPDTIPECDESDVCSAADSARWISFQATTAPASPTYNLVHPASDSMELDGTTAAVEEFEFDKGRVVTPWEGERIHEVAAEELELTLGVGAK

SEQ ID NO: 16194 - protein, 226 aa, Zea mays subsp. mays
  peptide (1)..(226): Ceres Seq. ID no. 12407115
  misc_feature (19)..(137): Pfam Name: Atrophin-1 family Pfam Description: Atrophin-1 family
  misc_feature (1)..(224): Homolog of NCBI NO: 21592457 NR Description: unknown [Arabidopsis thaliana]
  misc_feature (1)..(224): Homolog of NCBI NO: 18410764 NR Description: expressed protein
  misc_feature (1)..(224): Homolog of NCBI NO: 18086461 NR Description: At1g75080/F9E10_7 [Arabidopsis thaliana]
  misc_feature (1)..(224): Homolog of NCBI NO: 14626761 NR Description: mature anther-specific protein LAT61
  misc_feature (1)..(224): Homolog of NCBI NO: 6651069 NR Description: 107 protein [Arabidopsis thaliana]
  misc_feature (1)..(224): Homolog of NCBI NO: 18394728 NR Description: expressed protein
  misc_feature (1)..(224): Homolog of NCBI NO: 25352558 NR Description: unknown protein F9E10.7 [imported] - Arabidopsis
  misc_feature (1)..(90): Homolog of NCBI NO: 15230298 NR Description: putative protein; protein id: At3g50750.1
  misc_feature (1)..(226): Homolog of NCBI NO: 15215731 NR Description: AT4g36780/C7A10_580 [Arabidopsis thaliana]
  misc_feature (1)..(226): Homolog of NCBI NO: 33146833 NR Description: putative mature anther-specific protein LAT61
MLSPCSSSQLLSAPSSSFPSPVPSYHASPASSSFPSPTRLDHSSGGSSTHNPAAAAAAAASLLPFLRGLPNLPPLRVSSSAPVTPPLSSPTAAAAASRPPTKVRRPDWDAAADPFRHPFFAVSAPASPTRARRREHPDTIPECDESDVCSAADSARWISFQATTAPASPTYNLVHPASDSMELDGTTAAVEEFEFDKGRVVTPWEGERIHEVAAEELELTLGVGAK

SEQ ID NO: 16195 - DNA, 1814 bp, Zea mays subsp. mays
  misc_feature (1)..(1814): Ceres Seq. ID no. 12382156
  misc_feature: MA Experiment ID: 108527 Result: Down-regulated in Transcription
  misc_feature: MA Experiment 108527 PARAMETER Experiment Name: Zm_5mM_NO_P Parameter: Age (day) Value: 8
  misc_feature: MA Experiment 108527 PARAMETER Experiment Name: Zm_5mM_NO_P Parameter: Organism Value: Zea mays
  misc_feature: MA Experiment 108527 PARAMETER Experiment Name: Zm_5mM_NO_P Parameter: Plant Line Value: 35A19
  misc_feature: MA Experiment 108527 PARAMETER Experiment Name: Zm_5mM_NO_P Parameter: Timepoint (hr) Value: 6
  misc_feature: MA Experiment 108527 PARAMETER Experiment Name: Zm_5mM_NO_P Parameter: Tissue Value: Aerial
  misc_feature: MA Experiment 108527 PARAMETER Experiment Name: Zm_5mM_NO_P Parameter: Treatment Value: 5mM NO vs. No Treatment
  misc_feature: MA Experiment ID: 108529 Result: Down-regulated in Transcription
  misc_feature: MA Experiment 108529 PARAMETER Experiment Name: Zm_Imbibed_Seeds_P Parameter: Age (day) Value: 5 vs. 2
  misc_feature: MA Experiment 108529 PARAMETER Experiment Name: Zm_Imbibed_Seeds_P Parameter: Organism Value: Zea mays
  misc_feature: MA Experiment 108529 PARAMETER Experiment Name: Zm_Imbibed_Seeds_P Parameter: Plant Line Value: 35A19
  misc_feature: MA Experiment 108529 PARAMETER Experiment Name: Zm_Imbibed_Seeds_P Parameter: Tissue Value: Roots vs. Embryo
  misc_feature: MA Experiment ID: 108536 Result: Up-regulated in Transcription
  misc_feature: MA Experiment 108536 PARAMETER Experiment Name: Zm_Meristem_P Parameter: Age (day) Value: 8
  misc_feature: MA Experiment 108536 PARAMETER Experiment Name: Zm_Meristem_P Parameter: Organism Value: Zea mays
  misc_feature: MA Experiment 108536 PARAMETER Experiment Name: Zm_Meristem_P Parameter: Plant Line Value: 35A19
  misc_feature: MA Experiment 108536 PARAMETER Experiment Name: Zm_Meristem_P Parameter: Tissue Value: Shoot Meristem vs. Above Shoot Meristem
  misc_feature: MA Experiment ID: 108545 Result: Up-regulated in Transcription
  misc_feature: MA Experiment 108545 PARAMETER Experiment Name: Zm_Imbibed_Seeds_P Parameter: Age (day) Value: 3 vs. 2
  misc_feature: MA Experiment 108545 PARAMETER Experiment Name: Zm_Imbibed_Seeds_P Parameter: Organism Value: Zea mays
  misc_feature: MA Experiment 108545 PARAMETER Experiment Name: Zm_Imbibed_Seeds_P Parameter: Plant Line Value: 35A19
  misc_feature: MA Experiment 108545 PARAMETER Experiment Name: Zm_Imbibed_Seeds_P Parameter: Tissue Value: Aerial vs. Embryo
  misc_feature: MA Experiment ID: 108546 Result: Down-regulated in Transcription
  misc_feature: MA Experiment 108546 PARAMETER Experiment Name: Zm_Imbibed_Seeds_P Parameter: Age (day) Value: 3 vs. 2
  misc_feature: MA Experiment 108546 PARAMETER Experiment Name: Zm_Imbibed_Seeds_P Parameter: Organism Value: Zea mays
  misc_feature: MA Experiment 108546 PARAMETER Experiment Name: Zm_Imbibed_Seeds_P Parameter: Plant Line Value: 35A19
  misc_feature: MA Experiment 108546 PARAMETER Experiment Name: Zm_Imbibed_Seeds_P Parameter: Tissue Value: Roots vs. Embryo
  misc_feature: MA Experiment ID: 108687 Result: Down-regulated in Transcription
  misc_feature: MA Experiment 108687 PARAMETER Experiment Name: Zm_Embryos-Flowers__P Parameter: Tissue Value: Embryo vs. Aerial+
  misc_feature: MA Experiment ID: 20000478 Result: Down-regulated in Transcription
  misc_feature: MA Experiment 20000478 PARAMETER Experiment Name: Zm_5mM_SA_P Parameter: Age (day) Value: 11
  misc_feature: MA Experiment 20000478 PARAMETER Experiment Name: Zm_5mM_SA_P Parameter: Organism Value: Zea mays
  misc_feature: MA Experiment 20000478 PARAMETER Experiment Name: Zm_5mM_SA_P Parameter: Plant Line Value: 35A19
  misc_feature: MA Experiment 20000478 PARAMETER Experiment Name: Zm_5mM_SA_P Parameter: Timepoint (hr) Value: 72
  misc_feature: MA Experiment 20000478 PARAMETER Experiment Name: Zm_5mM_SA_P Parameter: Tissue Value: Aerial
  misc_feature: MA Experiment 20000478 PARAMETER Experiment Name: Zm_5mM_SA_P Parameter: Treatment Value: 5mM SA vs. No Treatment
  misc_feature: MA Experiment ID: 20000479 Result: Down-regulated in Transcription
  misc_feature: MA Experiment 20000479 PARAMETER Experiment Name: Zm_Drought_P Parameter: Age (day) Value: 10
  misc_feature: MA Experiment 20000479 PARAMETER Experiment Name: Zm_Drought_P Parameter: Organism Value: Zea mays
  misc_feature: MA Experiment 20000479 PARAMETER Experiment Name: Zm_Drought_P Parameter: Plant Line Value: 35A19
  misc_feature: MA Experiment 20000479 PARAMETER Experiment Name: Zm_Drought_P Parameter: Timepoint (hr) Value: 48
  misc_feature: MA Experiment 20000479 PARAMETER Experiment Name: Zm_Drought_P Parameter: Tissue Value: Aerial
  misc_feature: MA Experiment 20000479 PARAMETER Experiment Name: Zm_Drought_P Parameter: Treatment Value: Drought vs. No Drought
  misc_feature: MA Experiment ID: 20000535 Result: Down-regulated in Transcription
  misc_feature: MA Experiment 20000535 PARAMETER Experiment Name: Zm_Hybrid_Seed_Dev_P Parameter: DAP Value: 30 vs. 12
  misc_feature: MA Experiment 20000535 PARAMETER Experiment Name: Zm_Hybrid_Seed_Dev_P Parameter: Organism Value: Zea mays
  misc_feature: MA Experiment 20000535 PARAMETER Experiment Name: Zm_Hybrid_Seed_Dev_P Parameter: Plant Line Value: 35A19
  misc_feature: MA Experiment 20000535 PARAMETER Experiment Name: Zm_Hybrid_Seed_Dev_P Parameter: Tissue Value: Embryo vs. Unfert Floret
gcacgagaccattacctagaacatcctaatcgaaaaaaacacagacacagttgcgtcgtcgcccggccgctgtgcgtgcgtgcgtgcgtgctgtgctgcctttctttctcgctttaatttctttccatccatccgctttccccccctcccaatcccaatccctccaaaaatccgctccgcgcgcgcaagcgcggccggcctttatcgatccctcccggcctctagcgctgctccggcggcggagtccggccccaggaaacaaaggccgcgcgcgccgaccggaccgaccggggggccgtccagttccagttccagttccaggccgcacaagcacatgagatcatgagctcggaggactcgctcaagtcgctgtcgctggactacctgaacctgctcatcaacgggcaggccttcagcgacgtggccttcagcgtggagggccggctggtgcacgcgcaccgctgcgtgctggccgcgcgcagcctcttcttccgcaagctcttctgcggcctggacccgagccaccagccgcccccacccaccgccggcgggcgcgcgccggacctcgtcatccccgtcagctccatccgctacgaggtgctggtgctggtgctccagttcctctacagcggccaggcctccgtcgccgctcccaagagcggcccgctcccgggctgcggcgccaggggctgctggcacacccgctgcggcgccgccgtcgacctcgccctcgacaccctcgccgctgcgcgctccttcggcgtcgagcagctcgcgctcctcgtccagaagcagctggaggccatggtgaaggaggcgtccgtggacgacgtgatgaaggtgctgatggcgtcgcgcaagttcgagatgcaggagctctgggccgcctgctcccacctggtggcgcgctcgggcctctccgccgacctcctcgccaagcacctccccatcgacgtggtcgccaagatcgaggagatccgcgccaagtcccccggcggcgccgccgccgcgggcggcgccgggccgcgctcgccgttcctcacccaccactacctccccatcaacgcggcgtcgtcggcggccgaccgcgagcaccggatccggcgcatgcggcgcgcgctggacgccgccgacatcgagctcgtcaagctgatggtgatgggcgaggggctggacctggacgacgcgctggccgtgcactacgccgtccagcactgcggccgcgacgtcgtcaaggcgctgctggagctgggcgccgccgacgtcaactcccgcgccgggcccgcgggcaagacggcgctgcacctggcggccgagatggtgtcccccgacatggtctccgtgctcctggaccaccacgccgaccccaacgcccgcacgctcgacggcgtcaccccgctcgacgtgctccgcagcctcacctccgagttcctcttcaagggcgccgtgccggggctcacgcacatcgagcccaacaagctcaggctctgcctcgagctcgtgcagtccgcagtcatggtggccacgcgcgacgacggcggcgcgcacggcgacgccgggggaggtgggagcgacggcgggagcttcccgaggggcggcgacgccgccgacgacagcttggtgagcctcaccatgaactccacgctcatgtaccagggccaggagatggcggcggcgctggccggcgacgccaggaaagggagcggcggcggccgagggagtccgtccagcttgtacttccccaatggcttcgcatgagtatttaatctccttcatcaagcaagagcaatgcattttcgtttctctctacatat

SEQ ID NO: 16196 - protein, 471 aa, Zea mays subsp. mays
  peptide (1)..(471): Ceres Seq. ID no. 12382157
  misc_feature (15)..(156): Pfam Name: BTB/POZ domain Pfam Description: BTB/POZ domain
  misc_feature (33)..(213): Homolog of NCBI NO: 40538909 NR Description: expressed protein (with alternative splicing)
  misc_feature (238)..(362): Homolog of NCBI NO: 40538910 NR Description: expressed protein (with alternative splicing)
  misc_feature (33)..(213): Homolog of NCBI NO: 40538910 NR Description: expressed protein (with alternative splicing)
  misc_feature (238)..(362): Homolog of NCBI NO: 40538911 NR Description: expressed protein (with alternative splicing)
  misc_feature (33)..(213): Homolog of NCBI NO: 40538911 NR Description: expressed protein (with alternative splicing)
  misc_feature (4)..(434): Homolog of NCBI NO: 15230230 NR Description: putative protein; protein id: At3g57130.1
  misc_feature (1)..(412): Homolog of NCBI NO: 27754703 NR Description: unknown protein [Arabidopsis thaliana]
  misc_feature (1)..(412): Homolog of NCBI NO: 15227330 NR Description: hypothetical protein; protein id: At2g41370.1
  misc_feature (4)..(68): Homolog of NCBI NO: 22830934 NR Description: P0466H10.32 [Oryza sativa (japonica
  misc_feature (68)..(470): Homolog of NCBI NO: 22830934 NR Description: P0466H10.32 [Oryza sativa (japonica
MSSEDSLKSLSLDYLNLLINGQAFSDVAFSVEGRLVHAHRCVLAARSLFFRKLFCGLDPSHQPPPPTAGGRAPDLVIPVSSIRYEVLVLVLQFLYSGQASVAAPKSGPLPGCGARGCWHTRCGAAVDLALDTLAAARSFGVEQLALLVQKQLEAMVKEASVDDVMKVLMASRKFEMQELWAACSHLVARSGLSADLLAKHLPIDVVAKIEEIRAKSPGGAAAAGGAGPRSPFLTHHYLPINAASSAADREHRIRRMRRALDAADIELVKLMVMGEGLDLDDALAVHYAVQHCGRDVVKALLELGAADVNSRAGPAGKTALHLAAEMVSPDMVSVLLDHHADPNARTLDGVTPLDVLRSLTSEFLFKGAVPGLTHIEPNKLRLCLELVQSAVMVATRDDGGAHGDAGGGGSDGGSFPRGGDAADDSLVSLTMNSTLMYQGQEMAAALAGDARKGSGGGRGSPSSLYFPNGFA

SEQ ID NO: 16197 - protein, 317 aa, Zea mays subsp. mays
  peptide (1)..(317): Ceres Seq. ID no. 12382158
  misc_feature (161)..(193): Pfam Name: Ankyrin repeat Pfam Description: Ankyrin repeat
  misc_feature (84)..(208): Homolog of NCBI NO: 40538909 NR Description: expressed protein (with alternative splicing)
  misc_feature (1)..(59): Homolog of NCBI NO: 40538909 NR Description: expressed protein (with alternative splicing)
  misc_feature (84)..(208): Homolog of NCBI NO: 40538910 NR Description: expressed protein (with alternative splicing)
  misc_feature (1)..(59): Homolog of NCBI NO: 40538910 NR Description: expressed protein (with alternative splicing)
  misc_feature (84)..(208): Homolog of NCBI NO: 40538911 NR Description: expressed protein (with alternative splicing)
  misc_feature (1)..(59): Homolog of NCBI NO: 40538911 NR Description: expressed protein (with alternative splicing)
  misc_feature (1)..(280): Homolog of NCBI NO: 15230230 NR Description: putative protein; protein id: At3g57130.1
  misc_feature (1)..(258): Homolog of NCBI NO: 27754703 NR Description: unknown protein [Arabidopsis thaliana]
  misc_feature (1)..(258): Homolog of NCBI NO: 15227330 NR Description: hypothetical protein; protein id: At2g41370.1
  misc_feature (1)..(316): Homolog of NCBI NO: 22830934 NR Description: P0466H10.32 [Oryza sativa (japonica
MVKEASVDDVMKVLMASRKFEMQELWAACSHLVARSGLSADLLAKHLPIDVVAKIEEIRAKSPGGAAAAGGAGPRSPFLTHHYLPINAASSAADREHRIRRMRRALDAADIELVKLMVMGEGLDLDDALAVHYAVQHCGRDVVKALLELGAADVNSRAGPAGKTALHLAAEMVSPDMVSVLLDHHADPNARTLDGVTPLDVLRSLTSEFLFKGAVPGLTHIEPNKLRLCLELVQSAVMVATRDDGGAHGDAGGGGSDGGSFPRGGDAADDSLVSLTMNSTLMYQGQEMAAALAGDARKGSGGGRGSPSSLYFPNGFA

SEQ ID NO: 16198 - protein, 307 aa, Zea mays subsp. mays
  peptide (1)..(307): Ceres Seq. ID no. 12382159
  misc_feature (151)..(183): Pfam Name: Ankyrin repeat Pfam Description: Ankyrin repeat
  misc_feature (74)..(198): Homolog of NCBI NO: 40538909 NR Description: expressed protein (with alternative splicing)
  misc_feature (1)..(49): Homolog of NCBI NO: 40538909 NR Description: expressed protein (with alternative splicing)
  misc_feature (74)..(198): Homolog of NCBI NO: 40538910 NR Description: expressed protein (with alternative splicing)
  misc_feature (1)..(49): Homolog of NCBI NO: 40538910 NR Description: expressed protein (with alternative splicing)
  misc_feature (74)..(198): Homolog of NCBI NO: 40538911 NR Description: expressed protein (with alternative splicing)
  misc_feature (1)..(49): Homolog of NCBI NO: 40538911 NR Description: expressed protein (with alternative splicing)
  misc_feature (1)..(270): Homolog of NCBI NO: 15230230 NR Description: putative protein; protein id: At3g57130.1
  misc_feature (1)..(248): Homolog of NCBI NO: 27754703 NR Description: unknown protein [Arabidopsis thaliana]
  misc_feature (1)..(248): Homolog of NCBI NO: 15227330 NR Description: hypothetical protein; protein id: At2g41370.1
  misc_feature (1)..(306): Homolog of NCBI NO: 22830934 NR Description: P0466H10.32 [Oryza sativa (japonica
MKVLMASRKFEMQELWAACSHLVARSGLSADLLAKHLPIDVVAKIEEIRAKSPGGAAAAGGAGPRSPFLTHHYLPINAASSAADREHRIRRMRRALDAADIELVKLMVMGEGLDLDDALAVHYAVQHCGRDVVKALLELGAADVNSRAGPAGKTALHLAAEMVSPDMVSVLLDHHADPNARTLDGVTPLDVLRSLTSEFLFKGAVPGLTHIEPNKLRLCLELVQSAVMVATRDDGGAHGDAGGGGSDGGSFPRGGDAADDSLVSLTMNSTLMYQGQEMAAALAGDARKGSGGGRGSPSSLYFPNGFA

SEQ ID NO: 16199 - DNA, 1562 bp, Zea mays subsp. mays
  misc_feature (1)..(1562): Ceres Seq. ID no. 12386730
  misc_feature: MA Experiment ID: 108515 Result: Up-regulated in Transcription
  misc_feature: MA Experiment 108515 PARAMETER Experiment Name: Zm_2mM_SA_P Parameter: Age (day) Value: 8
  misc_feature: MA Experiment 108515 PARAMETER Experiment Name: Zm_2mM_SA_P Parameter: Organism Value: Zea mays
  misc_feature: MA Experiment 108515 PARAMETER Experiment Name: Zm_2mM_SA_P Parameter: Plant Line Value: 35A19
  misc_feature: MA Experiment 108515 PARAMETER Experiment Name: Zm_2mM_SA_P Parameter: Timepoint (hr) Value: 12
  misc_feature: MA Experiment 108515 PARAMETER Experiment Name: Zm_2mM_SA_P Parameter: Tissue Value: Aerial
  misc_feature: MA Experiment 108515 PARAMETER Experiment Name: Zm_2mM_SA_P Parameter: Treatment Value: 2mM SA vs. No Treatment
  misc_feature: MA Experiment ID: 108522 Result: Up-regulated in Transcription
  misc_feature: MA Experiment 108522 PARAMETER Experiment Name: Zm_42deg_Heat_P Parameter: Age (day) Value: 8
  misc_feature: MA Experiment 108522 PARAMETER Experiment Name: Zm_42deg_Heat_P Parameter: Organism Value: Zea mays
  misc_feature: MA Experiment 108522 PARAMETER Experiment Name: Zm_42deg_Heat_P Parameter: Plant Line Value: 35A19
  misc_feature: MA Experiment 108522 PARAMETER Experiment Name: Zm_42deg_Heat_P Parameter: Temperature (deg C) Value: 42 vs. 22
  misc_feature: MA Experiment 108522 PARAMETER Experiment Name: Zm_42deg_Heat_P Parameter: Timepoint (hr) Value: 1
  misc_feature: MA Experiment 108522 PARAMETER Experiment Name: Zm_42deg_Heat_P Parameter: Tissue Value: Aerial
  misc_feature: MA Experiment ID: 108528 Result: Down-regulated in Transcription
  misc_feature: MA Experiment 108528 PARAMETER Experiment Name: Zm_Imbibed_Seeds_P Parameter: Age (day) Value: 5 vs. 2
  misc_feature: MA Experiment 108528 PARAMETER Experiment Name: Zm_Imbibed_Seeds_P Parameter: Organism Value: Zea mays
  misc_feature: MA Experiment 108528 PARAMETER Experiment Name: Zm_Imbibed_Seeds_P Parameter: Plant Line Value: 35A19
  misc_feature: MA Experiment 108528 PARAMETER Experiment Name: Zm_Imbibed_Seeds_P Parameter: Tissue Value: Aerial vs. Embryo
  misc_feature: MA Experiment ID: 108530 Result: Down-regulated in Transcription
  misc_feature: MA Experiment 108530 PARAMETER Experiment Name: Zm_Imbibed_Seeds_P Parameter: Age (day) Value: 6 vs. 2
  misc_feature: MA Experiment 108530 PARAMETER Experiment Name: Zm_Imbibed_Seeds_P Parameter: Organism Value: Zea mays
  misc_feature: MA Experiment 108530 PARAMETER Experiment Name: Zm_Imbibed_Seeds_P Parameter: Plant Line Value: 35A19
  misc_feature: MA Experiment 108530 PARAMETER Experiment Name: Zm_Imbibed_Seeds_P Parameter: Tissue Value: Aerial vs. Embryo
  misc_feature: MA Experiment ID: 108534 Result: Down-regulated in Transcription
  misc_feature: MA Experiment 108534 PARAMETER Experiment Name: Zm_4deg_Cold_P Parameter: Age (hr) Value: 8
  misc_feature: MA Experiment 108534 PARAMETER Experiment Name: Zm_4deg_Cold_P Parameter: Organism Value: Zea mays
  misc_feature: MA Experiment 108534 PARAMETER Experiment Name: Zm_4deg_Cold_P Parameter: Plant Line Value: 35A19
  misc_feature: MA Experiment 108534 PARAMETER Experiment Name: Zm_4deg_Cold_P Parameter: Temperature (deg C) Value: 4 vs. 22
  misc_feature: MA Experiment 108534 PARAMETER Experiment Name: Zm_4deg_Cold_P Parameter: Timepoint (hr) Value: 6
  misc_feature: MA Experiment 108534 PARAMETER Experiment Name: Zm_4deg_Cold_P Parameter: Tissue Value: Aerial
  misc_feature: MA Experiment ID: 108535 Result: Down-regulated in Transcription
  misc_feature: MA Experiment 108535 PARAMETER Experiment Name: Zm_Meristem_P Parameter: Age (day) Value: 8
  misc_feature: MA Experiment 108535 PARAMETER Experiment Name: Zm_Meristem_P Parameter: Organism Value: Zea mays
  misc_feature: MA Experiment 108535 PARAMETER Experiment Name: Zm_Meristem_P Parameter: Plant Line Value: 35A19
  misc_feature: MA Experiment 108535 PARAMETER Experiment Name: Zm_Meristem_P Parameter: Tissue Value: Root Meristem vs. Above Root Meristem
  misc_feature: MA Experiment ID: 108536 Result: Up-regulated in Transcription
  misc_feature: MA Experiment 108536 PARAMETER Experiment Name: Zm_Meristem_P Parameter: Age (day) Value: 8
  misc_feature: MA Experiment 108536 PARAMETER Experiment Name: Zm_Meristem_P Parameter: Organism Value: Zea mays
  misc_feature: MA Experiment 108536 PARAMETER Experiment Name: Zm_Meristem_P Parameter: Plant Line Value: 35A19
  misc_feature: MA Experiment 108536 PARAMETER Experiment Name: Zm_Meristem_P Parameter: Tissue Value: Shoot Meristem vs. Above Shoot Meristem
  misc_feature: MA Experiment ID: 108542 Result: Up-regulated in Transcription
  misc_feature: MA Experiment 108542 PARAMETER Experiment Name: Zm_150mM_NaCl_P Parameter: Age (day) Value: 8
  misc_feature: MA Experiment 108542 PARAMETER Experiment Name: Zm_150mM_NaCl_P Parameter: Organism Value: Zea mays
  misc_feature: MA Experiment 108542 PARAMETER Experiment Name: Zm_150mM_NaCl_P Parameter: Plant Line Value: 35A19
  misc_feature: MA Experiment 108542 PARAMETER Experiment Name: Zm_150mM_NaCl_P Parameter: Timepoint (hr) Value: 6
  misc_feature: MA Experiment 108542 PARAMETER Experiment Name: Zm_150mM_NaCl_P Parameter: Tissue Value: Aerial
  misc_feature: MA Experiment 108542 PARAMETER Experiment Name: Zm_150mM_NaCl_P Parameter: Treatment Value: 150mM NaCl vs. No Treatment
  misc_feature: MA Experiment ID: 108544 Result: Up-regulated in Transcription
  misc_feature: MA Experiment ID: 108547 Result: Down-regulated in Transcription
  misc_feature: MA Experiment 108547 PARAMETER Experiment Name: Zm_Imbibed_Seeds_P Parameter: Age (day) Value: 4 vs. 2
  misc_feature: MA Experiment 108547 PARAMETER Experiment Name: Zm_Imbibed_Seeds_P Parameter: Organism Value: Zea mays
  misc_feature: MA Experiment 108547 PARAMETER Experiment Name: Zm_Imbibed_Seeds_P Parameter: Plant Line Value: 35A19
  misc_feature: MA Experiment 108547 PARAMETER Experiment Name: Zm_Imbibed_Seeds_P Parameter: Tissue Value: Aerial vs. Embryo
  misc_feature: MA Experiment ID: 108556 Result: Up-regulated in Transcription
  misc_feature: MA Experiment 108556 PARAMETER Experiment Name: Zm_Drought_P Parameter: Age (day) Value: 9
  misc_feature: MA Experiment 108556 PARAMETER Experiment Name: Zm_Drought_P Parameter: Organism Value: Zea mays
  misc_feature: MA Experiment 108556 PARAMETER Experiment Name: Zm_Drought_P Parameter: Plant Line Value: 35A19
  misc_feature: MA Experiment 108556 PARAMETER Experiment Name: Zm_Drought_P Parameter: Timepoint (hr) Value: 24
  misc_feature: MA Experiment 108556 PARAMETER Experiment Name: Zm_Drought_P Parameter: Tissue Value: Aerial
  misc_feature: MA Experiment 108556 PARAMETER Experiment Name: Zm_Drought_P Parameter: Treatment Value: Drought vs. No Drought
  misc_feature: MA Experiment ID: 108687 Result: Up-regulated in Transcription
  misc_feature: MA Experiment 108687 PARAMETER Experiment Name: Zm_Embryos-Flowers__P Parameter: Tissue Value: Embryo vs. Aerial+
  misc_feature: MA Experiment ID: 20000108 Result: Down-regulated in Transcription
  misc_feature: MA Experiment 20000108 PARAMETER Experiment Name: Zm_Root-Tips_P Parameter: Age (day) Value: 12
  misc_feature: MA Experiment 20000108 PARAMETER Experiment Name: Zm_Root-Tips_P Parameter: Organism Value: Zea mays
  misc_feature: MA Experiment 20000108 PARAMETER Experiment Name: Zm_Root-Tips_P Parameter: Tissue Value: Root tips vs. Root mid region    35
  misc_feature: MA Experiment 20000108 PARAMETER Experiment Name: Zm_Root-Tips_P Parameter: Tissue Value: Root tips vs. Root mid region   Sequence Listing-Misc Features (4)
  misc_feature: MA Experiment ID: 20000478 Result: Up-regulated in Transcription
  misc_feature: MA Experiment 20000478 PARAMETER Experiment Name: Zm_5mM_SA_P Parameter: Age (day) Value: 11
  misc_feature: MA Experiment 20000478 PARAMETER Experiment Name: Zm_5mM_SA_P Parameter: Organism Value: Zea mays
  misc_feature: MA Experiment 20000478 PARAMETER Experiment Name: Zm_5mM_SA_P Parameter: Plant Line Value: 35A19
  misc_feature: MA Experiment 20000478 PARAMETER Experiment Name: Zm_5mM_SA_P Parameter: Timepoint (hr) Value: 72
  misc_feature: MA Experiment 20000478 PARAMETER Experiment Name: Zm_5mM_SA_P Parameter: Tissue Value: Aerial
  misc_feature: MA Experiment 20000478 PARAMETER Experiment Name: Zm_5mM_SA_P Parameter: Treatment Value: 5mM SA vs. No Treatment
  misc_feature: MA Experiment ID: 20000479 Result: Up-regulated in Transcription
  misc_feature: MA Experiment 20000479 PARAMETER Experiment Name: Zm_Drought_P Parameter: Age (day) Value: 10
  misc_feature: MA Experiment 20000479 PARAMETER Experiment Name: Zm_Drought_P Parameter: Organism Value: Zea mays
  misc_feature: MA Experiment 20000479 PARAMETER Experiment Name: Zm_Drought_P Parameter: Plant Line Value: 35A19
  misc_feature: MA Experiment 20000479 PARAMETER Experiment Name: Zm_Drought_P Parameter: Timepoint (hr) Value: 48
  misc_feature: MA Experiment 20000479 PARAMETER Experiment Name: Zm_Drought_P Parameter: Tissue Value: Aerial
  misc_feature: MA Experiment 20000479 PARAMETER Experiment Name: Zm_Drought_P Parameter: Treatment Value: Drought vs. No Drought
  misc_feature: MA Experiment ID: 20000480 Result: Up-regulated in Transcription
  misc_feature: MA Experiment 20000480 PARAMETER Experiment Name: Zm_Drought_P Parameter: Age (day) Value: 11
  misc_feature: MA Experiment 20000480 PARAMETER Experiment Name: Zm_Drought_P Parameter: Organism Value: Zea mays
  misc_feature: MA Experiment 20000480 PARAMETER Experiment Name: Zm_Drought_P Parameter: Plant Line Value: 35A19
  misc_feature: MA Experiment 20000480 PARAMETER Experiment Name: Zm_Drought_P Parameter: Timepoint (hr) Value: 72
  misc_feature: MA Experiment 20000480 PARAMETER Experiment Name: Zm_Drought_P Parameter: Tissue Value: Aerial
  misc_feature: MA Experiment 20000480 PARAMETER Experiment Name: Zm_Drought_P Parameter: Treatment Value: Drought vs. No Drought
  misc_feature: MA Experiment ID: 20000488 Result: Down-regulated in Transcription
  misc_feature: MA Experiment 20000488 PARAMETER Experiment Name: Zm_50mM_NH4NO3_L_to_H_P Parameter: Organism Value: Zea mays
  misc_feature: MA Experiment 20000488 PARAMETER Experiment Name: Zm_50mM_NH4NO3_L_to_H_P Parameter: Timepoint (hr) Value: 8
  misc_feature: MA Experiment 20000488 PARAMETER Experiment Name: Zm_50mM_NH4NO3_L_to_H_P Parameter: Tissue Value: Leaves
  misc_feature: MA Experiment 20000488 PARAMETER Experiment Name: Zm_50mM_NH4NO3_L_to_H_P Parameter: Treatment Value: 50mM NH4NO3 vs. 100mM Mannitol
gattcactcacctcactccacctcttgactgaagaagccgtctgcctgcctccgactcccgcgtctctcctccaagtgatctccttccacctttgccgatcgcccgttgccaccggccgggcgatcctcgtacttccacttccaccatggcctcctcctcctcttcctcctcctcctcctcctcctcctcctcctcctcccgcttcctcctcccgctgctactgctctgttcgcacctctccctcgcctcggcagaggaggcggcgtcggcggcagcggacctcctcagcgaggcgcgcgcgccggggttcgccgcgtggctgcgcggcgtgcggcggcgcatccaccagcgtcccgagctggccttccaggagttccgcaccagcgagctcgtgcgggccgagctcgacgcgatcggcgtcccgtaccggtggcccgtcgcccagaccggcgtcgtggccaccatcgcgggcgccgccgccggccccgtcgtcgcgctccgggccgacatggacgcgctccccgtgcaggagctggtggactgggagcacaagagccaggagagtgggaaaatgcacgcttgcggacacgacgtgcacacgacaatgcttctgggggctgccagaatactccaggatcgcaagagcgacctaatgggcaccgtgaagcttgtattccagccggcagaggagggccagggcggcgcgtactacgtgctgcaagaaggcgtccttgacgacgcgtcagccatattcggcttgcacgttgacccggccctccccgtcggcgtcgtttcgtccaggccagggcccttcgcggcgacgtccggtcggttcctggcgacggtcaccggtaaaggcgggcacgccgcgatgccccacgaatccatcgaccctgttgtagctgcagccactactgtcgtcagcctccagaagatcatctcccgagaaatcgatcccctgcagggcgcggttgtgtccgtcacttttctgaagggaggagaagcgtacaatgtcatcccagagaatgtggcctttggcggcaccatgaggagcatgacgaatgaaggtctatcgtatctcaagaagaggatcaaagagatcgtcgaaggacaggcagcggtgcaccactgcagtgccagcgtggacttcatggaggacacgatgaagccgtacccggccgtggtcaacgacgaagggatgtacgctcacgccaaggaggtggccgagggcctccttggggagaagaacgtcagggtgggtccccaggtgatgggcgcggaggacttcgggttctacgcgcagaggatggcgggcgccttcttcaccatcggggtcggcaacgcgagcaccatggcgaccatccattccacccactcgcctcacttcgtcgtcgacgaggacgtgcttcccgtcggagctgcgttccatgctgctgtggcgattgaatatgtcaggaagaaccgtgcgtcgacctaaacgctaaactcaaataaatcagacggaacaaaacggcagtagtttgtcttaggtgtcactatatataatgcgagtatttacatc

SEQ ID NO: 16200 - protein, 443 aa, Zea mays subsp. mays
  peptide (1)..(443): Ceres Seq. ID no. 12386731
  misc_feature (56)..(436): Pfam Name: Peptidase family M20/M25/M40 Pfam Description: Peptidase family M20/M25/M40
  misc_feature (13)..(443): Homolog of NCBI NO: 34914096 NR Description: putative IAA-Ala hydrolase
  misc_feature (20)..(436): Homolog of NCBI NO: 887785 NR Description: ILR1
  misc_feature (20)..(436): Homolog of NCBI NO: 18129692 NR Description: IAA amidohydrolase [Arabidopsis suecica]
  misc_feature (20)..(436): Homolog of NCBI NO: 21554648 NR Description: IAA-amino acid hydrolase (ILR1) [Arabidopsis
  misc_feature (20)..(436): Homolog of NCBI NO: 15233011 NR Description: IAA-amino acid hydrolase (ILR1)
  misc_feature (45)..(439): Homolog of NCBI NO: 28376716 NR Description: putative  IAA amidohydrolase
  misc_feature (35)..(439): Homolog of NCBI NO: 28376718 NR Description: putative  IAA amidohydrolase
  misc_feature (15)..(442): Homolog of NCBI NO: 34900782 NR Description: putative IAA amidohydrolase
  misc_feature (5)..(439): Homolog of NCBI NO: 34900780 NR Description: putative IAA amidohydrolase
  misc_feature (11)..(442): Homolog of NCBI NO: 34900784 NR Description: IAA amidohydrolase-like protein~contains ESTs
MASSSSSSSSSSSSSSSSRFLLPLLLLCSHLSLASAEEAASAAADLLSEARAPGFAAWLRGVRRRIHQRPELAFQEFRTSELVRAELDAIGVPYRWPVAQTGVVATIAGAAAGPVVALRADMDALPVQELVDWEHKSQESGKMHACGHDVHTTMLLGAARILQDRKSDLMGTVKLVFQPAEEGQGGAYYVLQEGVLDDASAIFGLHVDPALPVGVVSSRPGPFAATSGRFLATVTGKGGHAAMPHESIDPVVAAATTVVSLQKIISREIDPLQGAVVSVTFLKGGEAYNVIPENVAFGGTMRSMTNEGLSYLKKRIKEIVEGQAAVHHCSASVDFMEDTMKPYPAVVNDEGMYAHAKEVAEGLLGEKNVRVGPQVMGAEDFGFYAQRMAGAFFTIGVGNASTMATIHSTHSPHFVVDEDVLPVGAAFHAAVAIEYVRKNRAST

SEQ ID NO: 16201 - protein, 322 aa, Zea mays subsp. mays
  peptide (1)..(322): Ceres Seq. ID no. 12386732
  misc_feature (1)..(315): Pfam Name: Peptidase family M20/M25/M40 Pfam Description: Peptidase family M20/M25/M40
  misc_feature (1)..(322): Homolog of NCBI NO: 34914096 NR Description: putative IAA-Ala hydrolase
  misc_feature (1)..(315): Homolog of NCBI NO: 887785 NR Description: ILR1
  misc_feature (1)..(315): Homolog of NCBI NO: 18129692 NR Description: IAA amidohydrolase [Arabidopsis suecica]
  misc_feature (1)..(315): Homolog of NCBI NO: 21554648 NR Description: IAA-amino acid hydrolase (ILR1) [Arabidopsis
  misc_feature (1)..(315): Homolog of NCBI NO: 15233011 NR Description: IAA-amino acid hydrolase (ILR1)
  misc_feature (1)..(318): Homolog of NCBI NO: 28376716 NR Description: putative  IAA amidohydrolase
  misc_feature (1)..(318): Homolog of NCBI NO: 28376718 NR Description: putative  IAA amidohydrolase
  misc_feature (1)..(321): Homolog of NCBI NO: 34900782 NR Description: putative IAA amidohydrolase
  misc_feature (1)..(318): Homolog of NCBI NO: 34900780 NR Description: putative IAA amidohydrolase
  misc_feature (1)..(321): Homolog of NCBI NO: 34900784 NR Description: IAA amidohydrolase-like protein~contains ESTs
MDALPVQELVDWEHKSQESGKMHACGHDVHTTMLLGAARILQDRKSDLMGTVKLVFQPAEEGQGGAYYVLQEGVLDDASAIFGLHVDPALPVGVVSSRPGPFAATSGRFLATVTGKGGHAAMPHESIDPVVAAATTVVSLQKIISREIDPLQGAVVSVTFLKGGEAYNVIPENVAFGGTMRSMTNEGLSYLKKRIKEIVEGQAAVHHCSASVDFMEDTMKPYPAVVNDEGMYAHAKEVAEGLLGEKNVRVGPQVMGAEDFGFYAQRMAGAFFTIGVGNASTMATIHSTHSPHFVVDEDVLPVGAAFHAAVAIEYVRKNRAST

SEQ ID NO: 16202 - protein, 301 aa, Zea mays subsp. mays
  peptide (1)..(301): Ceres Seq. ID no. 12386733
  misc_feature (1)..(294): Pfam Name: Peptidase family M20/M25/M40 Pfam Description: Peptidase family M20/M25/M40
  misc_feature (1)..(301): Homolog of NCBI NO: 34914096 NR Description: putative IAA-Ala hydrolase
  misc_feature (1)..(294): Homolog of NCBI NO: 887785 NR Description: ILR1
  misc_feature (1)..(294): Homolog of NCBI NO: 18129692 NR Description: IAA amidohydrolase [Arabidopsis suecica]
  misc_feature (1)..(294): Homolog of NCBI NO: 21554648 NR Description: IAA-amino acid hydrolase (ILR1) [Arabidopsis
  misc_feature (1)..(294): Homolog of NCBI NO: 15233011 NR Description: IAA-amino acid hydrolase (ILR1)
  misc_feature (1)..(297): Homolog of NCBI NO: 28376716 NR Description: putative  IAA amidohydrolase
  misc_feature (1)..(297): Homolog of NCBI NO: 28376718 NR Description: putative  IAA amidohydrolase
  misc_feature (1)..(300): Homolog of NCBI NO: 34900782 NR Description: putative IAA amidohydrolase
  misc_feature (1)..(297): Homolog of NCBI NO: 34900780 NR Description: putative IAA amidohydrolase
  misc_feature (1)..(300): Homolog of NCBI NO: 34900784 NR Description: IAA amidohydrolase-like protein~contains ESTs
MHACGHDVHTTMLLGAARILQDRKSDLMGTVKLVFQPAEEGQGGAYYVLQEGVLDDASAIFGLHVDPALPVGVVSSRPGPFAATSGRFLATVTGKGGHAAMPHESIDPVVAAATTVVSLQKIISREIDPLQGAVVSVTFLKGGEAYNVIPENVAFGGTMRSMTNEGLSYLKKRIKEIVEGQAAVHHCSASVDFMEDTMKPYPAVVNDEGMYAHAKEVAEGLLGEKNVRVGPQVMGAEDFGFYAQRMAGAFFTIGVGNASTMATIHSTHSPHFVVDEDVLPVGAAFHAAVAIEYVRKNRAST

SEQ ID NO: 16203 - DNA, 1476 bp, Zea mays subsp. mays
  misc_feature (1)..(1476): Ceres Seq. ID no. 12357049
  misc_feature: MA Experiment ID: 108527 Result: Up-regulated in Transcription
  misc_feature: MA Experiment 108527 PARAMETER Experiment Name: Zm_5mM_NO_P Parameter: Age (day) Value: 8
  misc_feature: MA Experiment 108527 PARAMETER Experiment Name: Zm_5mM_NO_P Parameter: Organism Value: Zea mays
  misc_feature: MA Experiment 108527 PARAMETER Experiment Name: Zm_5mM_NO_P Parameter: Plant Line Value: 35A19
  misc_feature: MA Experiment 108527 PARAMETER Experiment Name: Zm_5mM_NO_P Parameter: Timepoint (hr) Value: 6
  misc_feature: MA Experiment 108527 PARAMETER Experiment Name: Zm_5mM_NO_P Parameter: Tissue Value: Aerial
  misc_feature: MA Experiment 108527 PARAMETER Experiment Name: Zm_5mM_NO_P Parameter: Treatment Value: 5mM NO vs. No Treatment
  misc_feature: MA Experiment ID: 108535 Result: Down-regulated in Transcription
  misc_feature: MA Experiment 108535 PARAMETER Experiment Name: Zm_Meristem_P Parameter: Age (day) Value: 8
  misc_feature: MA Experiment 108535 PARAMETER Experiment Name: Zm_Meristem_P Parameter: Organism Value: Zea mays
  misc_feature: MA Experiment 108535 PARAMETER Experiment Name: Zm_Meristem_P Parameter: Plant Line Value: 35A19
  misc_feature: MA Experiment 108535 PARAMETER Experiment Name: Zm_Meristem_P Parameter: Tissue Value: Root Meristem vs. Above Root Meristem
  misc_feature: MA Experiment ID: 108543 Result: Up-regulated in Transcription
  misc_feature: MA Experiment ID: 108559 Result: Up-regulated in Transcription
  misc_feature: MA Experiment 108559 PARAMETER Experiment Name: Zm_5mM_NO_P Parameter: Age (day) Value: 8
  misc_feature: MA Experiment 108559 PARAMETER Experiment Name: Zm_5mM_NO_P Parameter: Organism Value: Zea mays
  misc_feature: MA Experiment 108559 PARAMETER Experiment Name: Zm_5mM_NO_P Parameter: Plant Line Value: 35A19
  misc_feature: MA Experiment 108559 PARAMETER Experiment Name: Zm_5mM_NO_P Parameter: Timepoint (hr) Value: 12
  misc_feature: MA Experiment 108559 PARAMETER Experiment Name: Zm_5mM_NO_P Parameter: Tissue Value: Aerial
  misc_feature: MA Experiment 108559 PARAMETER Experiment Name: Zm_5mM_NO_P Parameter: Treatment Value: 5mM NO vs. No Treatment
  misc_feature: MA Experiment ID: 20000492 Result: Down-regulated in Transcription
  misc_feature: MA Experiment 20000492 PARAMETER Experiment Name: Zm_Hybrid_Seed_Dev_P Parameter: DAP Value: 12
  misc_feature: MA Experiment 20000492 PARAMETER Experiment Name: Zm_Hybrid_Seed_Dev_P Parameter: Organism Value: Zea mays
  misc_feature: MA Experiment 20000492 PARAMETER Experiment Name: Zm_Hybrid_Seed_Dev_P Parameter: Plant Line Value: 35A19
  misc_feature: MA Experiment 20000492 PARAMETER Experiment Name: Zm_Hybrid_Seed_Dev_P Parameter: Tissue Value: Fert Kernel vs. Unfert Floret
  misc_feature: MA Experiment ID: 20000535 Result: Down-regulated in Transcription
  misc_feature: MA Experiment 20000535 PARAMETER Experiment Name: Zm_Hybrid_Seed_Dev_P Parameter: DAP Value: 30 vs. 12
  misc_feature: MA Experiment 20000535 PARAMETER Experiment Name: Zm_Hybrid_Seed_Dev_P Parameter: Organism Value: Zea mays
  misc_feature: MA Experiment 20000535 PARAMETER Experiment Name: Zm_Hybrid_Seed_Dev_P Parameter: Plant Line Value: 35A19
  misc_feature: MA Experiment 20000535 PARAMETER Experiment Name: Zm_Hybrid_Seed_Dev_P Parameter: Tissue Value: Embryo vs. Unfert Floret
  misc_feature: MA Experiment ID: 20001610 Result: Up-regulated in Transcription
  misc_feature: MA Experiment 20001610 PARAMETER Experiment Name: Zm_50ppm_KNO3_L-to-H_P Parameter: Age (day) Value: 19
  misc_feature: MA Experiment 20001610 PARAMETER Experiment Name: Zm_50ppm_KNO3_L-to-H_P Parameter: Organism Value: Zea mays
  misc_feature: MA Experiment 20001610 PARAMETER Experiment Name: Zm_50ppm_KNO3_L-to-H_P Parameter: Plant Line Value: 35A19
  misc_feature: MA Experiment 20001610 PARAMETER Experiment Name: Zm_50ppm_KNO3_L-to-H_P Parameter: Timepoint (hr) Value: 2
  misc_feature: MA Experiment 20001610 PARAMETER Experiment Name: Zm_50ppm_KNO3_L-to-H_P Parameter: Tissue Value: Roots
  misc_feature: MA Experiment 20001610 PARAMETER Experiment Name: Zm_50ppm_KNO3_L-to-H_P Parameter: Treatment Value: 50ppm KNO3 vs. 50ppm KCl
  misc_feature: MA Experiment ID: 20001612 Result: Up-regulated in Transcription
  misc_feature: MA Experiment 20001612 PARAMETER Experiment Name: Zm_50ppm_KNO3_L-to-H_P Parameter: Age (day) Value: 19
  misc_feature: MA Experiment 20001612 PARAMETER Experiment Name: Zm_50ppm_KNO3_L-to-H_P Parameter: Organism Value: Zea mays
  misc_feature: MA Experiment 20001612 PARAMETER Experiment Name: Zm_50ppm_KNO3_L-to-H_P Parameter: Plant Line Value: 35A19
  misc_feature: MA Experiment 20001612 PARAMETER Experiment Name: Zm_50ppm_KNO3_L-to-H_P Parameter: Timepoint (hr) Value: 8
  misc_feature: MA Experiment 20001612 PARAMETER Experiment Name: Zm_50ppm_KNO3_L-to-H_P Parameter: Tissue Value: Roots
  misc_feature: MA Experiment 20001612 PARAMETER Experiment Name: Zm_50ppm_KNO3_L-to-H_P Parameter: Treatment Value: 50ppm KNO3 vs. 50ppm KCl
ctcccgcggccattgcaggtcttgcagcaacgtctctctcctctgggcggtgggcgctcgatgttcttggctccttcacttggacttcgccccgtcggcgtccactgatcaattgatcatctgcaggtagataagctaccagcatctattttgcgtatctgaactccaaaaaggagagctcgaaactacagcaatgggttgctaccctgtgttctgtaggaagaagaactccagaagccaggttgtgcagcttgaccaagacatcccaatcgcgggcaacgtgaaaatctactcgtccaaggagctgaggaaagccacgggaaatttctgcccgggaagcaagcttggacagggttctttcggccgtgtatacctgggaaaactgaacaatggcgagaaagttgccatcaaggtgctctcctcagagtccaggcaagggacaaaggagttcttgaatgaactgagtgtcatatccaacataactcaccacaaccttgtcaaactgcatggctgctgcatcgacggaggccagaagatgctggtctacaactacgtggagaacaacagccttgcacaaacccttttcggtaattcccgcagcggcatcagatttgactggagaacaagggtggagatctgcgttggcgttgccgatgggctcacgtacctccacgaagaagtccgtccaccgatcgtccaccgcgacatcaaagcgagcaacatccttctcgacagaaatctgagacccaagatagcagactttgggctggcgaagttcttccctggcaacatgacacacatcagcaccagagttgcagggacgctaggatatcttgcgccagagtacgccatccgagggcagctgaccaagaaggccgacgtctacagctttggtgtactgctgctggagatcgtcagtggcagatgccacactgatcccacattacctcttgacgagcagttcctcctagaaaaggtctggacactctcggagtccgatgatcttgagagcatcatcgacggtaccatggagcgcgatttcgacaccgaggaagcacgtcggttgctgaaaataggtcttctgtgcacccaggatagccccaagatcaggccctccatgtcaatggttgccaagatgctgaagggtgagtgtgatgtgagtgaaaagatcatgcggcccagcctgatcacagacgtcatggacctgaaagtcaggacagtagagccgatccagttcagtttatccccatcgatgtcacctgcgctgagcagctcactggtgtccacacttgcattagctggtagcacagttgtagagagccgctgaaggaactagttaaaggaccaggttcctacaaaaaatggtttgttagaagcagcatgaattgtttttttgtttgtgttttagtacattgtaaggttgtcagtttgtatatataacatcctagtttgattatcgagattagagattttggc

SEQ ID NO: 16204 - protein, 377 aa, Zea mays subsp. mays
  peptide (1)..(377): Ceres Seq. ID no. 12357050
  misc_feature (21)..(334): Homolog of NCBI NO: 6056376 NR Description: Similar to serine/threonine kinases [Arabidopsis
  misc_feature (6)..(334): Homolog of NCBI NO: 38345599 NR Description: OSJNBa0093O08.1 [Oryza sativa (japonica
  misc_feature (22)..(334): Homolog of NCBI NO: 34901978 NR Description: putative receptor ser/thr protein
  misc_feature (3)..(334): Homolog of NCBI NO: 38344039 NR Description: OSJNBb0017I01.6 [Oryza sativa (japonica
  misc_feature (30)..(148): Homolog of NCBI NO: 5852099 NR Description: zwh22.1 [Oryza sativa (indica cultivar-group)]
  misc_feature (172)..(340): Homolog of NCBI NO: 5852099 NR Description: zwh22.1 [Oryza sativa (indica cultivar-group)]
  misc_feature (62)..(340): Homolog of NCBI NO: 5679843 NR Description: Putitive Ser/Thr protein kinase
  misc_feature (30)..(340): Homolog of NCBI NO: 38344329 NR Description: OSJNBa0058K23.11 [Oryza sativa (japonica
  misc_feature (1)..(341): Homolog of NCBI NO: 25287648 NR Description: hypothetical protein F19K19.4 [imported] -
  misc_feature (1)..(341): Homolog of NCBI NO: 18394385 NR Description: receptor-like serine/threonine kinase, putative
MGCYPVFCRKKNSRSQVVQLDQDIPIAGNVKIYSSKELRKATGNFCPGSKLGQGSFGRVYLGKLNNGEKVAIKVLSSESRQGTKEFLNELSVISNITHHNLVKLHGCCIDGGQKMLVYNYVENNSLAQTLFGNSRSGIRFDWRTRVEICVGVADGLTYLHEEVRPPIVHRDIKASNILLDRNLRPKIADFGLAKFFPGNMTHISTRVAGTLGYLAPEYAIRGQLTKKADVYSFGVLLLEIVSGRCHTDPTLPLDEQFLLEKVWTLSESDDLESIIDGTMERDFDTEEARRLLKIGLLCTQDSPKIRPSMSMVAKMLKGECDVSEKIMRPSLITDVMDLKVRTVEPIQFSLSPSMSPALSSSLVSTLALAGSTVVESR

SEQ ID NO: 16205 - protein, 263 aa, Zea mays subsp. mays
  peptide (1)..(263): Ceres Seq. ID no. 12357051
  misc_feature (1)..(220): Homolog of NCBI NO: 6056376 NR Description: Similar to serine/threonine kinases [Arabidopsis
  misc_feature (1)..(220): Homolog of NCBI NO: 38345599 NR Description: OSJNBa0093O08.1 [Oryza sativa (japonica
  misc_feature (1)..(220): Homolog of NCBI NO: 34901978 NR Description: putative receptor ser/thr protein
  misc_feature (1)..(220): Homolog of NCBI NO: 38344039 NR Description: OSJNBb0017I01.6 [Oryza sativa (japonica
  misc_feature (1)..(34): Homolog of NCBI NO: 5852099 NR Description: zwh22.1 [Oryza sativa (indica cultivar-group)]
  misc_feature (58)..(226): Homolog of NCBI NO: 5852099 NR Description: zwh22.1 [Oryza sativa (indica cultivar-group)]
  misc_feature (1)..(226): Homolog of NCBI NO: 5679843 NR Description: Putitive Ser/Thr protein kinase
  misc_feature (1)..(226): Homolog of NCBI NO: 38344329 NR Description: OSJNBa0058K23.11 [Oryza sativa (japonica
  misc_feature (1)..(227): Homolog of NCBI NO: 25287648 NR Description: hypothetical protein F19K19.4 [imported] -
  misc_feature (1)..(227): Homolog of NCBI NO: 18394385 NR Description: receptor-like serine/threonine kinase, putative
MLVYNYVENNSLAQTLFGNSRSGIRFDWRTRVEICVGVADGLTYLHEEVRPPIVHRDIKASNILLDRNLRPKIADFGLAKFFPGNMTHISTRVAGTLGYLAPEYAIRGQLTKKADVYSFGVLLLEIVSGRCHTDPTLPLDEQFLLEKVWTLSESDDLESIIDGTMERDFDTEEARRLLKIGLLCTQDSPKIRPSMSMVAKMLKGECDVSEKIMRPSLITDVMDLKVRTVEPIQFSLSPSMSPALSSSLVSTLALAGSTVVESR

SEQ ID NO: 16206 - DNA, 1266 bp, Zea mays subsp. mays; identical to SEQ ID NO: 8858
  misc_feature (1)..(1266): Ceres Seq. ID no. 12358430
  misc_feature: MA Experiment ID: 108556 Result: Down-regulated in Transcription
  misc_feature: MA Experiment 108556 PARAMETER Experiment Name: Zm_Drought_P Parameter: Age (day) Value: 9
  misc_feature: MA Experiment 108556 PARAMETER Experiment Name: Zm_Drought_P Parameter: Organism Value: Zea mays
  misc_feature: MA Experiment 108556 PARAMETER Experiment Name: Zm_Drought_P Parameter: Plant Line Value: 35A19
  misc_feature: MA Experiment 108556 PARAMETER Experiment Name: Zm_Drought_P Parameter: Timepoint (hr) Value: 24
  misc_feature: MA Experiment 108556 PARAMETER Experiment Name: Zm_Drought_P Parameter: Tissue Value: Aerial
  misc_feature: MA Experiment 108556 PARAMETER Experiment Name: Zm_Drought_P Parameter: Treatment Value: Drought vs. No Drought

SEQ ID NO: 16207 - protein, 352 aa, Zea mays subsp. mays; identical to SEQ ID NO: 8859
  peptide (1)..(352): Ceres Seq. ID no. 12358431
  misc_feature (28)..(352): Homolog of NCBI NO: 22671730 NR Description: phosphoribosyl pyrophosphate synthetase
  misc_feature (29)..(352): Homolog of NCBI NO: 15228027 NR Description: putative ribose phosphate pyrophosphokinase;
  misc_feature (40)..(352): Homolog of NCBI NO: 4902879 NR Description: phosphoribosyl pyrophosphate synthase isozyme 4
  misc_feature (38)..(352): Homolog of NCBI NO: 34910736 NR Description: putative phosphoribosyl pyrophosphate synthase
  misc_feature (20)..(352): Homolog of NCBI NO: 4902877 NR Description: phosphoribosyl pyrophosphate synthase isozyme 3
  misc_feature (37)..(352): Homolog of NCBI NO: 15220191 NR Description: phosphoribosyl diphosphate synthase; protein id: supported by cDNA: gi_16604385, supported by cDNA: gi_19699209 thaliana] >gi|16604386|gb|AAL24199.1| At1g10700/F20B24.13
  misc_feature (37)..(352): Homolog of NCBI NO: 25529012 NR Description: ribose-phosphate diphosphokinase (EC 2.7.6.1)
  misc_feature (37)..(352): Homolog of NCBI NO: 25402614 NR Description: hypothetical protein [imported] - Arabidopsis >gi|4874278|gb|AAD31343.1|AC007354_16 Strong similarity to
  misc_feature (37)..(210): Homolog of NCBI NO: 6573738 NR Description: F20B24.13 [Arabidopsis thaliana]
  misc_feature (210)..(303): Homolog of NCBI NO: 6573738 NR Description: F20B24.13 [Arabidopsis thaliana]

SEQ ID NO: 16208 - protein, 325 aa, Zea mays subsp. mays; identical to SEQ ID NO: 8860
  peptide (1)..(325): Ceres Seq. ID no. 12358432
  misc_feature (1)..(325): Homolog of NCBI NO: 22671730 NR Description: phosphoribosyl pyrophosphate synthetase
  misc_feature (2)..(325): Homolog of NCBI NO: 15228027 NR Description: putative ribose phosphate pyrophosphokinase;
  misc_feature (13)..(325): Homolog of NCBI NO: 4902879 NR Description: phosphoribosyl pyrophosphate synthase isozyme 4
  misc_feature (11)..(325): Homolog of NCBI NO: 34910736 NR Description: putative phosphoribosyl pyrophosphate synthase
  misc_feature (1)..(325): Homolog of NCBI NO: 4902877 NR Description: phosphoribosyl pyrophosphate synthase isozyme 3
  misc_feature (10)..(325): Homolog of NCBI NO: 15220191 NR Description: phosphoribosyl diphosphate synthase; protein id: supported by cDNA: gi_16604385, supported by cDNA: gi_19699209 thaliana] >gi|16604386|gb|AAL24199.1| At1g10700/F20B24.13
  misc_feature (10)..(325): Homolog of NCBI NO: 25529012 NR Description: ribose-phosphate diphosphokinase (EC 2.7.6.1)
  misc_feature (10)..(325): Homolog of NCBI NO: 25402614 NR Description: hypothetical protein [imported] - Arabidopsis >gi|4874278|gb|AAD31343.1|AC007354_16 Strong similarity to
  misc_feature (10)..(183): Homolog of NCBI NO: 6573738 NR Description: F20B24.13 [Arabidopsis thaliana]
  misc_feature (183)..(276): Homolog of NCBI NO: 6573738 NR Description: F20B24.13 [Arabidopsis thaliana]

SEQ ID NO: 16209 - protein, 196 aa, Zea mays subsp. mays; identical to SEQ ID NO: 8861
  peptide (1)..(196): Ceres Seq. ID no. 12358433
  misc_feature (1)..(196): Homolog of NCBI NO: 15228027 NR Description: putative ribose phosphate pyrophosphokinase;
  misc_feature (1)..(196): Homolog of NCBI NO: 4902879 NR Description: phosphoribosyl pyrophosphate synthase isozyme 4
  misc_feature (1)..(196): Homolog of NCBI NO: 34910736 NR Description: putative phosphoribosyl pyrophosphate synthase
  misc_feature (1)..(196): Homolog of NCBI NO: 4902877 NR Description: phosphoribosyl pyrophosphate synthase isozyme 3
  misc_feature (1)..(196): Homolog of NCBI NO: 15220191 NR Description: phosphoribosyl diphosphate synthase; protein id: supported by cDNA: gi_16604385, supported by cDNA: gi_19699209 thaliana] >gi|16604386|gb|AAL24199.1| At1g10700/F20B24.13
  misc_feature (1)..(196): Homolog of NCBI NO: 25529012 NR Description: ribose-phosphate diphosphokinase (EC 2.7.6.1)
  misc_feature (1)..(196): Homolog of NCBI NO: 25402614 NR Description: hypothetical protein [imported] - Arabidopsis >gi|4874278|gb|AAD31343.1|AC007354_16 Strong similarity to
  misc_feature (1)..(54): Homolog of NCBI NO: 6573738 NR Description: F20B24.13 [Arabidopsis thaliana]
  misc_feature (54)..(147): Homolog of NCBI NO: 6573738 NR Description: F20B24.13 [Arabidopsis thaliana]
  misc_feature (1)..(196): Homolog of NCBI NO: 22671730 NR Description: phosphoribosyl pyrophosphate synthetase

SEQ ID NO: 16210 - DNA, 1783 bp, Zea mays subsp. mays
  misc_feature (1)..(1783): Ceres Seq. ID no. 12376532
  misc_feature: MA Experiment ID: 108536 Result: Down-regulated in Transcription
  misc_feature: MA Experiment 108536 PARAMETER Experiment Name: Zm_Meristem_P Parameter: Age (day) Value: 8
  misc_feature: MA Experiment 108536 PARAMETER Experiment Name: Zm_Meristem_P Parameter: Organism Value: Zea mays
  misc_feature: MA Experiment 108536 PARAMETER Experiment Name: Zm_Meristem_P Parameter: Plant Line Value: 35A19
  misc_feature: MA Experiment 108536 PARAMETER Experiment Name: Zm_Meristem_P Parameter: Tissue Value: Shoot Meristem vs. Above Shoot Meristem
  misc_feature: MA Experiment ID: 108687 Result: Up-regulated in Transcription
  misc_feature: MA Experiment 108687 PARAMETER Experiment Name: Zm_Embryos-Flowers__P Parameter: Tissue Value: Embryo vs. Aerial+
aagagctaccgcttcttctcgcagctcgaggcgctgcacgcctcggcgccgcctccgccgcccccgccctcgggcatgaccacggtgcaagctagccctcatcagccgatggaaatggcatggacggcgggccctacggtgctgggccctgccgccgtcgccggcctgccagacctcagcttctcgtcgatgtccgagtccgactcagagtacgactcggacgacgactctggtgcgggggaggagggcctcagcgggggcgagtgcgacagggagatgatggccatcttcgaggggatgatgaagcagttcacggagaagcaagaccgccatgcagcgcgtgttcctggagacgctggagcggtgcgaggcagagcgcacggcgcgcgaggaggcgtggcggcgccaggaggtcgcccgcatgaaccgcgagcgcgagcagctcgccagggagcgcgccgccgcggcctcccgcgacgccgcgctgatcgcgttcctccagcgtgtcggcggggggcagggcgagcccgcgcggctccctccgcacggcgccggcgtcgtgcccgcgccgccgatgccggactgcgcccctccgtcgcctcggcgcgacgcggcggccgcctcgcttcagcagctggtgcccgcaccgccgaaggcggtggaggccttggcgcgcgctggaggagagggcggcgggtccacgccgtcgcggtggcccaaggaggaagtggaggcgctgatccagatgcggaacgagaagggcgagaagtaccacgacgcgggggccaaggggcccctttgggaggacatcgccgccgcgatgcgggggatcgggtacagccggagcgccaagcggtgcaaggagaagtgggagaacatcaacaagtactacaagaaggtgaaggagagcaacaagaggcgccccgaggactccaagacctgtccttacttccaccagctcgacgccatgtaccgcaacaaacaccgcggcggcacaggcggcagaacggcacccagagcgaacatggcctccgccgtcgccgtcgccgtcgcagcaaacgtgcaggacaacccgagcaagcgcgagctcgagggaaagagcagcaacgatgccgacaaccggaagaatggtgaacaggggaacgtgcttacttctcccgctagcggcgatacagcaccaggtggcgccgccaaaaacaagacggcagagggcaatgtggatgatacagatgtgcagcaccagcagcggttcagtgccgacgagacggacagcgacgacgaggacatgtacatggcaagaaactacacagtctacactgaagaaggcaacgacgaagacaaaatgaagtacaagatgggcgtccaggagcgtgatgtgatcgggagcagcgggcaacgtgcttgcgccaccaccaccagcagcagcagcagccacggctgcggcaccgacgagttcagctgccccaacgagcagcaccttccttgccgttcagtagagggcaatgctgcaggaggaggcccggtgccagccgatcagcaccagtgcatcaccaccttttgcggcccataatcaccgagtatacttgccctgcatctgaaccatccgaataccatttattgatttgttctgtaataagtaccagatcatggaaacctcaaaaggtaaaaagaagacaatgaagaacagaggaggcagcagagacgcctaaacagaaagttcttttcttttttctctcattataggtcatgttatactttacctattgctaacaattgtacattc

SEQ ID NO: 16211 - protein, 412 aa, Zea mays subsp. mays
  peptide (1)..(412): Ceres Seq. ID no. 12376533
  misc_feature (147)..(184): Pfam Name: Myb-like DNA-binding domain Pfam Description: Myb-like DNA-binding domain
  misc_feature (1)..(90): Homolog of NCBI NO: 27476085 NR Description: Hypothetical protein [Oryza sativa (japonica
  misc_feature (66)..(334): Homolog of NCBI NO: 27476085 NR Description: Hypothetical protein [Oryza sativa (japonica
  misc_feature (63)..(375): Homolog of NCBI NO: 283004 NR Description: DNA-binding protein Gt-2 - rice
  misc_feature (63)..(375): Homolog of NCBI NO: 38344985 NR Description: OSJNBa0011L07.15 [Oryza sativa (japonica
MQRVFLETLERCEAERTAREEAWRRQEVARMNREREQLARERAAAASRDAALIAFLQRVGGGQGEPARLPPHGAGVVPAPPMPDCAPPSPRRDAAAASLQQLVPAPPKAVEALARAGGEGGGSTPSRWPKEEVEALIQMRNEKGEKYHDAGAKGPLWEDIAAAMRGIGYSRSAKRCKEKWENINKYYKKVKESNKRRPEDSKTCPYFHQLDAMYRNKHRGGTGGRTAPRANMASAVAVAVAANVQDNPSKRELEGKSSNDADNRKNGEQGNVLTSPASGDTAPGGAAKNKTAEGNVDDTDVQHQQRFSADETDSDDEDMYMARNYTVYTEEGNDEDKMKYKMGVQERDVIGSSGQRACATTTSSSSSHGCGTDEFSCPNEQHLPCRSVEGNAAGGGPVPADQHQCITTFCGP

SEQ ID NO: 16212 - protein, 382 aa, Zea mays subsp. mays
  peptide (1)..(382): Ceres Seq. ID no. 12376534
  misc_feature (117)..(154): Pfam Name: Myb-like DNA-binding domain Pfam Description: Myb-like DNA-binding domain
  misc_feature (1)..(60): Homolog of NCBI NO: 27476085 NR Description: Hypothetical protein [Oryza sativa (japonica
  misc_feature (36)..(304): Homolog of NCBI NO: 27476085 NR Description: Hypothetical protein [Oryza sativa (japonica
  misc_feature (33)..(345): Homolog of NCBI NO: 283004 NR Description: DNA-binding protein Gt-2 - rice
  misc_feature (33)..(345): Homolog of NCBI NO: 38344985 NR Description: OSJNBa0011L07.15 [Oryza sativa (japonica
MNREREQLARERAAAASRDAALIAFLQRVGGGQGEPARLPPHGAGVVPAPPMPDCAPPSPRRDAAAASLQQLVPAPPKAVEALARAGGEGGGSTPSRWPKEEVEALIQMRNEKGEKYHDAGAKGPLWEDIAAAMRGIGYSRSAKRCKEKWENINKYYKKVKESNKRRPEDSKTCPYFHQLDAMYRNKHRGGTGGRTAPRANMASAVAVAVAANVQDNPSKRELEGKSSNDADNRKNGEQGNVLTSPASGDTAPGGAAKNKTAEGNVDDTDVQHQQRFSADETDSDDEDMYMARNYTVYTEEGNDEDKMKYKMGVQERDVIGSSGQRACATTTSSSSSHGCGTDEFSCPNEQHLPCRSVEGNAAGGGPVPADQHQCITTFCGP

SEQ ID NO: 16213 - protein, 377 aa, Zea mays subsp. mays
  peptide (1)..(377): Ceres Seq. ID no. 12376535
  misc_feature (42)..(278): Homolog of NCBI NO: 40787930 NR Description: BICP0 immediate-early transactivator protein with
  misc_feature (1)..(40): Homolog of NCBI NO: 22655272 NR Description: DNA-binding factor, putative [Arabidopsis
  misc_feature (1)..(99): Homolog of NCBI NO: 37536070 NR Description: putative transcription factor
  misc_feature (1)..(57): Homolog of NCBI NO: 38344985 NR Description: OSJNBa0011L07.15 [Oryza sativa (japonica
  misc_feature (1)..(57): Homolog of NCBI NO: 283004 NR Description: DNA-binding protein Gt-2 - rice
  misc_feature (7)..(91): Homolog of NCBI NO: 283004 NR Description: DNA-binding protein Gt-2 - rice
  misc_feature (7)..(114): Homolog of NCBI NO: 38344985 NR Description: OSJNBa0011L07.15 [Oryza sativa (japonica
KSYRFFSQLEALHASAPPPPPPPSGMTTVQASPHQPMEMAWTAGPTVLGPAAVAGLPDLSFSSMSESDSEYDSDDDSGAGEEGLSGGECDREMMAIFEGMMKQFTEKQDRHAARVPGDAGAVRGRAHGARGGVAAPGGRPHEPRARAARQGARRRGLPRRRADRVPPACRRGAGRARAAPSARRRRRARAADAGLRPSVASARRGGRLASAAGARTAEGGGGLGARWRRGRRVHAVAVAQGGSGGADPDAEREGREVPRRGGQGAPLGGHRRRDAGDRVQPERQAVQGEVGEHQQVLQEGEGEQQEAPRGLQDLSLLPPARRHVPQQTPRRHRRQNGTQSEHGLRRRRRRRSKRAGQPEQARARGKEQQRCRQPEEW

SEQ ID NO: 16214 - DNA, 1740 bp, Zea mays subsp. mays
  misc_feature (1)..(1740): Ceres Seq. ID no. 12372698
  misc_feature: MA Experiment ID: 108523 Result: Down-regulated in Transcription
  misc_feature: MA Experiment 108523 PARAMETER Experiment Name: Zm_42deg_Heat_P Parameter: Age (day) Value: 8
  misc_feature: MA Experiment 108523 PARAMETER Experiment Name: Zm_42deg_Heat_P Parameter: Organism Value: Zea mays
  misc_feature: MA Experiment 108523 PARAMETER Experiment Name: Zm_42deg_Heat_P Parameter: Plant Line Value: 35A19
  misc_feature: MA Experiment 108523 PARAMETER Experiment Name: Zm_42deg_Heat_P Parameter: Temperature (deg C) Value: 42 vs. 22
  misc_feature: MA Experiment 108523 PARAMETER Experiment Name: Zm_42deg_Heat_P Parameter: Timepoint (hr) Value: 6
  misc_feature: MA Experiment 108523 PARAMETER Experiment Name: Zm_42deg_Heat_P Parameter: Tissue Value: Aerial
  misc_feature: MA Experiment ID: 108535 Result: Up-regulated in Transcription
  misc_feature: MA Experiment 108535 PARAMETER Experiment Name: Zm_Meristem_P Parameter: Age (day) Value: 8
  misc_feature: MA Experiment 108535 PARAMETER Experiment Name: Zm_Meristem_P Parameter: Organism Value: Zea mays
  misc_feature: MA Experiment 108535 PARAMETER Experiment Name: Zm_Meristem_P Parameter: Plant Line Value: 35A19
  misc_feature: MA Experiment 108535 PARAMETER Experiment Name: Zm_Meristem_P Parameter: Tissue Value: Root Meristem vs. Above Root Meristem
  misc_feature: MA Experiment ID: 108544 Result: Down-regulated in Transcription
  misc_feature: MA Experiment ID: 108547 Result: Down-regulated in Transcription
  misc_feature: MA Experiment 108547 PARAMETER Experiment Name: Zm_Imbibed_Seeds_P Parameter: Age (day) Value: 4 vs. 2
  misc_feature: MA Experiment 108547 PARAMETER Experiment Name: Zm_Imbibed_Seeds_P Parameter: Organism Value: Zea mays
  misc_feature: MA Experiment 108547 PARAMETER Experiment Name: Zm_Imbibed_Seeds_P Parameter: Plant Line Value: 35A19
  misc_feature: MA Experiment 108547 PARAMETER Experiment Name: Zm_Imbibed_Seeds_P Parameter: Tissue Value: Aerial vs. Embryo
gcaacgccgttgcttcaactcgactccagcatccctcgtccccgcatcaccgcgccgccgacactccgctcgctttcgctcccgagacccgggcctgccgagccgccgccatggacgaggagtacgacgtgatcgttctgggcacggggctcaaggagtgcatcctcagcggtctcctctctgtcgacggcctcaaggttctacacatggatagaaatgattactacggaggagattccacctccctaaacctgaaccagctctggaagaggtttaggggggaagacaagccaccggcacatctaggtgcaagcagagattacaatgtagacatggttccaaagtttatgatggcaaacgggactttggttcgcactctcattcacactgatgtgacaaaatatttgtcattcaaagctgttgatggaagctatgtcttcagcaaacggaagattcacaaggttcctgccaccgatatggaggctctaaaatctcctttgatgggtctatttgagaaacgtagagcaaggaacttttttgtttacgtccaaaattacaatgaagctgatccagtgacacatcaggggttggacctcacaaggattacaactagagaattgattttgaaacatggattgagtgatgacactgtggattttattggccatgcactcgctctgcacagggatgatcgttacctaaatgaacctgcccttgatactgtaaaaaggatgaagctttacgctgagtctcttgcacgttttcaaggaggctcgccttatatttatccattatatgggttgggtgagctgccacaggcttttgcacgtctaagtgctgtttatggtggtacatatatgttaaataaaccagagtgcaaggttgaatttgatatcgaagggaaagtgtgtggtgttacttcagaaggtgaaacggcgaaatgcaaaaaggttgtctgtgatccttcttacttgcctagcaaggtaaggaagattggaaaagttgcacgtgcaatcgctattatgagccacccaattccaaacacaaatgagtcccactcgattcagattattttgccgcagaagcaacttgggcgcaagtcagacatgtatgttttctgttgctcatatacacataatgttgcgccaaaagggaagttcattgcatttgtgtctgcggaagctgagaccgataatccacagtccgaactaaagcctggaattgatctacttggtcaagtagatgaactgttttttgatatgtatgacagatacaaacctgtcaatgaaccatctcttgataattgctttgtttcaatgagttatgatgctactacacactttgagacaactgtgacagatgttctcagtatgtacacagcaattactggaaagaccgttgatctcagtgtggacctgagcgctgccagcgcagctgaagaatactagagattttcctattagagataccatactctaaagaagaacggtgttaacacaggccctgcctggtggcttgccaggtttagatctatgctgcagctgcagccaattaaacggacagaacatatcaccctatagcatttacatggcgtttaaacacaagaccgtttaggatgatggtggtggttcctttgttccttgcattattgatcggatggttaacttttaactgtgctcacgtttgctacaacctgctcgttcttgtcagtgatgcattgtgatcgcttttcagatatgc

SEQ ID NO: 16215 - protein, 481 aa, Zea mays subsp. mays
  peptide (1)..(481): Ceres Seq. ID no. 12372699
  misc_feature (37)..(474): Pfam Name: GDP dissociation inhibitor Pfam Description: GDP dissociation inhibitor
  misc_feature (37)..(480): Homolog of NCBI NO: 21592535 NR Description: GDP dissociation inhibitor [Arabidopsis thaliana]
  misc_feature (37)..(480): Homolog of NCBI NO: 17473582 NR Description: GDP dissociation inhibitor [Arabidopsis thaliana]
  misc_feature (37)..(480): Homolog of NCBI NO: 33146460 NR Description: putative GDP dissociation inhibitor
  misc_feature (37)..(480): Homolog of NCBI NO: 1550740 NR Description: GDP-associated inhibitor [Arabidopsis thaliana]
  misc_feature (37)..(480): Homolog of NCBI NO: 15232210 NR Description: Rab GDP dissociation inhibitor
  misc_feature (37)..(480): Homolog of NCBI NO: 15224814 NR Description: GDP dissociation inhibitor
  misc_feature (37)..(480): Homolog of NCBI NO: 3175990 NR Description: GDP dissociation inhibitor [Cicer arietinum]
  misc_feature (37)..(480): Homolog of NCBI NO: 7489133 NR Description: GDP dissociation inhibitor - common tobacco
  misc_feature (37)..(481): Homolog of NCBI NO: 7489479 NR Description: GDP dissociation inhibitor protein - rice
  misc_feature (37)..(481): Homolog of NCBI NO: 7489478 NR Description: GDP dissociation inhibitor protein - rice
NAVASTRLQHPSSPHHRAADTPLAFAPETRACRAAAMDEEYDVIVLGTGLKECILSGLLSVDGLKVLHMDRNDYYGGDSTSLNLNQLWKRFRGEDKPPAHLGASRDYNVDMVPKFMMANGTLVRTLIHTDVTKYLSFKAVDGSYVFSKRKIHKVPATDMEALKSPLMGLFEKRRARNFFVYVQNYNEADPVTHQGLDLTRITTRELILKHGLSDDTVDFIGHALALHRDDRYLNEPALDTVKRMKLYAESLARFQGGSPYIYPLYGLGELPQAFARLSAVYGGTYMLNKPECKVEFDIEGKVCGVTSEGETAKCKKVVCDPSYLPSKVRKIGKVARAIAIMSHPIPNTNESHSIQIILPQKQLGRKSDMYVFCCSYTHNVAPKGKFIAFVSAEAETDNPQSELKPGIDLLGQVDELFFDMYDRYKPVNEPSLDNCFVSMSYDATTHFETTVTDVLSMYTAITGKTVDLSVDLSAASAAEEY

SEQ ID NO: 16216 - protein, 445 aa, Zea mays subsp. mays
  peptide (1)..(445): Ceres Seq. ID no. 12372700
  misc_feature (1)..(438): Pfam Name: GDP dissociation inhibitor Pfam Description: GDP dissociation inhibitor
  misc_feature (1)..(444): Homolog of NCBI NO: 21592535 NR Description: GDP dissociation inhibitor [Arabidopsis thaliana]
  misc_feature (1)..(444): Homolog of NCBI NO: 17473582 NR Description: GDP dissociation inhibitor [Arabidopsis thaliana]
  misc_feature (1)..(444): Homolog of NCBI NO: 33146460 NR Description: putative GDP dissociation inhibitor
  misc_feature (1)..(444): Homolog of NCBI NO: 1550740 NR Description: GDP-associated inhibitor [Arabidopsis thaliana]
  misc_feature (1)..(444): Homolog of NCBI NO: 15232210 NR Description: Rab GDP dissociation inhibitor
  misc_feature (1)..(444): Homolog of NCBI NO: 15224814 NR Description: GDP dissociation inhibitor
  misc_feature (1)..(444): Homolog of NCBI NO: 3175990 NR Description: GDP dissociation inhibitor [Cicer arietinum]
  misc_feature (1)..(444): Homolog of NCBI NO: 7489133 NR Description: GDP dissociation inhibitor - common tobacco
  misc_feature (1)..(445): Homolog of NCBI NO: 7489479 NR Description: GDP dissociation inhibitor protein - rice
  misc_feature (1)..(445): Homolog of NCBI NO: 7489478 NR Description: GDP dissociation inhibitor protein - rice
MDEEYDVIVLGTGLKECILSGLLSVDGLKVLHMDRNDYYGGDSTSLNLNQLWKRFRGEDKPPAHLGASRDYNVDMVPKFMMANGTLVRTLIHTDVTKYLSFKAVDGSYVFSKRKIHKVPATDMEALKSPLMGLFEKRRARNFFVYVQNYNEADPVTHQGLDLTRITTRELILKHGLSDDTVDFIGHALALHRDDRYLNEPALDTVKRMKLYAESLARFQGGSPYIYPLYGLGELPQAFARLSAVYGGTYMLNKPECKVEFDIEGKVCGVTSEGETAKCKKVVCDPSYLPSKVRKIGKVARAIAIMSHPIPNTNESHSIQIILPQKQLGRKSDMYVFCCSYTHNVAPKGKFIAFVSAEAETDNPQSELKPGIDLLGQVDELFFDMYDRYKPVNEPSLDNCFVSMSYDATTHFETTVTDVLSMYTAITGKTVDLSVDLSAASAAEEY

SEQ ID NO: 16217 - protein, 413 aa, Zea mays subsp. mays
  peptide (1)..(413): Ceres Seq. ID no. 12372701
  misc_feature (1)..(406): Pfam Name: GDP dissociation inhibitor Pfam Description: GDP dissociation inhibitor
  misc_feature (1)..(412): Homolog of NCBI NO: 21592535 NR Description: GDP dissociation inhibitor [Arabidopsis thaliana]
  misc_feature (1)..(412): Homolog of NCBI NO: 17473582 NR Description: GDP dissociation inhibitor [Arabidopsis thaliana]
  misc_feature (1)..(412): Homolog of NCBI NO: 33146460 NR Description: putative GDP dissociation inhibitor
  misc_feature (1)..(412): Homolog of NCBI NO: 1550740 NR Description: GDP-associated inhibitor [Arabidopsis thaliana]
  misc_feature (1)..(412): Homolog of NCBI NO: 15232210 NR Description: Rab GDP dissociation inhibitor
  misc_feature (1)..(412): Homolog of NCBI NO: 15224814 NR Description: GDP dissociation inhibitor
  misc_feature (1)..(412): Homolog of NCBI NO: 3175990 NR Description: GDP dissociation inhibitor [Cicer arietinum]
  misc_feature (1)..(412): Homolog of NCBI NO: 7489133 NR Description: GDP dissociation inhibitor - common tobacco
  misc_feature (1)..(413): Homolog of NCBI NO: 7489479 NR Description: GDP dissociation inhibitor protein - rice
  misc_feature (1)..(413): Homolog of NCBI NO: 7489478 NR Description: GDP dissociation inhibitor protein - rice
MDRNDYYGGDSTSLNLNQLWKRFRGEDKPPAHLGASRDYNVDMVPKFMMANGTLVRTLIHTDVTKYLSFKAVDGSYVFSKRKIHKVPATDMEALKSPLMGLFEKRRARNFFVYVQNYNEADPVTHQGLDLTRITTRELILKHGLSDDTVDFIGHALALHRDDRYLNEPALDTVKRMKLYAESLARFQGGSPYIYPLYGLGELPQAFARLSAVYGGTYMLNKPECKVEFDIEGKVCGVTSEGETAKCKKVVCDPSYLPSKVRKIGKVARAIAIMSHPIPNTNESHSIQIILPQKQLGRKSDMYVFCCSYTHNVAPKGKFIAFVSAEAETDNPQSELKPGIDLLGQVDELFFDMYDRYKPVNEPSLDNCFVSMSYDATTHFETTVTDVLSMYTAITGKTVDLSVDLSAASAAEEY

SEQ ID NO: 16218 - DNA, 494 bp, Zea mays subsp. mays
  misc_feature (1)..(494): Ceres Seq. ID no. 3465404
  misc_feature: MA Experiment ID: 108527 Result: Up-regulated in Transcription
  misc_feature: MA Experiment 108527 PARAMETER Experiment Name: Zm_5mM_NO_P Parameter: Age (day) Value: 8
  misc_feature: MA Experiment 108527 PARAMETER Experiment Name: Zm_5mM_NO_P Parameter: Organism Value: Zea mays
  misc_feature: MA Experiment 108527 PARAMETER Experiment Name: Zm_5mM_NO_P Parameter: Plant Line Value: 35A19
  misc_feature: MA Experiment 108527 PARAMETER Experiment Name: Zm_5mM_NO_P Parameter: Timepoint (hr) Value: 6
  misc_feature: MA Experiment 108527 PARAMETER Experiment Name: Zm_5mM_NO_P Parameter: Tissue Value: Aerial
  misc_feature: MA Experiment 108527 PARAMETER Experiment Name: Zm_5mM_NO_P Parameter: Treatment Value: 5mM NO vs. No Treatment
  misc_feature: MA Experiment ID: 108556 Result: Up-regulated in Transcription
  misc_feature: MA Experiment 108556 PARAMETER Experiment Name: Zm_Drought_P Parameter: Age (day) Value: 9
  misc_feature: MA Experiment 108556 PARAMETER Experiment Name: Zm_Drought_P Parameter: Organism Value: Zea mays
  misc_feature: MA Experiment 108556 PARAMETER Experiment Name: Zm_Drought_P Parameter: Plant Line Value: 35A19
  misc_feature: MA Experiment 108556 PARAMETER Experiment Name: Zm_Drought_P Parameter: Timepoint (hr) Value: 24
  misc_feature: MA Experiment 108556 PARAMETER Experiment Name: Zm_Drought_P Parameter: Tissue Value: Aerial
  misc_feature: MA Experiment 108556 PARAMETER Experiment Name: Zm_Drought_P Parameter: Treatment Value: Drought vs. No Drought
  misc_feature: MA Experiment ID: 108559 Result: Up-regulated in Transcription
  misc_feature: MA Experiment 108559 PARAMETER Experiment Name: Zm_5mM_NO_P Parameter: Age (day) Value: 8
  misc_feature: MA Experiment 108559 PARAMETER Experiment Name: Zm_5mM_NO_P Parameter: Organism Value: Zea mays
  misc_feature: MA Experiment 108559 PARAMETER Experiment Name: Zm_5mM_NO_P Parameter: Plant Line Value: 35A19
  misc_feature: MA Experiment 108559 PARAMETER Experiment Name: Zm_5mM_NO_P Parameter: Timepoint (hr) Value: 12
  misc_feature: MA Experiment 108559 PARAMETER Experiment Name: Zm_5mM_NO_P Parameter: Tissue Value: Aerial
  misc_feature: MA Experiment 108559 PARAMETER Experiment Name: Zm_5mM_NO_P Parameter: Treatment Value: 5mM NO vs. No Treatment
  misc_feature: MA Experiment ID: 108597 Result: Up-regulated in Transcription
  misc_feature: MA Experiment 108597 PARAMETER Experiment Name: Zm_100uM_ABA_P Parameter: Age (day) Value: 9
  misc_feature: MA Experiment 108597 PARAMETER Experiment Name: Zm_100uM_ABA_P Parameter: Organism Value: Zea mays
  misc_feature: MA Experiment 108597 PARAMETER Experiment Name: Zm_100uM_ABA_P Parameter: Plant Line Value: 35A19
  misc_feature: MA Experiment 108597 PARAMETER Experiment Name: Zm_100uM_ABA_P Parameter: Timepoint (hr) Value: 24
  misc_feature: MA Experiment 108597 PARAMETER Experiment Name: Zm_100uM_ABA_P Parameter: Tissue Value: Aerial
  misc_feature: MA Experiment 108597 PARAMETER Experiment Name: Zm_100uM_ABA_P Parameter: Treatment Value: 100uM ABA vs. No Treatment
  misc_feature: MA Experiment ID: 20000477 Result: Up-regulated in Transcription
  misc_feature: MA Experiment 20000477 PARAMETER Experiment Name: Zm_5mM_SA_P Parameter: Age (day) Value: 10
  misc_feature: MA Experiment 20000477 PARAMETER Experiment Name: Zm_5mM_SA_P Parameter: Organism Value: Zea mays
  misc_feature: MA Experiment 20000477 PARAMETER Experiment Name: Zm_5mM_SA_P Parameter: Plant Line Value: 35A19
  misc_feature: MA Experiment 20000477 PARAMETER Experiment Name: Zm_5mM_SA_P Parameter: Timepoint (hr) Value: 48
  misc_feature: MA Experiment 20000477 PARAMETER Experiment Name: Zm_5mM_SA_P Parameter: Tissue Value: Aerial
  misc_feature: MA Experiment 20000477 PARAMETER Experiment Name: Zm_5mM_SA_P Parameter: Treatment Value: 5mM SA vs. No Treatment
  misc_feature: MA Experiment ID: 20000480 Result: Up-regulated in Transcription
  misc_feature: MA Experiment 20000480 PARAMETER Experiment Name: Zm_Drought_P Parameter: Age (day) Value: 11
  misc_feature: MA Experiment 20000480 PARAMETER Experiment Name: Zm_Drought_P Parameter: Organism Value: Zea mays
  misc_feature: MA Experiment 20000480 PARAMETER Experiment Name: Zm_Drought_P Parameter: Plant Line Value: 35A19
  misc_feature: MA Experiment 20000480 PARAMETER Experiment Name: Zm_Drought_P Parameter: Timepoint (hr) Value: 72
  misc_feature: MA Experiment 20000480 PARAMETER Experiment Name: Zm_Drought_P Parameter: Tissue Value: Aerial
  misc_feature: MA Experiment 20000480 PARAMETER Experiment Name: Zm_Drought_P Parameter: Treatment Value: Drought vs. No Drought
  misc_feature: MA Experiment ID: 20000535 Result: Up-regulated in Transcription
  misc_feature: MA Experiment 20000535 PARAMETER Experiment Name: Zm_Hybrid_Seed_Dev_P Parameter: DAP Value: 30 vs. 12
  misc_feature: MA Experiment 20000535 PARAMETER Experiment Name: Zm_Hybrid_Seed_Dev_P Parameter: Organism Value: Zea mays
  misc_feature: MA Experiment 20000535 PARAMETER Experiment Name: Zm_Hybrid_Seed_Dev_P Parameter: Plant Line Value: 35A19
  misc_feature: MA Experiment 20000535 PARAMETER Experiment Name: Zm_Hybrid_Seed_Dev_P Parameter: Tissue Value: Embryo vs. Unfert Floret
taatcgaaaactcctttttttctctcatccgaattcccaggcaggcaggtcggcgaggagggcaggaagaccgaagaccgagccgtgcgggggctcgggacgggaacgggacaggaccccaaaatctcagatccttcctgcccgcccgcccgtgcccgtcgacgcgtcgttcttgccggccgcgccccacctccgccctctcctcctccagggggatcggatacgccacaggctgcgcgatggtgctgtgggtcttcggctacggctccctcatctggaaccccggcttcgacttcgacgacaaaatcctcggcttcatcaaaggctacaagcgcacctttaatctcgcttgcattgaccacagaggcacaccggagcatccggcgaggacctgcacgcttgaaaccgacgacgaggccatatgctggggaattgcatattgtgtcmagggtggtcccagaaaaagagctaaaagcaatacagtacttggagag

SEQ ID NO: 16219 - protein, 164 aa, Zea mays subsp. mays
  peptide (1)..(164): Ceres Seq. ID no. 3465405
  misc_feature (82)..(154): Pfam Name: ChaC-like protein Pfam Description: ChaC-like protein
  misc_feature (82)..(141): Homolog of NCBI NO: 25349686 NR Description: hypothetical protein T12C22.6 [imported] -
  misc_feature (82)..(155): Homolog of NCBI NO: 12083292 NR Description: unknown protein [Arabidopsis thaliana]
  misc_feature (80)..(146): Homolog of NCBI NO: 38344831 NR Description: OSJNBa0064H22.12 [Oryza sativa (japonica
  misc_feature (80)..(155): Homolog of NCBI NO: 18401334 NR Description: expressed protein
  misc_feature (80)..(152): Homolog of NCBI NO: 27525010 NR Description: putative cation transporter [Beta procumbens]
  misc_feature (80)..(154): Homolog of NCBI NO: 15239626 NR Description: putative protein; protein id: At5g26220.1
  misc_feature (80)..(154): Homolog of NCBI NO: 7486723 NR Description: hypothetical protein F9D12.14 - Arabidopsis
  misc_feature (80)..(154): Homolog of NCBI NO: 21593515 NR Description: unknown [Arabidopsis thaliana]
  misc_feature (80)..(154): Homolog of NCBI NO: 18417778 NR Description: unknown protein
  misc_feature (80)..(154): Homolog of NCBI NO: 7486662 NR Description: hypothetical protein F8F16.110 - Arabidopsis
  misc_feature (149)..(149): Xaa is any aa, unknown or other
IENSFFSLIRIPRQAGRRGGQEDRRPSRAGARDGNGTGPQNLRSFLPARPCPSTRRSCRPRPTSALSSSRGIGYATGCAMVLWVFGYGSLIWNPGFDFDDKILGFIKGYKRTFNLACIDHRGTPEHPARTCTLETDDEAICWGIAYCVXGGPRKRAKSNTVLGE

SEQ ID NO: 16220 - protein, 113 aa, Zea mays subsp. mays
  peptide (1)..(113): Ceres Seq. ID no. 3465406
NRKLLFFSHPNSQAGRSARRAGRPKTEPCGGSGRERDRTPKSQILPARPPVPVDASFLPAAPHLRPLLLQGDRIRHRLRDGAVGLRLRLPHLEPRLRLRRQNPRLHQRLQAHL

SEQ ID NO: 16221 - protein, 85 aa, Zea mays subsp. mays
  peptide (1)..(85): Ceres Seq. ID no. 3465407
  misc_feature (3)..(75): Pfam Name: ChaC-like protein Pfam Description: ChaC-like protein
  misc_feature (3)..(62): Homolog of NCBI NO: 25349686 NR Description: hypothetical protein T12C22.6 [imported] -
  misc_feature (3)..(76): Homolog of NCBI NO: 12083292 NR Description: unknown protein [Arabidopsis thaliana]
  misc_feature (1)..(67): Homolog of NCBI NO: 38344831 NR Description: OSJNBa0064H22.12 [Oryza sativa (japonica
  misc_feature (1)..(76): Homolog of NCBI NO: 18401334 NR Description: expressed protein
  misc_feature (1)..(73): Homolog of NCBI NO: 27525010 NR Description: putative cation transporter [Beta procumbens]
  misc_feature (1)..(75): Homolog of NCBI NO: 15239626 NR Description: putative protein; protein id: At5g26220.1
  misc_feature (1)..(75): Homolog of NCBI NO: 7486723 NR Description: hypothetical protein F9D12.14 - Arabidopsis
  misc_feature (1)..(75): Homolog of NCBI NO: 18417778 NR Description: unknown protein
  misc_feature (1)..(75): Homolog of NCBI NO: 21593515 NR Description: unknown [Arabidopsis thaliana]
  misc_feature (1)..(75): Homolog of NCBI NO: 7486662 NR Description: hypothetical protein F8F16.110 - Arabidopsis
  misc_feature (70)..(70): Xaa is any aa, unknown or other
MVLWVFGYGSLIWNPGFDFDDKILGFIKGYKRTFNLACIDHRGTPEHPARTCTLETDDEAICWGIAYCVXGGPRKRAKSNTVLGE

SEQ ID NO: 16222 - DNA, 1588 bp, Zea mays subsp. mays
  misc_feature (1)..(1588): Ceres Seq. ID no. 12363408
  misc_feature: MA Experiment ID: 108535 Result: Down-regulated in Transcription
  misc_feature: MA Experiment 108535 PARAMETER Experiment Name: Zm_Meristem_P Parameter: Age (day) Value: 8
  misc_feature: MA Experiment 108535 PARAMETER Experiment Name: Zm_Meristem_P Parameter: Organism Value: Zea mays
  misc_feature: MA Experiment 108535 PARAMETER Experiment Name: Zm_Meristem_P Parameter: Plant Line Value: 35A19
  misc_feature: MA Experiment 108535 PARAMETER Experiment Name: Zm_Meristem_P Parameter: Tissue Value: Root Meristem vs. Above Root Meristem
  misc_feature: MA Experiment ID: 108543 Result: Up-regulated in Transcription
  misc_feature: MA Experiment ID: 108545 Result: Down-regulated in Transcription
  misc_feature: MA Experiment 108545 PARAMETER Experiment Name: Zm_Imbibed_Seeds_P Parameter: Age (day) Value: 3 vs. 2
  misc_feature: MA Experiment 108545 PARAMETER Experiment Name: Zm_Imbibed_Seeds_P Parameter: Organism Value: Zea mays
  misc_feature: MA Experiment 108545 PARAMETER Experiment Name: Zm_Imbibed_Seeds_P Parameter: Plant Line Value: 35A19
  misc_feature: MA Experiment 108545 PARAMETER Experiment Name: Zm_Imbibed_Seeds_P Parameter: Tissue Value: Aerial vs. Embryo
  misc_feature: MA Experiment ID: 20000477 Result: Down-regulated in Transcription
  misc_feature: MA Experiment 20000477 PARAMETER Experiment Name: Zm_5mM_SA_P Parameter: Age (day) Value: 10
  misc_feature: MA Experiment 20000477 PARAMETER Experiment Name: Zm_5mM_SA_P Parameter: Organism Value: Zea mays
  misc_feature: MA Experiment 20000477 PARAMETER Experiment Name: Zm_5mM_SA_P Parameter: Plant Line Value: 35A19
  misc_feature: MA Experiment 20000477 PARAMETER Experiment Name: Zm_5mM_SA_P Parameter: Timepoint (hr) Value: 48
  misc_feature: MA Experiment 20000477 PARAMETER Experiment Name: Zm_5mM_SA_P Parameter: Tissue Value: Aerial
  misc_feature: MA Experiment 20000477 PARAMETER Experiment Name: Zm_5mM_SA_P Parameter: Treatment Value: 5mM SA vs. No Treatment
  misc_feature: MA Experiment ID: 20000480 Result: Down-regulated in Transcription
  misc_feature: MA Experiment 20000480 PARAMETER Experiment Name: Zm_Drought_P Parameter: Age (day) Value: 11
  misc_feature: MA Experiment 20000480 PARAMETER Experiment Name: Zm_Drought_P Parameter: Organism Value: Zea mays
  misc_feature: MA Experiment 20000480 PARAMETER Experiment Name: Zm_Drought_P Parameter: Plant Line Value: 35A19
  misc_feature: MA Experiment 20000480 PARAMETER Experiment Name: Zm_Drought_P Parameter: Timepoint (hr) Value: 72
  misc_feature: MA Experiment 20000480 PARAMETER Experiment Name: Zm_Drought_P Parameter: Tissue Value: Aerial
  misc_feature: MA Experiment 20000480 PARAMETER Experiment Name: Zm_Drought_P Parameter: Treatment Value: Drought vs. No Drought
  misc_feature: MA Experiment ID: 20000535 Result: Down-regulated in Transcription
  misc_feature: MA Experiment 20000535 PARAMETER Experiment Name: Zm_Hybrid_Seed_Dev_P Parameter: DAP Value: 30 vs. 12
  misc_feature: MA Experiment 20000535 PARAMETER Experiment Name: Zm_Hybrid_Seed_Dev_P Parameter: Organism Value: Zea mays
  misc_feature: MA Experiment 20000535 PARAMETER Experiment Name: Zm_Hybrid_Seed_Dev_P Parameter: Plant Line Value: 35A19
  misc_feature: MA Experiment 20000535 PARAMETER Experiment Name: Zm_Hybrid_Seed_Dev_P Parameter: Tissue Value: Embryo vs. Unfert Floret
cccggcttaggaaccctcgaaaagacgcctcaccatctcctttgtgtccttgctaactaactccccattagatccggccttcttcctccccgtctccgtcctttgtgtccagttgcttcataagctacccatcgccaattcgccatatacgcacatacccaacgacgacgcacgcgcgtgcgcaaaccaccaaccggagcgagtaccaaccggccggcccgcccaacaagcaggcggctagccatcgacgaccgagcacatcgagctgcccccggccggtcatatatatatgcagggcggcggcggtgatcaagcaggagggagcctgggcatgggcatgggcgtggggtacgccggcggcggaggcgccgagtgctcgtcgtcctcggtggcggccgcggctgccgccgccgcggcggcggcggaggcggaggagcggcagctgctcaagggggagatcgcggtgcacccgctgtgcgagcagctggtggcggcgcacgtggggtgcctgcgcgtggccacgcccatcgaccacctccccctcatcgacgcccagctcgcgcagtccagcggcctcctccactcctacgccgcccaccacagccccttcctctccccgcacgacaagcacgacctcgactccttcctcgcgcagtacctgatgctgctgtgctcgttccgggagcagctgcagcagcacgtccgggtgcacgccgtggaggccgtcatggcatgccgcgagatcgagcagtccctgcaagacctaactggggtgacgctggaggaagggacgggagcgaccatgtcggaggaggacgaggacgaggcgccgatgctggaggtgggtctggtggacatgggctccgacgggcacgacatgatgggcttcggcccgctcctgcccaccgactccgagcgctcgctcatggatagggtccgacaggagcttaagatcgagctcaagcagggtttcaagtcaagaatagaggatgtgagggaggagattctgaggaaaaggagggccgggaagctgcctggggacaccaccagcatcctcaagcaatggtggcagcagcactccaagtggccataccccacggaggacgataaggcgaggctcgttgaagagaccggcctgcagctgaaacaaatcaacaactggttcatcaaccagaggaagaggaactggcacaacaactcccagacgtcaaccctcaaatcaaagcgtaaaaggtgatggagagctgcgccaccatgtactgcacacctgacacgtataccaattaccaacacgctaatcagacgacgtacggccatgcatggcgactcacaagaaataaagaggatcgatcgattcaactgtatatttctagtcattagtcagagaggtgacaggttcatgacacacacaaacacacgtacactagtctgaccactggcatatttgcttgctgtgattaatattttgagccgatcatttgctcggagcatactttattcttgttattattgtacagccatagtttgtcctcccagcgtacgtacataatctttgaggttgcattcatatatacagtgatctgatctg

SEQ ID NO: 16223 - protein, 315 aa, Zea mays subsp. mays
  peptide (1)..(315): Ceres Seq. ID no. 12363409
  misc_feature (106)..(161): Pfam Name: KNOX2 domain Pfam Description: KNOX2 domain
  misc_feature (43)..(314): Homolog of NCBI NO: 1170191 NR Description: Homeobox protein HD1
  misc_feature (8)..(315): Homolog of NCBI NO: 4098246 NR Description: homeobox 2 protein [Lycopersicon esculentum]
  misc_feature (44)..(314): Homolog of NCBI NO: 26451690 NR Description: putative homeodomain transcription factor KNAT6
  misc_feature (44)..(314): Homolog of NCBI NO: 25386223 NR Description: hypothetical protein F16P17.16 [imported] -
  misc_feature (121)..(315): Homolog of NCBI NO: 4887620 NR Description: homeobox gene [Oryza sativa (japonica
  misc_feature (54)..(315): Homolog of NCBI NO: 3023961 NR Description: Homeobox protein knotted-1 like 3 (KNAP3)
  misc_feature (3)..(314): Homolog of NCBI NO: 4098244 NR Description: homeobox 1 protein [Lycopersicon esculentum]
  misc_feature (44)..(314): Homolog of NCBI NO: 18407708 NR Description: homeodomain-containing protein HD1, putative
  misc_feature (35)..(314): Homolog of NCBI NO: 21618231 NR Description: homeodomain-containing protein HD1, putative
  misc_feature (5)..(315): Homolog of NCBI NO: 14149141 NR Description: KNOX family class 2 homeodomain protein
MQGGGGDQAGGSLGMGMGVGYAGGGGAECSSSSVAAAAAAAAAAAEAEERQLLKGEIAVHPLCEQLVAAHVGCLRVATPIDHLPLIDAQLAQSSGLLHSYAAHHSPFLSPHDKHDLDSFLAQYLMLLCSFREQLQQHVRVHAVEAVMACREIEQSLQDLTGVTLEEGTGATMSEEDEDEAPMLEVGLVDMGSDGHDMMGFGPLLPTDSERSLMDRVRQELKIELKQGFKSRIEDVREEILRKRRAGKLPGDTTSILKQWWQQHSKWPYPTEDDKARLVEETGLQLKQINNWFINQRKRNWHNNSQTSTLKSKRKR

SEQ ID NO: 16224 - protein, 301 aa, Zea mays subsp. mays
  peptide (1)..(301): Ceres Seq. ID no. 12363410
  misc_feature (92)..(147): Pfam Name: KNOX2 domain Pfam Description: KNOX2 domain
  misc_feature (1)..(300): Homolog of NCBI NO: 4098244 NR Description: homeobox 1 protein [Lycopersicon esculentum]
  misc_feature (107)..(301): Homolog of NCBI NO: 4887620 NR Description: homeobox gene [Oryza sativa (japonica
  misc_feature (40)..(301): Homolog of NCBI NO: 3023961 NR Description: Homeobox protein knotted-1 like 3 (KNAP3)
  misc_feature (29)..(300): Homolog of NCBI NO: 1170191 NR Description: Homeobox protein HD1
  misc_feature (1)..(301): Homolog of NCBI NO: 4098246 NR Description: homeobox 2 protein [Lycopersicon esculentum]
  misc_feature (30)..(300): Homolog of NCBI NO: 25386223 NR Description: hypothetical protein F16P17.16 [imported] -
  misc_feature (30)..(300): Homolog of NCBI NO: 26451690 NR Description: putative homeodomain transcription factor KNAT6
  misc_feature (30)..(300): Homolog of NCBI NO: 18407708 NR Description: homeodomain-containing protein HD1, putative
  misc_feature (21)..(300): Homolog of NCBI NO: 21618231 NR Description: homeodomain-containing protein HD1, putative
  misc_feature (1)..(301): Homolog of NCBI NO: 14149141 NR Description: KNOX family class 2 homeodomain protein
MGMGVGYAGGGGAECSSSSVAAAAAAAAAAAEAEERQLLKGEIAVHPLCEQLVAAHVGCLRVATPIDHLPLIDAQLAQSSGLLHSYAAHHSPFLSPHDKHDLDSFLAQYLMLLCSFREQLQQHVRVHAVEAVMACREIEQSLQDLTGVTLEEGTGATMSEEDEDEAPMLEVGLVDMGSDGHDMMGFGPLLPTDSERSLMDRVRQELKIELKQGFKSRIEDVREEILRKRRAGKLPGDTTSILKQWWQQHSKWPYPTEDDKARLVEETGLQLKQINNWFINQRKRNWHNNSQTSTLKSKRKR

SEQ ID NO: 16225 - protein, 299 aa, Zea mays subsp. mays
  peptide (1)..(299): Ceres Seq. ID no. 12363411
  misc_feature (90)..(145): Pfam Name: KNOX2 domain Pfam Description: KNOX2 domain
  misc_feature (1)..(298): Homolog of NCBI NO: 4098244 NR Description: homeobox 1 protein [Lycopersicon esculentum]
  misc_feature (105)..(299): Homolog of NCBI NO: 4887620 NR Description: homeobox gene [Oryza sativa (japonica
  misc_feature (38)..(299): Homolog of NCBI NO: 3023961 NR Description: Homeobox protein knotted-1 like 3 (KNAP3)
  misc_feature (27)..(298): Homolog of NCBI NO: 1170191 NR Description: Homeobox protein HD1
  misc_feature (1)..(299): Homolog of NCBI NO: 4098246 NR Description: homeobox 2 protein [Lycopersicon esculentum]
  misc_feature (28)..(298): Homolog of NCBI NO: 26451690 NR Description: putative homeodomain transcription factor KNAT6
  misc_feature (28)..(298): Homolog of NCBI NO: 25386223 NR Description: hypothetical protein F16P17.16 [imported] -
  misc_feature (28)..(298): Homolog of NCBI NO: 18407708 NR Description: homeodomain-containing protein HD1, putative
  misc_feature (19)..(298): Homolog of NCBI NO: 21618231 NR Description: homeodomain-containing protein HD1, putative
  misc_feature (1)..(299): Homolog of NCBI NO: 14149141 NR Description: KNOX family class 2 homeodomain protein
MGVGYAGGGGAECSSSSVAAAAAAAAAAAEAEERQLLKGEIAVHPLCEQLVAAHVGCLRVATPIDHLPLIDAQLAQSSGLLHSYAAHHSPFLSPHDKHDLDSFLAQYLMLLCSFREQLQQHVRVHAVEAVMACREIEQSLQDLTGVTLEEGTGATMSEEDEDEAPMLEVGLVDMGSDGHDMMGFGPLLPTDSERSLMDRVRQELKIELKQGFKSRIEDVREEILRKRRAGKLPGDTTSILKQWWQQHSKWPYPTEDDKARLVEETGLQLKQINNWFINQRKRNWHNNSQTSTLKSKRKR

SEQ ID NO: 16226 - DNA, 1292 bp, Zea mays subsp. mays
  misc_feature (1)..(1292): Ceres Seq. ID no. 12368161
  misc_feature: MA Experiment ID: 108504 Result: Up-regulated in Transcription
  misc_feature: MA Experiment 108504 PARAMETER Experiment Name: Zm_Drought_P Parameter: Age (day) Value: 8
  misc_feature: MA Experiment 108504 PARAMETER Experiment Name: Zm_Drought_P Parameter: Organism Value: Zea mays
  misc_feature: MA Experiment 108504 PARAMETER Experiment Name: Zm_Drought_P Parameter: Plant Line Value: 35A19
  misc_feature: MA Experiment 108504 PARAMETER Experiment Name: Zm_Drought_P Parameter: Timepoint (hr) Value: 12
  misc_feature: MA Experiment 108504 PARAMETER Experiment Name: Zm_Drought_P Parameter: Tissue Value: Aerial
  misc_feature: MA Experiment 108504 PARAMETER Experiment Name: Zm_Drought_P Parameter: Treatment Value: Drought vs. No Drought
  misc_feature: MA Experiment ID: 108527 Result: Up-regulated in Transcription
  misc_feature: MA Experiment 108527 PARAMETER Experiment Name: Zm_5mM_NO_P Parameter: Age (day) Value: 8
  misc_feature: MA Experiment 108527 PARAMETER Experiment Name: Zm_5mM_NO_P Parameter: Organism Value: Zea mays
  misc_feature: MA Experiment 108527 PARAMETER Experiment Name: Zm_5mM_NO_P Parameter: Plant Line Value: 35A19
  misc_feature: MA Experiment 108527 PARAMETER Experiment Name: Zm_5mM_NO_P Parameter: Timepoint (hr) Value: 6
  misc_feature: MA Experiment 108527 PARAMETER Experiment Name: Zm_5mM_NO_P Parameter: Tissue Value: Aerial
  misc_feature: MA Experiment 108527 PARAMETER Experiment Name: Zm_5mM_NO_P Parameter: Treatment Value: 5mM NO vs. No Treatment
  misc_feature: MA Experiment ID: 108535 Result: Down-regulated in Transcription
  misc_feature: MA Experiment 108535 PARAMETER Experiment Name: Zm_Meristem_P Parameter: Age (day) Value: 8
  misc_feature: MA Experiment 108535 PARAMETER Experiment Name: Zm_Meristem_P Parameter: Organism Value: Zea mays
  misc_feature: MA Experiment 108535 PARAMETER Experiment Name: Zm_Meristem_P Parameter: Plant Line Value: 35A19
  misc_feature: MA Experiment 108535 PARAMETER Experiment Name: Zm_Meristem_P Parameter: Tissue Value: Root Meristem vs. Above Root Meristem
  misc_feature: MA Experiment ID: 108540 Result: Up-regulated in Transcription
  misc_feature: MA Experiment 108540 PARAMETER Experiment Name: Zm_20percent_PEG_P Parameter: Age (day) Value: 8
  misc_feature: MA Experiment 108540 PARAMETER Experiment Name: Zm_20percent_PEG_P Parameter: Organism Value: Zea mays
  misc_feature: MA Experiment 108540 PARAMETER Experiment Name: Zm_20percent_PEG_P Parameter: Plant Line Value: 35A19
  misc_feature: MA Experiment 108540 PARAMETER Experiment Name: Zm_20percent_PEG_P Parameter: Timepoint (hr) Value: 6
  misc_feature: MA Experiment 108540 PARAMETER Experiment Name: Zm_20percent_PEG_P Parameter: Tissue Value: Aerial
  misc_feature: MA Experiment 108540 PARAMETER Experiment Name: Zm_20percent_PEG_P Parameter: Treatment Value: 20percent PEG vs. No Treatment
  misc_feature: MA Experiment ID: 108545 Result: Down-regulated in Transcription
  misc_feature: MA Experiment 108545 PARAMETER Experiment Name: Zm_Imbibed_Seeds_P Parameter: Age (day) Value: 3 vs. 2
  misc_feature: MA Experiment 108545 PARAMETER Experiment Name: Zm_Imbibed_Seeds_P Parameter: Organism Value: Zea mays
  misc_feature: MA Experiment 108545 PARAMETER Experiment Name: Zm_Imbibed_Seeds_P Parameter: Plant Line Value: 35A19
  misc_feature: MA Experiment 108545 PARAMETER Experiment Name: Zm_Imbibed_Seeds_P Parameter: Tissue Value: Aerial vs. Embryo
  misc_feature: MA Experiment ID: 108559 Result: Up-regulated in Transcription
  misc_feature: MA Experiment 108559 PARAMETER Experiment Name: Zm_5mM_NO_P Parameter: Age (day) Value: 8
  misc_feature: MA Experiment 108559 PARAMETER Experiment Name: Zm_5mM_NO_P Parameter: Organism Value: Zea mays
  misc_feature: MA Experiment 108559 PARAMETER Experiment Name: Zm_5mM_NO_P Parameter: Plant Line Value: 35A19
  misc_feature: MA Experiment 108559 PARAMETER Experiment Name: Zm_5mM_NO_P Parameter: Timepoint (hr) Value: 12
  misc_feature: MA Experiment 108559 PARAMETER Experiment Name: Zm_5mM_NO_P Parameter: Tissue Value: Aerial
  misc_feature: MA Experiment 108559 PARAMETER Experiment Name: Zm_5mM_NO_P Parameter: Treatment Value: 5mM NO vs. No Treatment
  misc_feature: MA Experiment ID: 108687 Result: Up-regulated in Transcription
  misc_feature: MA Experiment 108687 PARAMETER Experiment Name: Zm_Embryos-Flowers__P Parameter: Tissue Value: Embryo vs. Aerial+
  misc_feature: MA Experiment ID: 108688 Result: Down-regulated in Transcription
  misc_feature: MA Experiment 108688 PARAMETER Experiment Name: Zm_Embryos-Flowers__P Parameter: Tissue Value: Immature Flowers vs. Aerial+
  misc_feature: MA Experiment ID: 20000108 Result: Down-regulated in Transcription
  misc_feature: MA Experiment 20000108 PARAMETER Experiment Name: Zm_Root-Tips_P Parameter: Age (day) Value: 12
  misc_feature: MA Experiment 20000108 PARAMETER Experiment Name: Zm_Root-Tips_P Parameter: Organism Value: Zea mays
  misc_feature: MA Experiment 20000108 PARAMETER Experiment Name: Zm_Root-Tips_P Parameter: Tissue Value: Root tips vs. Root mid region    35
  misc_feature: MA Experiment 20000108 PARAMETER Experiment Name: Zm_Root-Tips_P Parameter: Tissue Value: Root tips vs. Root mid region   Sequence Listing-Misc Features (4)
  misc_feature: MA Experiment ID: 20000478 Result: Up-regulated in Transcription
  misc_feature: MA Experiment 20000478 PARAMETER Experiment Name: Zm_5mM_SA_P Parameter: Age (day) Value: 11
  misc_feature: MA Experiment 20000478 PARAMETER Experiment Name: Zm_5mM_SA_P Parameter: Organism Value: Zea mays
  misc_feature: MA Experiment 20000478 PARAMETER Experiment Name: Zm_5mM_SA_P Parameter: Plant Line Value: 35A19
  misc_feature: MA Experiment 20000478 PARAMETER Experiment Name: Zm_5mM_SA_P Parameter: Timepoint (hr) Value: 72
  misc_feature: MA Experiment 20000478 PARAMETER Experiment Name: Zm_5mM_SA_P Parameter: Tissue Value: Aerial
  misc_feature: MA Experiment 20000478 PARAMETER Experiment Name: Zm_5mM_SA_P Parameter: Treatment Value: 5mM SA vs. No Treatment
  misc_feature: MA Experiment ID: 20000532 Result: Up-regulated in Transcription
  misc_feature: MA Experiment 20000532 PARAMETER Experiment Name: Zm_0.001percent_MeJA_P Parameter: Age (day) Value: 10
  misc_feature: MA Experiment 20000532 PARAMETER Experiment Name: Zm_0.001percent_MeJA_P Parameter: Organism Value: Zea mays
  misc_feature: MA Experiment 20000532 PARAMETER Experiment Name: Zm_0.001percent_MeJA_P Parameter: Plant Line Value: 35A19
  misc_feature: MA Experiment 20000532 PARAMETER Experiment Name: Zm_0.001percent_MeJA_P Parameter: Timepoint (hr) Value: 48
  misc_feature: MA Experiment 20000532 PARAMETER Experiment Name: Zm_0.001percent_MeJA_P Parameter: Tissue Value: Aerial
  misc_feature: MA Experiment 20000532 PARAMETER Experiment Name: Zm_0.001percent_MeJA_P Parameter: Treatment Value: 0.001percent MeJA vs. No Treatment
  misc_feature: MA Experiment ID: 20000533 Result: Up-regulated in Transcription
  misc_feature: MA Experiment 20000533 PARAMETER Experiment Name: Zm_0.001percent_MeJA_P Parameter: Age (day) Value: 11
  misc_feature: MA Experiment 20000533 PARAMETER Experiment Name: Zm_0.001percent_MeJA_P Parameter: Organism Value: Zea mays
  misc_feature: MA Experiment 20000533 PARAMETER Experiment Name: Zm_0.001percent_MeJA_P Parameter: Plant Line Value: 35A19
  misc_feature: MA Experiment 20000533 PARAMETER Experiment Name: Zm_0.001percent_MeJA_P Parameter: Timepoint (hr) Value: 72
  misc_feature: MA Experiment 20000533 PARAMETER Experiment Name: Zm_0.001percent_MeJA_P Parameter: Tissue Value: Aerial
  misc_feature: MA Experiment 20000533 PARAMETER Experiment Name: Zm_0.001percent_MeJA_P Parameter: Treatment Value: 0.001percent MeJA vs. No Treatment
  misc_feature: MA Experiment ID: 20000534 Result: Down-regulated in Transcription
  misc_feature: MA Experiment 20000534 PARAMETER Experiment Name: Zm_Hybrid_Pollen_P Parameter: Age (day) Value: 8
  misc_feature: MA Experiment 20000534 PARAMETER Experiment Name: Zm_Hybrid_Pollen_P Parameter: Organism Value: Zea mays
  misc_feature: MA Experiment 20000534 PARAMETER Experiment Name: Zm_Hybrid_Pollen_P Parameter: Plant Line Value: 35A19
  misc_feature: MA Experiment 20000534 PARAMETER Experiment Name: Zm_Hybrid_Pollen_P Parameter: Tissue Value: Pollen vs. Aerial
  misc_feature: MA Experiment ID: 20000535 Result: Up-regulated in Transcription
  misc_feature: MA Experiment 20000535 PARAMETER Experiment Name: Zm_Hybrid_Seed_Dev_P Parameter: DAP Value: 30 vs. 12
  misc_feature: MA Experiment 20000535 PARAMETER Experiment Name: Zm_Hybrid_Seed_Dev_P Parameter: Organism Value: Zea mays
  misc_feature: MA Experiment 20000535 PARAMETER Experiment Name: Zm_Hybrid_Seed_Dev_P Parameter: Plant Line Value: 35A19
  misc_feature: MA Experiment 20000535 PARAMETER Experiment Name: Zm_Hybrid_Seed_Dev_P Parameter: Tissue Value: Embryo vs. Unfert Floret
  misc_feature: MA Experiment ID: 20000626 Result: Up-regulated in Transcription
  misc_feature: MA Experiment 20000626 PARAMETER Experiment Name: Zm_Herbicide-Treatments_P Parameter: Timepoint (hr) Value: 12
  misc_feature: MA Experiment 20000626 PARAMETER Experiment Name: Zm_Herbicide-Treatments_P Parameter: Tissue Value: Aerial
  misc_feature: MA Experiment 20000626 PARAMETER Experiment Name: Zm_Herbicide-Treatments_P Parameter: Treatment Value: Roundup vs. No Treatment
acccgataagtagcaggggcagggagaacgaagacgacgacgacgtacgccggccgtaagtgagccgagagcccccgatataccagctagctagataaccagccagcgcgagcatggaggcggcggcggcggcggtccggcaccggacggtggaggcgaacggcatctcgatgcacgtggcggagtccggccccgacggcggcgacggcgcgcccgcggtggtgttcctgcacggcttcccggagctctggtactcgtggcgccaccagatggcgcacctggccgcgcggggctaccgctgcgtggcgccggacctccgcggctacggcggcaccgccgcgccgcccgacgtcgcgtcctactccgccttccacgtcgtcggcgacgtcgtcgccctgctcgacgcgatcggcatccacaacaaggtgttcgtggtgggtcacgactggggcgccatcatcgcgtggtacctctgcctgttccggccggaccgggtggcggcgcttgtcaacaccagcgtcgccttcatgcgccacatcttcgtccgcgccgccgccgccgccgtcacgcccatcgactacttccaccgcacctacgggcccacctactacatctgccgcttccaggagcctggtgtcgcagagaaggagttctcgccggccaacgccgggtacctgatgaagcggatcctgtgcaaccgcttcacctcctcggcggccggcgacgacaagccgccggcggcggacgccgccgaggaggagccgctgccgccgtggctgacggaggaggacgtgagccacttcgcgtcggagttcgagcggacaggcttcacggggcccatcaactactaccgcaacatggaccgcaactgggagctggcggcgccgtgggcggacgccaaggtgcgggtgcccaccaggttcatcgtcggcgacggcgacctcacctaccactacccgggcatccaggactacatccacaagggcgggttcgaggccgacgtcccggggctcgagagcgtcgtcgtcatccccggcgccggccacttcgtccagcaggagaaggccgacgaggtcagccagcacatctacgacttcatctccaagttctgatacatgtgcagcttgcttgcttacctgctaaaacctgtaatctcaacctcgatatccgtgctgccaacttgttttgtttgacgaactaagagtaataagtgttcgcatatatatatgtttggtttaatttgtgacttggacatggtatgttcgatgtgaaatggataaaccgtgcgtttc

SEQ ID NO: 16227 - protein, 332 aa, Zea mays subsp. mays
  peptide (1)..(332): Ceres Seq. ID no. 12368162
  misc_feature (61)..(327): Pfam Name: alpha/beta hydrolase fold Pfam Description: alpha/beta hydrolase fold
  misc_feature (8)..(332): Homolog of NCBI NO: 15225781 NR Description: epoxide hydrolase (ATsEH)
  misc_feature (10)..(332): Homolog of NCBI NO: 25044843 NR Description: epoxide hydrolase [Ananas comosus]
  misc_feature (3)..(332): Homolog of NCBI NO: 34897302 NR Description: putative hydrolase [Oryza sativa (japonica
  misc_feature (3)..(332): Homolog of NCBI NO: 34897298 NR Description: putative hydrolase [Oryza sativa (japonica
MEAAAAAVRHRTVEANGISMHVAESGPDGGDGAPAVVFLHGFPELWYSWRHQMAHLAARGYRCVAPDLRGYGGTAAPPDVASYSAFHVVGDVVALLDAIGIHNKVFVVGHDWGAIIAWYLCLFRPDRVAALVNTSVAFMRHIFVRAAAAAVTPIDYFHRTYGPTYYICRFQEPGVAEKEFSPANAGYLMKRILCNRFTSSAAGDDKPPAADAAEEEPLPPWLTEEDVSHFASEFERTGFTGPINYYRNMDRNWELAAPWADAKVRVPTRFIVGDGDLTYHYPGIQDYIHKGGFEADVPGLESVVVIPGAGHFVQQEKADEVSQHIYDFISKF

SEQ ID NO: 16228 - protein, 313 aa, Zea mays subsp. mays
  peptide (1)..(313): Ceres Seq. ID no. 12368163
  misc_feature (42)..(308): Pfam Name: alpha/beta hydrolase fold Pfam Description: alpha/beta hydrolase fold
  misc_feature (1)..(313): Homolog of NCBI NO: 15225781 NR Description: epoxide hydrolase (ATsEH)
  misc_feature (1)..(313): Homolog of NCBI NO: 25044843 NR Description: epoxide hydrolase [Ananas comosus]
  misc_feature (1)..(313): Homolog of NCBI NO: 34897302 NR Description: putative hydrolase [Oryza sativa (japonica
  misc_feature (1)..(313): Homolog of NCBI NO: 34897298 NR Description: putative hydrolase [Oryza sativa (japonica
MHVAESGPDGGDGAPAVVFLHGFPELWYSWRHQMAHLAARGYRCVAPDLRGYGGTAAPPDVASYSAFHVVGDVVALLDAIGIHNKVFVVGHDWGAIIAWYLCLFRPDRVAALVNTSVAFMRHIFVRAAAAAVTPIDYFHRTYGPTYYICRFQEPGVAEKEFSPANAGYLMKRILCNRFTSSAAGDDKPPAADAAEEEPLPPWLTEEDVSHFASEFERTGFTGPINYYRNMDRNWELAAPWADAKVRVPTRFIVGDGDLTYHYPGIQDYIHKGGFEADVPGLESVVVIPGAGHFVQQEKADEVSQHIYDFISKF

SEQ ID NO: 16229 - protein, 280 aa, Zea mays subsp. mays
  peptide (1)..(280): Ceres Seq. ID no. 12368164
  misc_feature (9)..(275): Pfam Name: alpha/beta hydrolase fold Pfam Description: alpha/beta hydrolase fold
  misc_feature (1)..(280): Homolog of NCBI NO: 15225781 NR Description: epoxide hydrolase (ATsEH)
  misc_feature (1)..(280): Homolog of NCBI NO: 25044843 NR Description: epoxide hydrolase [Ananas comosus]
  misc_feature (1)..(280): Homolog of NCBI NO: 34897302 NR Description: putative hydrolase [Oryza sativa (japonica
  misc_feature (1)..(280): Homolog of NCBI NO: 34897298 NR Description: putative hydrolase [Oryza sativa (japonica
MAHLAARGYRCVAPDLRGYGGTAAPPDVASYSAFHVVGDVVALLDAIGIHNKVFVVGHDWGAIIAWYLCLFRPDRVAALVNTSVAFMRHIFVRAAAAAVTPIDYFHRTYGPTYYICRFQEPGVAEKEFSPANAGYLMKRILCNRFTSSAAGDDKPPAADAAEEEPLPPWLTEEDVSHFASEFERTGFTGPINYYRNMDRNWELAAPWADAKVRVPTRFIVGDGDLTYHYPGIQDYIHKGGFEADVPGLESVVVIPGAGHFVQQEKADEVSQHIYDFISKF

SEQ ID NO: 16230 - DNA, 520 bp, Zea mays subsp. mays
  misc_feature (1)..(520): Ceres Seq. ID no. 1556286
  misc_feature: MA Experiment ID: 108522 Result: Up-regulated in Transcription
  misc_feature: MA Experiment 108522 PARAMETER Experiment Name: Zm_42deg_Heat_P Parameter: Age (day) Value: 8
  misc_feature: MA Experiment 108522 PARAMETER Experiment Name: Zm_42deg_Heat_P Parameter: Organism Value: Zea mays
  misc_feature: MA Experiment 108522 PARAMETER Experiment Name: Zm_42deg_Heat_P Parameter: Plant Line Value: 35A19
  misc_feature: MA Experiment 108522 PARAMETER Experiment Name: Zm_42deg_Heat_P Parameter: Temperature (deg C) Value: 42 vs. 22
  misc_feature: MA Experiment 108522 PARAMETER Experiment Name: Zm_42deg_Heat_P Parameter: Timepoint (hr) Value: 1
  misc_feature: MA Experiment 108522 PARAMETER Experiment Name: Zm_42deg_Heat_P Parameter: Tissue Value: Aerial
  misc_feature: MA Experiment ID: 108523 Result: Up-regulated in Transcription
  misc_feature: MA Experiment 108523 PARAMETER Experiment Name: Zm_42deg_Heat_P Parameter: Age (day) Value: 8
  misc_feature: MA Experiment 108523 PARAMETER Experiment Name: Zm_42deg_Heat_P Parameter: Organism Value: Zea mays
  misc_feature: MA Experiment 108523 PARAMETER Experiment Name: Zm_42deg_Heat_P Parameter: Plant Line Value: 35A19
  misc_feature: MA Experiment 108523 PARAMETER Experiment Name: Zm_42deg_Heat_P Parameter: Temperature (deg C) Value: 42 vs. 22
  misc_feature: MA Experiment 108523 PARAMETER Experiment Name: Zm_42deg_Heat_P Parameter: Timepoint (hr) Value: 6
  misc_feature: MA Experiment 108523 PARAMETER Experiment Name: Zm_42deg_Heat_P Parameter: Tissue Value: Aerial
gggcaggngctcgtgtcgaacactcgaacagaaccaccgccattctagaggcatccagtattccagcccaatcctatctttgtattcctctccctcgtctcggaagtctggttcgccgaacagtcccgaacccccgattcactgccgctgccccgtctcgtcctcttcgccagcgaaaaccctagtctaggggacgggagcgcaatccacgcacggcaacatggacgccatccgcaagcagctcgaccagctcatgggggccaaccgcaacggcgatgtacgggaggtcagccgcaagtactatgatcgcgacgtctgccgcctctacctcgccggcctctgcccccacgacctcttccagcttaccaagatggacatgggcccgtgcccgaagctgcactcgctgcaactgcgcaaagaatatgaagaagccaaagccaaaggtactgataactatgaccgtgaattggaagaaaccattgaaagactaattgttgagtgtgaaaggagatcmgagagc

SEQ ID NO: 16231 - protein, 100 aa, Zea mays subsp. mays
  peptide (1)..(100): Ceres Seq. ID no. 1556287
  misc_feature (1)..(97): Pfam Name: LUC7 N_terminus Pfam Description: LUC7 N_terminus
  misc_feature (5)..(97): Homolog of NCBI NO: 19075500 NR Description: hypothetical coiled-coil protein
  misc_feature (2)..(99): Homolog of NCBI NO: 24665973 NR Description: CG7564-PA [Drosophila melanogaster]
  misc_feature (2)..(99): Homolog of NCBI NO: 31222227 NR Description: ENSANGP00000018276 [Anopheles gambiae]
  misc_feature (1)..(99): Homolog of NCBI NO: 31222233 NR Description: ENSANGP00000025137 [Anopheles gambiae]
  misc_feature (67)..(97): Homolog of NCBI NO: 11357938 NR Description: hypothetical protein K3M16_10 - Arabidopsis
  misc_feature (1)..(49): Homolog of NCBI NO: 11357938 NR Description: hypothetical protein K3M16_10 - Arabidopsis
  misc_feature (1)..(68): Homolog of NCBI NO: 6017114 NR Description: unknown protein [Arabidopsis thaliana]
  misc_feature (1)..(97): Homolog of NCBI NO: 18418301 NR Description: putative protein
  misc_feature (1)..(97): Homolog of NCBI NO: 30678827 NR Description: expressed protein [Arabidopsis thaliana]
  misc_feature (1)..(97): Homolog of NCBI NO: 29367401 NR Description: sarcoplasmic reticulum protein-like protein
  misc_feature (98)..(98): Xaa is any aa, unknown or other
MDAIRKQLDQLMGANRNGDVREVSRKYYDRDVCRLYLAGLCPHDLFQLTKMDMGPCPKLHSLQLRKEYEEAKAKGTDNYDRELEETIERLIVECERRXES

SEQ ID NO: 16232 - protein, 89 aa, Zea mays subsp. mays
  peptide (1)..(89): Ceres Seq. ID no. 1556288
  misc_feature (1)..(86): Pfam Name: LUC7 N_terminus Pfam Description: LUC7 N_terminus
  misc_feature (1)..(86): Homolog of NCBI NO: 19075500 NR Description: hypothetical coiled-coil protein
  misc_feature (1)..(88): Homolog of NCBI NO: 24665973 NR Description: CG7564-PA [Drosophila melanogaster]
  misc_feature (1)..(88): Homolog of NCBI NO: 31222227 NR Description: ENSANGP00000018276 [Anopheles gambiae]
  misc_feature (1)..(88): Homolog of NCBI NO: 31222233 NR Description: ENSANGP00000025137 [Anopheles gambiae]
  misc_feature (56)..(86): Homolog of NCBI NO: 11357938 NR Description: hypothetical protein K3M16_10 - Arabidopsis
  misc_feature (1)..(38): Homolog of NCBI NO: 11357938 NR Description: hypothetical protein K3M16_10 - Arabidopsis
  misc_feature (1)..(57): Homolog of NCBI NO: 6017114 NR Description: unknown protein [Arabidopsis thaliana]
  misc_feature (1)..(86): Homolog of NCBI NO: 18418301 NR Description: putative protein
  misc_feature (1)..(86): Homolog of NCBI NO: 30678827 NR Description: expressed protein [Arabidopsis thaliana]
  misc_feature (1)..(86): Homolog of NCBI NO: 29367401 NR Description: sarcoplasmic reticulum protein-like protein
  misc_feature (87)..(87): Xaa is any aa, unknown or other
MGANRNGDVREVSRKYYDRDVCRLYLAGLCPHDLFQLTKMDMGPCPKLHSLQLRKEYEEAKAKGTDNYDRELEETIERLIVECERRXES

SEQ ID NO: 16233 - protein, 71 aa, Zea mays subsp. mays
  peptide (1)..(71): Ceres Seq. ID no. 1556289
MYGRSAASTMIATSAASTSPASAPTTSSSLPRWTWARARSCTRCNCAKNMKKPKPKVLITMTVNWKKPLKD

SEQ ID NO: 16234 - DNA, 1321 bp, Zea mays subsp. mays
  misc_feature (1)..(1321): Ceres Seq. ID no. 12373031
  misc_feature: MA Experiment ID: 108533 Result: Up-regulated in Transcription
  misc_feature: MA Experiment 108533 PARAMETER Experiment Name: Zm_4deg_Cold_P Parameter: Age (hr) Value: 8
  misc_feature: MA Experiment 108533 PARAMETER Experiment Name: Zm_4deg_Cold_P Parameter: Organism Value: Zea mays
  misc_feature: MA Experiment 108533 PARAMETER Experiment Name: Zm_4deg_Cold_P Parameter: Plant Line Value: 35A19
  misc_feature: MA Experiment 108533 PARAMETER Experiment Name: Zm_4deg_Cold_P Parameter: Temperature (deg C) Value: 4 vs. 22
  misc_feature: MA Experiment 108533 PARAMETER Experiment Name: Zm_4deg_Cold_P Parameter: Timepoint (hr) Value: 1
  misc_feature: MA Experiment 108533 PARAMETER Experiment Name: Zm_4deg_Cold_P Parameter: Tissue Value: Aerial
  misc_feature: MA Experiment ID: 108534 Result: Up-regulated in Transcription
  misc_feature: MA Experiment 108534 PARAMETER Experiment Name: Zm_4deg_Cold_P Parameter: Age (hr) Value: 8
  misc_feature: MA Experiment 108534 PARAMETER Experiment Name: Zm_4deg_Cold_P Parameter: Organism Value: Zea mays
  misc_feature: MA Experiment 108534 PARAMETER Experiment Name: Zm_4deg_Cold_P Parameter: Plant Line Value: 35A19
  misc_feature: MA Experiment 108534 PARAMETER Experiment Name: Zm_4deg_Cold_P Parameter: Temperature (deg C) Value: 4 vs. 22
  misc_feature: MA Experiment 108534 PARAMETER Experiment Name: Zm_4deg_Cold_P Parameter: Timepoint (hr) Value: 6
  misc_feature: MA Experiment 108534 PARAMETER Experiment Name: Zm_4deg_Cold_P Parameter: Tissue Value: Aerial
  misc_feature: MA Experiment ID: 108535 Result: Down-regulated in Transcription
  misc_feature: MA Experiment 108535 PARAMETER Experiment Name: Zm_Meristem_P Parameter: Age (day) Value: 8
  misc_feature: MA Experiment 108535 PARAMETER Experiment Name: Zm_Meristem_P Parameter: Organism Value: Zea mays
  misc_feature: MA Experiment 108535 PARAMETER Experiment Name: Zm_Meristem_P Parameter: Plant Line Value: 35A19
  misc_feature: MA Experiment 108535 PARAMETER Experiment Name: Zm_Meristem_P Parameter: Tissue Value: Root Meristem vs. Above Root Meristem
  misc_feature: MA Experiment ID: 108559 Result: Down-regulated in Transcription
  misc_feature: MA Experiment 108559 PARAMETER Experiment Name: Zm_5mM_NO_P Parameter: Age (day) Value: 8
  misc_feature: MA Experiment 108559 PARAMETER Experiment Name: Zm_5mM_NO_P Parameter: Organism Value: Zea mays
  misc_feature: MA Experiment 108559 PARAMETER Experiment Name: Zm_5mM_NO_P Parameter: Plant Line Value: 35A19
  misc_feature: MA Experiment 108559 PARAMETER Experiment Name: Zm_5mM_NO_P Parameter: Timepoint (hr) Value: 12
  misc_feature: MA Experiment 108559 PARAMETER Experiment Name: Zm_5mM_NO_P Parameter: Tissue Value: Aerial
  misc_feature: MA Experiment 108559 PARAMETER Experiment Name: Zm_5mM_NO_P Parameter: Treatment Value: 5mM NO vs. No Treatment
  misc_feature: MA Experiment ID: 108688 Result: Down-regulated in Transcription
  misc_feature: MA Experiment 108688 PARAMETER Experiment Name: Zm_Embryos-Flowers__P Parameter: Tissue Value: Immature Flowers vs. Aerial+
  misc_feature: MA Experiment ID: 108689 Result: Up-regulated in Transcription
  misc_feature: MA Experiment 108689 PARAMETER Experiment Name: Zm_Drought_Roots_P Parameter: Age (day) Value: 9
  misc_feature: MA Experiment 108689 PARAMETER Experiment Name: Zm_Drought_Roots_P Parameter: Organism Value: Zea mays
  misc_feature: MA Experiment 108689 PARAMETER Experiment Name: Zm_Drought_Roots_P Parameter: Plant Line Value: 35A19
  misc_feature: MA Experiment 108689 PARAMETER Experiment Name: Zm_Drought_Roots_P Parameter: Timepoint (hr) Value: 24
  misc_feature: MA Experiment 108689 PARAMETER Experiment Name: Zm_Drought_Roots_P Parameter: Tissue Value: Roots
  misc_feature: MA Experiment 108689 PARAMETER Experiment Name: Zm_Drought_Roots_P Parameter: Treatment Value: Drought vs. No Drought
tctgcttcaaccaagttacttgttgatattctccttagtgagtgggaggacaggatgactcgaggcttattccgctacgatgtcactgcctgtgagaccaaggtcattcctggcaaccttgggtttgttgcacaactcaatgaagggcgccatcttaagaagcgccctactgagtttcgtgtggaccgtgtgctccagccgtttgaccctgccaaattcaatttcacaaaagttggccaggaagaggttctcttccaatttgagaatagtggtggtgatgacagctatttcctgaacaacgctccaatcattgctgttgatcgggctccaaatgttattgctatcaatgtaagcccaattgaatatggacatgtgcttctcattcctcgtgttctggaccgcctgcctcagaggattgatccagagagcttcttgcttgcactgcaaatggcagccgagggaggtagcccatacttcaggcttggttacaatagcttgggtgcgtttgccaccatcaatcacctccactttcaggcgtactacttgtcagtgcctttccctgttgagaaggcagctacccacaagatcccactctctgaggacacgaagaagaatggggtgaccgtgtccaagctgataaattatcctgtgagaggcctggtatttgagggagggaacaccctggacgacctggccactgtggtttctaatgcttggcatttggctgcaagacaacaatgtgccttacaatgtgctcatttctgactgtggcaagagggttttcctgttcccccagtgctacgcagagaagcaggctctgggtgaagtgagccaggagctgctggacactcaggtgaacccagctgtgtgggagatcagtggacacatggtgctgaaacggaggatggactatgaggaggcatctgaaacctccgcgtggaaactcctcgccgaggtctctctctccgaggagcgcttcgaggaagtgaaggcgtacatcttcagcgctgctggcctggttcagtatgatgaggaagaggaggaagccagcgacggtgagggccctacggcctatgttcctgtcaaggttacccctctgcccgtcgctgaagggtgcctcgtcctcccgtgagtccgtggtcggttaaataaagggccgtatatgattgcgagccctgtgctctgccgctattttcttctcgtttgtgtcttgctgctctcgtggtgaactcgctactccagtactctgcaatattaagcagaagctattgtattgtttgggtcgtttgtcagctaaattgaaatgcgatggacatttact

SEQ ID NO: 16235 - protein, 254 aa, Zea mays subsp. mays
  peptide (1)..(254): Ceres Seq. ID no. 12373032
  misc_feature (11)..(236): Homolog of NCBI NO: 34527348 NR Description: unnamed protein product [Homo sapiens]
  misc_feature (11)..(236): Homolog of NCBI NO: 26351153 NR Description: unnamed protein product [Mus musculus]
  misc_feature (11)..(236): Homolog of NCBI NO: 22766878 NR Description: Unknown (protein for MGC:47349) [Mus musculus]
  misc_feature (11)..(236): Homolog of NCBI NO: 27677438 NR Description: similar to CG3552-PC [Drosophila melanogaster]
  misc_feature (34)..(236): Homolog of NCBI NO: 34907712 NR Description: P0035F12.16 [Oryza sativa (japonica
  misc_feature (7)..(237): Homolog of NCBI NO: 21070346 NR Description: VTC2 [Arabidopsis thaliana]
  misc_feature (7)..(237): Homolog of NCBI NO: 7452423 NR Description: hypothetical protein F10M23.190 - Arabidopsis
  misc_feature (7)..(237): Homolog of NCBI NO: 15810139 NR Description: unknown protein [Arabidopsis thaliana]
  misc_feature (7)..(237): Homolog of NCBI NO: 18416877 NR Description: putative protein
  misc_feature (7)..(238): Homolog of NCBI NO: 15240467 NR Description: putative protein
SASTKLLVDILLSEWEDRMTRGLFRYDVTACETKVIPGNLGFVAQLNEGRHLKKRPTEFRVDRVLQPFDPAKFNFTKVGQEEVLFQFENSGGDDSYFLNNAPIIAVDRAPNVIAINVSPIEYGHVLLIPRVLDRLPQRIDPESFLLALQMAAEGGSPYFRLGYNSLGAFATINHLHFQAYYLSVPFPVEKAATHKIPLSEDTKKNGVTVSKLINYPVRGLVFEGGNTLDDLATVVSNAWHLAARQQCALQCAHF

SEQ ID NO: 16236 - protein, 236 aa, Zea mays subsp. mays
  peptide (1)..(236): Ceres Seq. ID no. 12373033
  misc_feature (1)..(218): Homolog of NCBI NO: 34527348 NR Description: unnamed protein product [Homo sapiens]
  misc_feature (1)..(218): Homolog of NCBI NO: 26351153 NR Description: unnamed protein product [Mus musculus]
  misc_feature (1)..(218): Homolog of NCBI NO: 22766878 NR Description: Unknown (protein for MGC:47349) [Mus musculus]
  misc_feature (1)..(218): Homolog of NCBI NO: 27677438 NR Description: similar to CG3552-PC [Drosophila melanogaster]
  misc_feature (16)..(218): Homolog of NCBI NO: 34907712 NR Description: P0035F12.16 [Oryza sativa (japonica
  misc_feature (1)..(219): Homolog of NCBI NO: 21070346 NR Description: VTC2 [Arabidopsis thaliana]
  misc_feature (1)..(219): Homolog of NCBI NO: 7452423 NR Description: hypothetical protein F10M23.190 - Arabidopsis
  misc_feature (1)..(219): Homolog of NCBI NO: 15810139 NR Description: unknown protein [Arabidopsis thaliana]
  misc_feature (1)..(219): Homolog of NCBI NO: 18416877 NR Description: putative protein
  misc_feature (1)..(220): Homolog of NCBI NO: 15240467 NR Description: putative protein
MTRGLFRYDVTACETKVIPGNLGFVAQLNEGRHLKKRPTEFRVDRVLQPFDPAKFNFTKVGQEEVLFQFENSGGDDSYFLNNAPIIAVDRAPNVIAINVSPIEYGHVLLIPRVLDRLPQRIDPESFLLALQMAAEGGSPYFRLGYNSLGAFATINHLHFQAYYLSVPFPVEKAATHKIPLSEDTKKNGVTVSKLINYPVRGLVFEGGNTLDDLATVVSNAWHLAARQQCALQCAHF

SEQ ID NO: 16237 - protein, 140 aa, Zea mays subsp. mays
  peptide (1)..(140): Ceres Seq. ID no. 12373034
  misc_feature (4)..(97): Homolog of NCBI NO: 34907712 NR Description: P0035F12.16 [Oryza sativa (japonica
  misc_feature (4)..(111): Homolog of NCBI NO: 21070346 NR Description: VTC2 [Arabidopsis thaliana]
  misc_feature (4)..(111): Homolog of NCBI NO: 7452423 NR Description: hypothetical protein F10M23.190 - Arabidopsis
  misc_feature (4)..(111): Homolog of NCBI NO: 15810139 NR Description: unknown protein [Arabidopsis thaliana]
  misc_feature (4)..(111): Homolog of NCBI NO: 18416877 NR Description: putative protein
  misc_feature (4)..(112): Homolog of NCBI NO: 15240467 NR Description: putative protein
MLGIWLQDNNVPYNVLISDCGKRVFLFPQCYAEKQALGEVSQELLDTQVNPAVWEISGHMVLKRRMDYEEASETSAWKLLAEVSLSEERFEEVKAYIFSAAGLVQYDEEEEEASDGEGPTAYVPVKVTPLPVAEGCLVLP

SEQ ID NO: 16238 - DNA, 1181 bp, Zea mays subsp. mays
  misc_feature (1)..(1181): Ceres Seq. ID no. 12566272
  misc_feature: MA Experiment ID: 108522 Result: Up-regulated in Transcription
  misc_feature: MA Experiment 108522 PARAMETER Experiment Name: Zm_42deg_Heat_P Parameter: Age (day) Value: 8
  misc_feature: MA Experiment 108522 PARAMETER Experiment Name: Zm_42deg_Heat_P Parameter: Organism Value: Zea mays
  misc_feature: MA Experiment 108522 PARAMETER Experiment Name: Zm_42deg_Heat_P Parameter: Plant Line Value: 35A19
  misc_feature: MA Experiment 108522 PARAMETER Experiment Name: Zm_42deg_Heat_P Parameter: Temperature (deg C) Value: 42 vs. 22
  misc_feature: MA Experiment 108522 PARAMETER Experiment Name: Zm_42deg_Heat_P Parameter: Timepoint (hr) Value: 1
  misc_feature: MA Experiment 108522 PARAMETER Experiment Name: Zm_42deg_Heat_P Parameter: Tissue Value: Aerial
  misc_feature: MA Experiment ID: 108523 Result: Up-regulated in Transcription
  misc_feature: MA Experiment 108523 PARAMETER Experiment Name: Zm_42deg_Heat_P Parameter: Age (day) Value: 8
  misc_feature: MA Experiment 108523 PARAMETER Experiment Name: Zm_42deg_Heat_P Parameter: Organism Value: Zea mays
  misc_feature: MA Experiment 108523 PARAMETER Experiment Name: Zm_42deg_Heat_P Parameter: Plant Line Value: 35A19
  misc_feature: MA Experiment 108523 PARAMETER Experiment Name: Zm_42deg_Heat_P Parameter: Temperature (deg C) Value: 42 vs. 22
  misc_feature: MA Experiment 108523 PARAMETER Experiment Name: Zm_42deg_Heat_P Parameter: Timepoint (hr) Value: 6
  misc_feature: MA Experiment 108523 PARAMETER Experiment Name: Zm_42deg_Heat_P Parameter: Tissue Value: Aerial
  misc_feature: MA Experiment ID: 108529 Result: Down-regulated in Transcription
  misc_feature: MA Experiment 108529 PARAMETER Experiment Name: Zm_Imbibed_Seeds_P Parameter: Age (day) Value: 5 vs. 2
  misc_feature: MA Experiment 108529 PARAMETER Experiment Name: Zm_Imbibed_Seeds_P Parameter: Organism Value: Zea mays
  misc_feature: MA Experiment 108529 PARAMETER Experiment Name: Zm_Imbibed_Seeds_P Parameter: Plant Line Value: 35A19
  misc_feature: MA Experiment 108529 PARAMETER Experiment Name: Zm_Imbibed_Seeds_P Parameter: Tissue Value: Roots vs. Embryo
  misc_feature: MA Experiment ID: 108544 Result: Down-regulated in Transcription
  misc_feature: MA Experiment ID: 108546 Result: Down-regulated in Transcription
  misc_feature: MA Experiment 108546 PARAMETER Experiment Name: Zm_Imbibed_Seeds_P Parameter: Age (day) Value: 3 vs. 2
  misc_feature: MA Experiment 108546 PARAMETER Experiment Name: Zm_Imbibed_Seeds_P Parameter: Organism Value: Zea mays
  misc_feature: MA Experiment 108546 PARAMETER Experiment Name: Zm_Imbibed_Seeds_P Parameter: Plant Line Value: 35A19
  misc_feature: MA Experiment 108546 PARAMETER Experiment Name: Zm_Imbibed_Seeds_P Parameter: Tissue Value: Roots vs. Embryo
  misc_feature: MA Experiment ID: 108689 Result: Down-regulated in Transcription
  misc_feature: MA Experiment 108689 PARAMETER Experiment Name: Zm_Drought_Roots_P Parameter: Age (day) Value: 9
  misc_feature: MA Experiment 108689 PARAMETER Experiment Name: Zm_Drought_Roots_P Parameter: Organism Value: Zea mays
  misc_feature: MA Experiment 108689 PARAMETER Experiment Name: Zm_Drought_Roots_P Parameter: Plant Line Value: 35A19
  misc_feature: MA Experiment 108689 PARAMETER Experiment Name: Zm_Drought_Roots_P Parameter: Timepoint (hr) Value: 24
  misc_feature: MA Experiment 108689 PARAMETER Experiment Name: Zm_Drought_Roots_P Parameter: Tissue Value: Roots
  misc_feature: MA Experiment 108689 PARAMETER Experiment Name: Zm_Drought_Roots_P Parameter: Treatment Value: Drought vs. No Drought
  misc_feature: MA Experiment ID: 20000477 Result: Down-regulated in Transcription
  misc_feature: MA Experiment 20000477 PARAMETER Experiment Name: Zm_5mM_SA_P Parameter: Age (day) Value: 10
  misc_feature: MA Experiment 20000477 PARAMETER Experiment Name: Zm_5mM_SA_P Parameter: Organism Value: Zea mays
  misc_feature: MA Experiment 20000477 PARAMETER Experiment Name: Zm_5mM_SA_P Parameter: Plant Line Value: 35A19
  misc_feature: MA Experiment 20000477 PARAMETER Experiment Name: Zm_5mM_SA_P Parameter: Timepoint (hr) Value: 48
  misc_feature: MA Experiment 20000477 PARAMETER Experiment Name: Zm_5mM_SA_P Parameter: Tissue Value: Aerial
  misc_feature: MA Experiment 20000477 PARAMETER Experiment Name: Zm_5mM_SA_P Parameter: Treatment Value: 5mM SA vs. No Treatment
  misc_feature: MA Experiment ID: 20000478 Result: Down-regulated in Transcription
  misc_feature: MA Experiment 20000478 PARAMETER Experiment Name: Zm_5mM_SA_P Parameter: Age (day) Value: 11
  misc_feature: MA Experiment 20000478 PARAMETER Experiment Name: Zm_5mM_SA_P Parameter: Organism Value: Zea mays
  misc_feature: MA Experiment 20000478 PARAMETER Experiment Name: Zm_5mM_SA_P Parameter: Plant Line Value: 35A19
  misc_feature: MA Experiment 20000478 PARAMETER Experiment Name: Zm_5mM_SA_P Parameter: Timepoint (hr) Value: 72
  misc_feature: MA Experiment 20000478 PARAMETER Experiment Name: Zm_5mM_SA_P Parameter: Tissue Value: Aerial
  misc_feature: MA Experiment 20000478 PARAMETER Experiment Name: Zm_5mM_SA_P Parameter: Treatment Value: 5mM SA vs. No Treatment
  misc_feature: MA Experiment ID: 20000479 Result: Down-regulated in Transcription
  misc_feature: MA Experiment 20000479 PARAMETER Experiment Name: Zm_Drought_P Parameter: Age (day) Value: 10
  misc_feature: MA Experiment 20000479 PARAMETER Experiment Name: Zm_Drought_P Parameter: Organism Value: Zea mays
  misc_feature: MA Experiment 20000479 PARAMETER Experiment Name: Zm_Drought_P Parameter: Plant Line Value: 35A19
  misc_feature: MA Experiment 20000479 PARAMETER Experiment Name: Zm_Drought_P Parameter: Timepoint (hr) Value: 48
  misc_feature: MA Experiment 20000479 PARAMETER Experiment Name: Zm_Drought_P Parameter: Tissue Value: Aerial
  misc_feature: MA Experiment 20000479 PARAMETER Experiment Name: Zm_Drought_P Parameter: Treatment Value: Drought vs. No Drought
  misc_feature: MA Experiment ID: 20000487 Result: Down-regulated in Transcription
  misc_feature: MA Experiment 20000487 PARAMETER Experiment Name: Zm_50mM_NH4NO3_L_to_H_P Parameter: Organism Value: Zea mays
  misc_feature: MA Experiment 20000487 PARAMETER Experiment Name: Zm_50mM_NH4NO3_L_to_H_P Parameter: Timepoint (hr) Value: 4
  misc_feature: MA Experiment 20000487 PARAMETER Experiment Name: Zm_50mM_NH4NO3_L_to_H_P Parameter: Tissue Value: Leaves
  misc_feature: MA Experiment 20000487 PARAMETER Experiment Name: Zm_50mM_NH4NO3_L_to_H_P Parameter: Treatment Value: 50mM NH4NO3 vs. 100mM Mannitol
  misc_feature: MA Experiment ID: 20000626 Result: Down-regulated in Transcription
  misc_feature: MA Experiment 20000626 PARAMETER Experiment Name: Zm_Herbicide-Treatments_P Parameter: Timepoint (hr) Value: 12
  misc_feature: MA Experiment 20000626 PARAMETER Experiment Name: Zm_Herbicide-Treatments_P Parameter: Tissue Value: Aerial
  misc_feature: MA Experiment 20000626 PARAMETER Experiment Name: Zm_Herbicide-Treatments_P Parameter: Treatment Value: Roundup vs. No Treatment
  misc_feature: MA Experiment ID: 20000632 Result: Down-regulated in Transcription
  misc_feature: MA Experiment 20000632 PARAMETER Experiment Name: Zm_Herbicide-Treatments_P Parameter: Timepoint (hr) Value: 4
  misc_feature: MA Experiment 20000632 PARAMETER Experiment Name: Zm_Herbicide-Treatments_P Parameter: Tissue Value: Aerial
  misc_feature: MA Experiment 20000632 PARAMETER Experiment Name: Zm_Herbicide-Treatments_P Parameter: Treatment Value: Glean vs. No Treatment
  misc_feature: MA Experiment ID: 20000633 Result: Down-regulated in Transcription
  misc_feature: MA Experiment 20000633 PARAMETER Experiment Name: Zm_Herbicide-Treatments_P Parameter: Timepoint (hr) Value: 4
  misc_feature: MA Experiment 20000633 PARAMETER Experiment Name: Zm_Herbicide-Treatments_P Parameter: Tissue Value: Aerial
  misc_feature: MA Experiment 20000633 PARAMETER Experiment Name: Zm_Herbicide-Treatments_P Parameter: Treatment Value: Trimec vs. No Treatment
acacacacacatccatcaaagaaacaagcgcacaagatcaaatacctcgccgccaataatggcctccaggtcctccatcctgctcgccatggtgatgctggctgcgctattcgccgttggtttgtgcaccacccccctcaccttccaggtcggcaagggatccaagcctggccacctgatcctcacccccaatgttgccaccatatccgacgtggagatcaaagagcacggtggcgatgacttctcctttacgctcaaggagggcccgactggcacctggacgctcgacaccaaggccccgctcaagtaccccctttgcatccgctttgctgtcaagtccggcggctaccgcatcgccgacgacgtcatccctgccgatttcaaggccggcaccacctataagaccacactcagcatctaatcaatctctggtgatgaattagatgctgagtgtggtcttataggtggcggcgcctacgggagctccccgacgccggcttacggcgacgccccctcgcacggcggcatagggacctcgtcgccgacgccgttcgacccccacagcttcggctctctcccgggctcctgcgactactggaggtcgcacccgatggagatctggtcggcgatcggcgggcggttcccgggcacgtcgtcgtcgatggggacgatgggccacttcttcggcgcggctggcagggtaggcgggacggacgtgagcatccaggacgcgctggcgaacacgcggtcggacggcgcgggcgcgctgctgcgcgagggcgccgccgcgctgctcaactccatgacccgttcgggcttcccctacacgacggagcaggtgcgcgacacgttcgccgcggcggcggcggcggcggcgggcgggtccgacggcgcggccgcggcgcaggcggccgccttcaggatggccaacgaggggaaggcgtagagatcgagcatgtgtacgtacgtgcatggtaaactggagtgtgtgctccggagcacggtacattcttggctgctgctgttgctttcatgcatggctacgacgtaatacgtgccttggttgtgtgcgtttgtgtgtgtgtgtgtgtttgagtgtttcatcggtgaagaagacaccgagctagacctagcttattctggtgtgtagtcgctcgctcttgctattttttgtcgtttgg

SEQ ID NO: 16239 - protein, 139 aa, Zea mays subsp. mays
  peptide (1)..(139): Ceres Seq. ID no. 12566273
  misc_feature (46)..(124): Pfam Name: Pollen allergen Pfam Description: Pollen allergen
  misc_feature (44)..(137): Homolog of NCBI NO: 10314021 NR Description: acidic Cyn d 1 isoallergen isoform 1 precursor
  misc_feature (45)..(134): Homolog of NCBI NO: 1093120 NR Description: allergen Dac g II
  misc_feature (45)..(134): Homolog of NCBI NO: 126386 NR Description: POLLEN ALLERGEN LOL P 2-A (LOL P II-A)
  misc_feature (20)..(133): Homolog of NCBI NO: 4007040 NR Description: pollen allergen (group II) [Dactylis glomerata]
  misc_feature (21)..(133): Homolog of NCBI NO: 1171009 NR Description: Pollen allergen Phl p 2 precursor (Phl p II)
  misc_feature (20)..(133): Homolog of NCBI NO: 4006978 NR Description: pollen allergen (group II) [Cynodon dactylon]
  misc_feature (20)..(139): Homolog of NCBI NO: 38345097 NR Description: OSJNBa0050F15.8 [Oryza sativa (japonica
  misc_feature (20)..(139): Homolog of NCBI NO: 21740569 NR Description: OSJNBa0050F15.7 [Oryza sativa (japonica
  misc_feature (20)..(139): Homolog of NCBI NO: 38345096 NR Description: OSJNBa0050F15.7 [Oryza sativa (japonica
  misc_feature (20)..(139): Homolog of NCBI NO: 33188338 NR Description: group 3 pollen allergen [Zea mays]
HTHIHQRNKRTRSNTSPPIMASRSSILLAMVMLAALFAVGLCTTPLTFQVGKGSKPGHLILTPNVATISDVEIKEHGGDDFSFTLKEGPTGTWTLDTKAPLKYPLCIRFAVKSGGYRIADDVIPADFKAGTTYKTTLSI

SEQ ID NO: 16240 - protein, 120 aa, Zea mays subsp. mays
  peptide (1)..(120): Ceres Seq. ID no. 12566274
  misc_feature (27)..(105): Pfam Name: Pollen allergen Pfam Description: Pollen allergen
  misc_feature (1)..(120): Homolog of NCBI NO: 38345096 NR Description: OSJNBa0050F15.7 [Oryza sativa (japonica
  misc_feature (1)..(120): Homolog of NCBI NO: 33188338 NR Description: group 3 pollen allergen [Zea mays]
  misc_feature (25)..(118): Homolog of NCBI NO: 10314021 NR Description: acidic Cyn d 1 isoallergen isoform 1 precursor
  misc_feature (26)..(115): Homolog of NCBI NO: 1093120 NR Description: allergen Dac g II
  misc_feature (26)..(115): Homolog of NCBI NO: 126386 NR Description: POLLEN ALLERGEN LOL P 2-A (LOL P II-A)
  misc_feature (1)..(114): Homolog of NCBI NO: 4007040 NR Description: pollen allergen (group II) [Dactylis glomerata]
  misc_feature (2)..(114): Homolog of NCBI NO: 1171009 NR Description: Pollen allergen Phl p 2 precursor (Phl p II)
  misc_feature (1)..(114): Homolog of NCBI NO: 4006978 NR Description: pollen allergen (group II) [Cynodon dactylon]
  misc_feature (1)..(120): Homolog of NCBI NO: 38345097 NR Description: OSJNBa0050F15.8 [Oryza sativa (japonica
  misc_feature (1)..(120): Homolog of NCBI NO: 21740569 NR Description: OSJNBa0050F15.7 [Oryza sativa (japonica
MASRSSILLAMVMLAALFAVGLCTTPLTFQVGKGSKPGHLILTPNVATISDVEIKEHGGDDFSFTLKEGPTGTWTLDTKAPLKYPLCIRFAVKSGGYRIADDVIPADFKAGTTYKTTLSI

SEQ ID NO: 16241 - protein, 111 aa, Zea mays subsp. mays
  peptide (1)..(111): Ceres Seq. ID no. 12566275
  misc_feature (1)..(110): Homolog of NCBI NO: 15228010 NR Description: En/Spm-like transposon protein
  misc_feature (1)..(109): Homolog of NCBI NO: 34910776 NR Description: VsaA -like protein [Oryza sativa (japonica
  misc_feature (1)..(109): Homolog of NCBI NO: 34903682 NR Description: B1015E06.26 [Oryza sativa (japonica
MEIWSAIGGRFPGTSSSMGTMGHFFGAAGRVGGTDVSIQDALANTRSDGAGALLREGAAALLNSMTRSGFPYTTEQVRDTFAAAAAAAAGGSDGAAAAQAAAFRMANEGKA

SEQ ID NO: 16242 - DNA, 1320 bp, Zea mays subsp. mays
  misc_feature (1)..(1320): Ceres Seq. ID no. 13577760
  misc_feature: MA Experiment ID: 108543 Result: Down-regulated in Transcription
  misc_feature: MA Experiment ID: 108687 Result: Up-regulated in Transcription
  misc_feature: MA Experiment 108687 PARAMETER Experiment Name: Zm_Embryos-Flowers__P Parameter: Tissue Value: Embryo vs. Aerial+
  misc_feature: MA Experiment ID: 20000492 Result: Down-regulated in Transcription
  misc_feature: MA Experiment 20000492 PARAMETER Experiment Name: Zm_Hybrid_Seed_Dev_P Parameter: DAP Value: 12
  misc_feature: MA Experiment 20000492 PARAMETER Experiment Name: Zm_Hybrid_Seed_Dev_P Parameter: Organism Value: Zea mays
  misc_feature: MA Experiment 20000492 PARAMETER Experiment Name: Zm_Hybrid_Seed_Dev_P Parameter: Plant Line Value: 35A19
  misc_feature: MA Experiment 20000492 PARAMETER Experiment Name: Zm_Hybrid_Seed_Dev_P Parameter: Tissue Value: Fert Kernel vs. Unfert Floret
  misc_feature: MA Experiment ID: 20000535 Result: Down-regulated in Transcription
  misc_feature: MA Experiment 20000535 PARAMETER Experiment Name: Zm_Hybrid_Seed_Dev_P Parameter: DAP Value: 30 vs. 12
  misc_feature: MA Experiment 20000535 PARAMETER Experiment Name: Zm_Hybrid_Seed_Dev_P Parameter: Organism Value: Zea mays
  misc_feature: MA Experiment 20000535 PARAMETER Experiment Name: Zm_Hybrid_Seed_Dev_P Parameter: Plant Line Value: 35A19
  misc_feature: MA Experiment 20000535 PARAMETER Experiment Name: Zm_Hybrid_Seed_Dev_P Parameter: Tissue Value: Embryo vs. Unfert Floret
actaggtcgacaagaaaatggtggtagcgtcgagtggtggcgcgggaggcgtggagggtggcagcggctgcggtgtctcggcgtcggtgccgccggtggtgtcgtcgagcggtggcgcgggagaggtggagggtggcgacggcggctcggctgcggtgtcggggtcccgccggagggtgaaggggtcgtggacgccggaggaggacgagctgctgcggcgcgcgatcacgcggcacgggccgcggaactggaccgtgatcagctccgagatccccggccggtccggcaagtcgtgccgcctgcggtggtgcaaccagctcagccccagcgtggagcgccgcgccttcacgcccgaggaggacgccatcatcgtcgccgcgcacgcgcagcacggcaacaggtgggccaccatcgcgcggatgctccacggccgcaccgacaactccgtcaagaaccactggaactccacgctgctccgccagcgcagggcggcggccgcccacgccagcgccgccgggtgcgccctccagctgcggccggcaaccacggcctccgtcccgctccgccatctgctggatcgtcctaaggaggcggcggcatccgtttcgttccgtcgtctggacccaaaggcggaggaggaggaggacgaggacatggacgaaggcggcagcagcagcgaggattcggcgcatcggcatcgttcgctgtcacccgcgccggtcgagccgctcacactcaatctatttagcgacggagcccacgggctccctacccccgcccccgcacccgcaccgcagggtacggcagccagaacggagggtgccgccatgaggaggaaggcgaagctggagcaggacccgtggttgagcggcggagtccacggggcccccgcacccgcgccgcagagtgcggcagcgagaacggaaggtgccgtcgtcacgaggatgaagacgaagctggagcatgacccgtggttggtgaccttggtgcggcagatgatatctgtggaggtggagcggcagatgcatggagtgggcccgcaggccagaagcagcgccggtggtggtggtggtgcagacggcgacggcgtgaacggccaggacacgtcgatggacgtggacccgtgacggaatggcggcggtggcgttgggcttaccgagttccttctaccctgtttgtcccgttcgctaatcgcgcgcttgaaccattaacgtccgtcacaccatccgttgatacgtaggtattctagcttgtggttcagtattactttcactctagctgtgatcatcctatagattgaagcttctatttttttcttgg

SEQ ID NO: 16243 - protein, 369 aa, Zea mays subsp. mays
  peptide (1)..(369): Ceres Seq. ID no. 13577761
  misc_feature (55)..(101): Pfam Name: Myb-like DNA-binding domain Pfam Description: Myb-like DNA-binding domain
  misc_feature (53)..(155): Homolog of NCBI NO: 15235484 NR Description: myb DNA-binding protein (AtMYB73) [Arabidopsis
  misc_feature (47)..(155): Homolog of NCBI NO: 21593586 NR Description: putative MYB family transcription factor
  misc_feature (47)..(155): Homolog of NCBI NO: 15227806 NR Description: MYB family transcription factor [Arabidopsis
  misc_feature (53)..(155): Homolog of NCBI NO: 27529846 NR Description: Myb-like protein [Nicotiana tabacum]
  misc_feature (53)..(155): Homolog of NCBI NO: 21592897 NR Description: myb-related protein, 33.3K [Arabidopsis thaliana]
  misc_feature (53)..(155): Homolog of NCBI NO: 15240708 NR Description: myb family transcription factor [Arabidopsis
  misc_feature (53)..(155): Homolog of NCBI NO: 15450393 NR Description: AT5g67300/K8K14_2 [Arabidopsis thaliana]
  misc_feature (53)..(155): Homolog of NCBI NO: 2129648 NR Description: myb-related protein, 33.3K - Arabidopsis thaliana
  misc_feature (53)..(155): Homolog of NCBI NO: 9954114 NR Description: tuber-specific and sucrose-responsive element
  misc_feature (53)..(223): Homolog of NCBI NO: 9954112 NR Description: tuber-specific and sucrose-responsive element
MVVASSGGAGGVEGGSGCGVSASVPPVVSSSGGAGEVEGGDGGSAAVSGSRRRVKGSWTPEEDELLRRAITRHGPRNWTVISSEIPGRSGKSCRLRWCNQLSPSVERRAFTPEEDAIIVAAHAQHGNRWATIARMLHGRTDNSVKNHWNSTLLRQRRAAAAHASAAGCALQLRPATTASVPLRHLLDRPKEAAASVSFRRLDPKAEEEEDEDMDEGGSSSEDSAHRHRSLSPAPVEPLTLNLFSDGAHGLPTPAPAPAPQGTAARTEGAAMRRKAKLEQDPWLSGGVHGAPAPAPQSAAARTEGAVVTRMKTKLEHDPWLVTLVRQMISVEVERQMHGVGPQARSSAGGGGGADGDGVNGQDTSMDVDP

SEQ ID NO: 16244 - protein, 235 aa, Zea mays subsp. mays
  peptide (1)..(235): Ceres Seq. ID no. 13577762
  misc_feature (1)..(21): Homolog of NCBI NO: 15235484 NR Description: myb DNA-binding protein (AtMYB73) [Arabidopsis
  misc_feature (1)..(21): Homolog of NCBI NO: 21593586 NR Description: putative MYB family transcription factor
  misc_feature (1)..(21): Homolog of NCBI NO: 15227806 NR Description: MYB family transcription factor [Arabidopsis
  misc_feature (1)..(21): Homolog of NCBI NO: 27529846 NR Description: Myb-like protein [Nicotiana tabacum]
  misc_feature (1)..(21): Homolog of NCBI NO: 15240708 NR Description: myb family transcription factor [Arabidopsis
  misc_feature (1)..(21): Homolog of NCBI NO: 15450393 NR Description: AT5g67300/K8K14_2 [Arabidopsis thaliana]
  misc_feature (1)..(21): Homolog of NCBI NO: 21592897 NR Description: myb-related protein, 33.3K [Arabidopsis thaliana]
  misc_feature (1)..(21): Homolog of NCBI NO: 2129648 NR Description: myb-related protein, 33.3K - Arabidopsis thaliana
  misc_feature (1)..(21): Homolog of NCBI NO: 9954114 NR Description: tuber-specific and sucrose-responsive element
  misc_feature (1)..(89): Homolog of NCBI NO: 9954112 NR Description: tuber-specific and sucrose-responsive element
MLHGRTDNSVKNHWNSTLLRQRRAAAAHASAAGCALQLRPATTASVPLRHLLDRPKEAAASVSFRRLDPKAEEEEDEDMDEGGSSSEDSAHRHRSLSPAPVEPLTLNLFSDGAHGLPTPAPAPAPQGTAARTEGAAMRRKAKLEQDPWLSGGVHGAPAPAPQSAAARTEGAVVTRMKTKLEHDPWLVTLVRQMISVEVERQMHGVGPQARSSAGGGGGADGDGVNGQDTSMDVDP

SEQ ID NO: 16245 - protein, 194 aa, Zea mays subsp. mays
  peptide (1)..(194): Ceres Seq. ID no. 13577763
LGRQENGGSVEWWRGRRGGWQRLRCLGVGAAGGVVERWRGRGGGWRRRLGCGVGVPPEGEGVVDAGGGRAAAARDHAARAAELDRDQLRDPRPVRQVVPPAVVQPAQPQRGAPRLHARGGRHHRRRARAARQQVGHHRADAPRPHRQLRQEPLELHAAPPAQGGGRPRQRRRVRPPAAAGNHGLRPAPPSAGSS

SEQ ID NO: 16246 - DNA, 1449 bp, Zea mays subsp. mays
  misc_feature (1)..(1449): Ceres Seq. ID no. 12349549
  misc_feature: MA Experiment ID: 108523 Result: Up-regulated in Transcription
  misc_feature: MA Experiment 108523 PARAMETER Experiment Name: Zm_42deg_Heat_P Parameter: Age (day) Value: 8
  misc_feature: MA Experiment 108523 PARAMETER Experiment Name: Zm_42deg_Heat_P Parameter: Organism Value: Zea mays
  misc_feature: MA Experiment 108523 PARAMETER Experiment Name: Zm_42deg_Heat_P Parameter: Plant Line Value: 35A19
  misc_feature: MA Experiment 108523 PARAMETER Experiment Name: Zm_42deg_Heat_P Parameter: Temperature (deg C) Value: 42 vs. 22
  misc_feature: MA Experiment 108523 PARAMETER Experiment Name: Zm_42deg_Heat_P Parameter: Timepoint (hr) Value: 6
  misc_feature: MA Experiment 108523 PARAMETER Experiment Name: Zm_42deg_Heat_P Parameter: Tissue Value: Aerial
  misc_feature: MA Experiment ID: 108543 Result: Down-regulated in Transcription
  misc_feature: MA Experiment ID: 108544 Result: Up-regulated in Transcription
  misc_feature: MA Experiment ID: 20000478 Result: Up-regulated in Transcription
  misc_feature: MA Experiment 20000478 PARAMETER Experiment Name: Zm_5mM_SA_P Parameter: Age (day) Value: 11
  misc_feature: MA Experiment 20000478 PARAMETER Experiment Name: Zm_5mM_SA_P Parameter: Organism Value: Zea mays
  misc_feature: MA Experiment 20000478 PARAMETER Experiment Name: Zm_5mM_SA_P Parameter: Plant Line Value: 35A19
  misc_feature: MA Experiment 20000478 PARAMETER Experiment Name: Zm_5mM_SA_P Parameter: Timepoint (hr) Value: 72
  misc_feature: MA Experiment 20000478 PARAMETER Experiment Name: Zm_5mM_SA_P Parameter: Tissue Value: Aerial
  misc_feature: MA Experiment 20000478 PARAMETER Experiment Name: Zm_5mM_SA_P Parameter: Treatment Value: 5mM SA vs. No Treatment
  misc_feature: MA Experiment ID: 20000626 Result: Up-regulated in Transcription
  misc_feature: MA Experiment 20000626 PARAMETER Experiment Name: Zm_Herbicide-Treatments_P Parameter: Timepoint (hr) Value: 12
  misc_feature: MA Experiment 20000626 PARAMETER Experiment Name: Zm_Herbicide-Treatments_P Parameter: Tissue Value: Aerial
  misc_feature: MA Experiment 20000626 PARAMETER Experiment Name: Zm_Herbicide-Treatments_P Parameter: Treatment Value: Roundup vs. No Treatment
actcggaaaccgtaagccgtgcaaacaacaggcgacgcaccggcgccgcgcgcgcacgcctatttctagctcgatcgtgtcctctcgccgcgctccggagtcgtcaatccacacgcttgggcgagcgagccttgttgcggaagcgcgcggacgacatgctgatgctgcacccgaggctggtgtcgtcgagcgccgtggacgacgaggaccactgcgagagctgcgcctgctactgcgccatggtgtcctgcgtctcgctgctgctcttcatcgtgctggctgccgcggtcagcatcccgagggcctgcgccatcgccggcgtcatgctgctcctgctggggctcgtcggctggctcgtgcccacggggaatggagccggtccggcggcgcagcagcagcagggccaggctgctgccgatcctggggcgcggcggctggtggtgcaccaccggtgcgcgtgcgggctaacggacgccgctatcgccgcgctgccggcggcgttcacgtactacgaggcgcccgcggtgaagaatggagtcgggagcgaggacgagaagcagccgcgcggcagctccttgctgtgcgcggtttgtctggacgacgtgcggggcggcgagatggtgcggcagctgccggcgtgccgccacctgttccacgtcgactgcgtcgacgcctggttgcgcgctcaccggacgtgcccgctctgccgctgccagctctccccgaggaacgacgtcagcacaaagcgggccgccacggtcgtcggggagtcatccgtcgacgcgttgccgccggtgtgagtgtcactcactcatcaatcctccgaagctggccggcgcattggtaaactgtattggaccagattcttcatttcttaacaccacataatagaacatatttctgcccgaataaagaaaacttcggcacgatttcgagggcgcgcagcagacttgtgtctctactctctaggcatgagcacgagcctcaacatcgatcgagtggttccaaccacatcgcccgacccgacgcttccagcagcagtcgcgaaagaagggaaaaaaatttggtgcatgcagctcctcacaaaaaagaggatagaccccacccgcagcaacaaaaatgttatctggtggatctgcaggtggggtccatccacctttttgtgagaggctgcaaaccactctggtttgcagcagtgctgcaccaaatttttttccgaaagaaggagcatctcgccgatggggacgggtaccagaccgtacggaccagggagtctacaacttgacacgcttcagttctgccgctaccagacaggcaatcgagtctatcatgtcagtgccagcttttgtactgtatgctccgttgcaccgttacatttttgtgagttgtaaaaccagaacaaatacccgtgtttcttaggaaactgaaggcttttgggctcttggatcc

SEQ ID NO: 16247 - protein, 281 aa, Zea mays subsp. mays
  peptide (1)..(281): Ceres Seq. ID no. 12349550
LGNRKPCKQQATHRRRARTPISSSIVSSRRAPESSIHTLGRASLVAEARGRHADAAPEAGVVERRGRRGPLRELRLLLRHGVLRLAAALHRAGCRGQHPEGLRHRRRHAAPAGARRLARAHGEWSRSGGAAAAGPGCCRSWGAAAGGAPPVRVRANGRRYRRAAGGVHVLRGARGEEWSRERGREAAARQLLAVRGLSGRRAGRRDGAAAAGVPPPVPRRLRRRLVARSPDVPALPLPALPEERRQHKAGRHGRRGVIRRRVAAGVSVTHSSILRSWPAHW

SEQ ID NO: 16248 - protein, 265 aa, Zea mays subsp. mays
  peptide (1)..(265): Ceres Seq. ID no. 12349551
  misc_feature (194)..(235): Pfam Name: Zinc finger, C3HC4 type (RING finger) Pfam Description: Zinc finger, C3HC4 type (RING finger)
  misc_feature (183)..(261): Homolog of NCBI NO: 25408427 NR Description: probable RING zinc finger protein
  misc_feature (154)..(237): Homolog of NCBI NO: 30017522 NR Description: putative ring-H2 zinc finger protein
  misc_feature (154)..(242): Homolog of NCBI NO: 8698835 NR Description: RING finger 1 [Oryza sativa (japonica
  misc_feature (136)..(264): Homolog of NCBI NO: 34903928 NR Description: OSJNBa0038J17.9 [Oryza sativa (japonica
  misc_feature (154)..(244): Homolog of NCBI NO: 7487705 NR Description: hypothetical protein T5J17.240 - Arabidopsis
  misc_feature (154)..(253): Homolog of NCBI NO: 34903930 NR Description: OSJNBa0038J17.10 [Oryza sativa (japonica
  misc_feature (163)..(236): Homolog of NCBI NO: 37536572 NR Description: hypothetical protein [Oryza sativa (japonica
  misc_feature (136)..(259): Homolog of NCBI NO: 34907968 NR Description: P0446G04.15 [Oryza sativa (japonica
  misc_feature (154)..(265): Homolog of NCBI NO: 34903920 NR Description: OSJNBa0038J17.5 [Oryza sativa (japonica
  misc_feature (91)..(265): Homolog of NCBI NO: 34903936 NR Description: OSJNBa0038J17.13 [Oryza sativa (japonica
SETVSRANNRRRTGAARARLFLARSCPLAALRSRQSTRLGERALLRKRADDMLMLHPRLVSSSAVDDEDHCESCACYCAMVSCVSLLLFIVLAAAVSIPRACAIAGVMLLLLGLVGWLVPTGNGAGPAAQQQQGQAAADPGARRLVVHHRCACGLTDAAIAALPAAFTYYEAPAVKNGVGSEDEKQPRGSSLLCAVCLDDVRGGEMVRQLPACRHLFHVDCVDAWLRAHRTCPLCRCQLSPRNDVSTKRAATVVGESSVDALPPV

SEQ ID NO: 16249 - protein, 214 aa, Zea mays subsp. mays
  peptide (1)..(214): Ceres Seq. ID no. 12349552
  misc_feature (143)..(184): Pfam Name: Zinc finger, C3HC4 type (RING finger) Pfam Description: Zinc finger, C3HC4 type (RING finger)
  misc_feature (132)..(210): Homolog of NCBI NO: 25408427 NR Description: probable RING zinc finger protein
  misc_feature (103)..(186): Homolog of NCBI NO: 30017522 NR Description: putative ring-H2 zinc finger protein
  misc_feature (103)..(191): Homolog of NCBI NO: 8698835 NR Description: RING finger 1 [Oryza sativa (japonica
  misc_feature (85)..(213): Homolog of NCBI NO: 34903928 NR Description: OSJNBa0038J17.9 [Oryza sativa (japonica
  misc_feature (103)..(193): Homolog of NCBI NO: 7487705 NR Description: hypothetical protein T5J17.240 - Arabidopsis
  misc_feature (103)..(202): Homolog of NCBI NO: 34903930 NR Description: OSJNBa0038J17.10 [Oryza sativa (japonica
  misc_feature (112)..(185): Homolog of NCBI NO: 37536572 NR Description: hypothetical protein [Oryza sativa (japonica
  misc_feature (85)..(208): Homolog of NCBI NO: 34907968 NR Description: P0446G04.15 [Oryza sativa (japonica
  misc_feature (103)..(214): Homolog of NCBI NO: 34903920 NR Description: OSJNBa0038J17.5 [Oryza sativa (japonica
  misc_feature (40)..(214): Homolog of NCBI NO: 34903936 NR Description: OSJNBa0038J17.13 [Oryza sativa (japonica
MLMLHPRLVSSSAVDDEDHCESCACYCAMVSCVSLLLFIVLAAAVSIPRACAIAGVMLLLLGLVGWLVPTGNGAGPAAQQQQGQAAADPGARRLVVHHRCACGLTDAAIAALPAAFTYYEAPAVKNGVGSEDEKQPRGSSLLCAVCLDDVRGGEMVRQLPACRHLFHVDCVDAWLRAHRTCPLCRCQLSPRNDVSTKRAATVVGESSVDALPPV

SEQ ID NO: 16250 - DNA, 507 bp, Zea mays subsp. mays
  misc_feature (1)..(507): Ceres Seq. ID no. 12340841
  misc_feature: MA Experiment ID: 108535 Result: Up-regulated in Transcription
  misc_feature: MA Experiment 108535 PARAMETER Experiment Name: Zm_Meristem_P Parameter: Age (day) Value: 8
  misc_feature: MA Experiment 108535 PARAMETER Experiment Name: Zm_Meristem_P Parameter: Organism Value: Zea mays
  misc_feature: MA Experiment 108535 PARAMETER Experiment Name: Zm_Meristem_P Parameter: Plant Line Value: 35A19
  misc_feature: MA Experiment 108535 PARAMETER Experiment Name: Zm_Meristem_P Parameter: Tissue Value: Root Meristem vs. Above Root Meristem
  misc_feature: MA Experiment ID: 108536 Result: Down-regulated in Transcription
  misc_feature: MA Experiment 108536 PARAMETER Experiment Name: Zm_Meristem_P Parameter: Age (day) Value: 8
  misc_feature: MA Experiment 108536 PARAMETER Experiment Name: Zm_Meristem_P Parameter: Organism Value: Zea mays
  misc_feature: MA Experiment 108536 PARAMETER Experiment Name: Zm_Meristem_P Parameter: Plant Line Value: 35A19
  misc_feature: MA Experiment 108536 PARAMETER Experiment Name: Zm_Meristem_P Parameter: Tissue Value: Shoot Meristem vs. Above Shoot Meristem
ttcacacaatattattattaatcaagttatatttgatgaggaagctgtcgagtcaaaactgctaaaagcacggatgaaaatgcaacaaaaatacattgatcagttccatatgttatacgatgacttcaacatcaccaagcttcccttgctttcagaagaggtttgtggtgttcaagctctccaaaacttttcccagcacttccttacaccatacaagtctactcttaaaaggggcaccgtcgaggagctcgaacagagaataactatattaaaatctgcactgcaagaagctgagacagagttagatagggttaggaaagggaagcagtcagtgtgattttttttccacaggtcaagtgtgtaaaaccagagagacgatcaattttttcgtgtcattacactcttgttgatttcactatcatgtttcctcatcgaggagtttagacttgtaatagctatcggcagagaagtgtttgattcacacaagatatatagatccattctttt

SEQ ID NO: 16251 - protein, 111 aa, Zea mays subsp. mays
  peptide (1)..(111): Ceres Seq. ID no. 12340842
  misc_feature (1)..(69): Pfam Name: Anion-transporting ATPase Pfam Description: Anion-transporting ATPase
  misc_feature (1)..(72): Homolog of NCBI NO: 12025542 NR Description: arsA (bacterial) arsenite transporter,
  misc_feature (1)..(72): Homolog of NCBI NO: 2905657 NR Description: arsenite translocating ATPase [Homo sapiens]
  misc_feature (2)..(71): Homolog of NCBI NO: 24586297 NR Description: CG1598-PA [Drosophila melanogaster]
  misc_feature (2)..(71): Homolog of NCBI NO: 19717679 NR Description: arsenite transport subunit A [Dictyostelium
  misc_feature (1)..(72): Homolog of NCBI NO: 4757796 NR Description: arsA arsenite transporter, ATP-binding, homolog 1
  misc_feature (1)..(71): Homolog of NCBI NO: 31214034 NR Description: ENSANGP00000018739 [Anopheles gambiae]
  misc_feature (1)..(72): Homolog of NCBI NO: 26358207 NR Description: unnamed protein product [Mus musculus]
  misc_feature (1)..(72): Homolog of NCBI NO: 17391018 NR Description: Unknown (protein for MGC:28999) [Mus musculus]
  misc_feature (1)..(107): Homolog of NCBI NO: 25290846 NR Description: hypothetical protein F22M8.4 [imported] -
  misc_feature (1)..(107): Homolog of NCBI NO: 18378897 NR Description: arsA homolog (hASNA-I), putative
SHNIIINQVIFDEEAVESKLLKARMKMQQKYIDQFHMLYDDFNITKLPLLSEEVCGVQALQNFSQHFLTPYKSTLKRGTVEELEQRITILKSALQEAETELDRVRKGKQSV

SEQ ID NO: 16252 - protein, 87 aa, Zea mays subsp. mays
  peptide (1)..(87): Ceres Seq. ID no. 12340843
  misc_feature (1)..(48): Homolog of NCBI NO: 6647417 NR Description: Arsenical pump-driving ATPase ATPase) (Arsenical resistance ATPase) (Arsenite-transporting
  misc_feature (1)..(48): Homolog of NCBI NO: 2905657 NR Description: arsenite translocating ATPase [Homo sapiens]
  misc_feature (1)..(47): Homolog of NCBI NO: 24586297 NR Description: CG1598-PA [Drosophila melanogaster]
  misc_feature (1)..(47): Homolog of NCBI NO: 19717679 NR Description: arsenite transport subunit A [Dictyostelium
  misc_feature (1)..(48): Homolog of NCBI NO: 4757796 NR Description: arsA arsenite transporter, ATP-binding, homolog 1
  misc_feature (1)..(47): Homolog of NCBI NO: 31214034 NR Description: ENSANGP00000018739 [Anopheles gambiae]
  misc_feature (1)..(48): Homolog of NCBI NO: 26358207 NR Description: unnamed protein product [Mus musculus]
  misc_feature (1)..(48): Homolog of NCBI NO: 17391018 NR Description: Unknown (protein for MGC:28999) [Mus musculus]
  misc_feature (1)..(83): Homolog of NCBI NO: 25290846 NR Description: hypothetical protein F22M8.4 [imported] -
  misc_feature (1)..(83): Homolog of NCBI NO: 18378897 NR Description: arsA homolog (hASNA-I), putative
MKMQQKYIDQFHMLYDDFNITKLPLLSEEVCGVQALQNFSQHFLTPYKSTLKRGTVEELEQRITILKSALQEAETELDRVRKGKQSV

SEQ ID NO: 16253 - protein, 85 aa, Zea mays subsp. mays
  peptide (1)..(85): Ceres Seq. ID no. 12340844
  misc_feature (1)..(46): Homolog of NCBI NO: 12025542 NR Description: arsA (bacterial) arsenite transporter,
  misc_feature (1)..(46): Homolog of NCBI NO: 2905657 NR Description: arsenite translocating ATPase [Homo sapiens]
  misc_feature (1)..(45): Homolog of NCBI NO: 24586297 NR Description: CG1598-PA [Drosophila melanogaster]
  misc_feature (1)..(45): Homolog of NCBI NO: 19717679 NR Description: arsenite transport subunit A [Dictyostelium
  misc_feature (1)..(46): Homolog of NCBI NO: 4757796 NR Description: arsA arsenite transporter, ATP-binding, homolog 1
  misc_feature (1)..(45): Homolog of NCBI NO: 31214034 NR Description: ENSANGP00000018739 [Anopheles gambiae]
  misc_feature (1)..(46): Homolog of NCBI NO: 26358207 NR Description: unnamed protein product [Mus musculus]
  misc_feature (1)..(46): Homolog of NCBI NO: 17391018 NR Description: Unknown (protein for MGC:28999) [Mus musculus]
  misc_feature (1)..(81): Homolog of NCBI NO: 25290846 NR Description: hypothetical protein F22M8.4 [imported] -
  misc_feature (1)..(81): Homolog of NCBI NO: 18378897 NR Description: arsA homolog (hASNA-I), putative
MQQKYIDQFHMLYDDFNITKLPLLSEEVCGVQALQNFSQHFLTPYKSTLKRGTVEELEQRITILKSALQEAETELDRVRKGKQSV

SEQ ID NO: 16254 - DNA, 1329 bp, Zea mays subsp. mays
  misc_feature (1)..(1329): Ceres Seq. ID no. 12588709
  misc_feature: MA Experiment ID: 108529 Result: Down-regulated in Transcription
  misc_feature: MA Experiment 108529 PARAMETER Experiment Name: Zm_Imbibed_Seeds_P Parameter: Age (day) Value: 5 vs. 2
  misc_feature: MA Experiment 108529 PARAMETER Experiment Name: Zm_Imbibed_Seeds_P Parameter: Organism Value: Zea mays
  misc_feature: MA Experiment 108529 PARAMETER Experiment Name: Zm_Imbibed_Seeds_P Parameter: Plant Line Value: 35A19
  misc_feature: MA Experiment 108529 PARAMETER Experiment Name: Zm_Imbibed_Seeds_P Parameter: Tissue Value: Roots vs. Embryo
  misc_feature: MA Experiment ID: 108536 Result: Up-regulated in Transcription
  misc_feature: MA Experiment 108536 PARAMETER Experiment Name: Zm_Meristem_P Parameter: Age (day) Value: 8
  misc_feature: MA Experiment 108536 PARAMETER Experiment Name: Zm_Meristem_P Parameter: Organism Value: Zea mays
  misc_feature: MA Experiment 108536 PARAMETER Experiment Name: Zm_Meristem_P Parameter: Plant Line Value: 35A19
  misc_feature: MA Experiment 108536 PARAMETER Experiment Name: Zm_Meristem_P Parameter: Tissue Value: Shoot Meristem vs. Above Shoot Meristem
  misc_feature: MA Experiment ID: 108546 Result: Down-regulated in Transcription
  misc_feature: MA Experiment 108546 PARAMETER Experiment Name: Zm_Imbibed_Seeds_P Parameter: Age (day) Value: 3 vs. 2
  misc_feature: MA Experiment 108546 PARAMETER Experiment Name: Zm_Imbibed_Seeds_P Parameter: Organism Value: Zea mays
  misc_feature: MA Experiment 108546 PARAMETER Experiment Name: Zm_Imbibed_Seeds_P Parameter: Plant Line Value: 35A19
  misc_feature: MA Experiment 108546 PARAMETER Experiment Name: Zm_Imbibed_Seeds_P Parameter: Tissue Value: Roots vs. Embryo
  misc_feature: MA Experiment ID: 108556 Result: Down-regulated in Transcription
  misc_feature: MA Experiment 108556 PARAMETER Experiment Name: Zm_Drought_P Parameter: Age (day) Value: 9
  misc_feature: MA Experiment 108556 PARAMETER Experiment Name: Zm_Drought_P Parameter: Organism Value: Zea mays
  misc_feature: MA Experiment 108556 PARAMETER Experiment Name: Zm_Drought_P Parameter: Plant Line Value: 35A19
  misc_feature: MA Experiment 108556 PARAMETER Experiment Name: Zm_Drought_P Parameter: Timepoint (hr) Value: 24
  misc_feature: MA Experiment 108556 PARAMETER Experiment Name: Zm_Drought_P Parameter: Tissue Value: Aerial
  misc_feature: MA Experiment 108556 PARAMETER Experiment Name: Zm_Drought_P Parameter: Treatment Value: Drought vs. No Drought
  misc_feature: MA Experiment ID: 20000479 Result: Down-regulated in Transcription
  misc_feature: MA Experiment 20000479 PARAMETER Experiment Name: Zm_Drought_P Parameter: Age (day) Value: 10
  misc_feature: MA Experiment 20000479 PARAMETER Experiment Name: Zm_Drought_P Parameter: Organism Value: Zea mays
  misc_feature: MA Experiment 20000479 PARAMETER Experiment Name: Zm_Drought_P Parameter: Plant Line Value: 35A19
  misc_feature: MA Experiment 20000479 PARAMETER Experiment Name: Zm_Drought_P Parameter: Timepoint (hr) Value: 48
  misc_feature: MA Experiment 20000479 PARAMETER Experiment Name: Zm_Drought_P Parameter: Tissue Value: Aerial
  misc_feature: MA Experiment 20000479 PARAMETER Experiment Name: Zm_Drought_P Parameter: Treatment Value: Drought vs. No Drought
  misc_feature: MA Experiment ID: 20000632 Result: Down-regulated in Transcription
  misc_feature: MA Experiment 20000632 PARAMETER Experiment Name: Zm_Herbicide-Treatments_P Parameter: Timepoint (hr) Value: 4
  misc_feature: MA Experiment 20000632 PARAMETER Experiment Name: Zm_Herbicide-Treatments_P Parameter: Tissue Value: Aerial
  misc_feature: MA Experiment 20000632 PARAMETER Experiment Name: Zm_Herbicide-Treatments_P Parameter: Treatment Value: Glean vs. No Treatment
gcacgagaccattacctagaacatcctaatcgaaaacccacactcccctgcacacccaacccatccacatccactcgcccaagccggccttcgtccctgcccaacgctgcttcactctctccagcgatagatagcatcatcctctccacctgcacaggagacgacgaagcagcaccatcgtccgcggtcctttgcttcttctggcgccatgacgtcgccggtgccggagacgttcagcctgcaggaccagcagccgccgccgccgccgccagcggagcaggagcagatctgctacgtgcactgcagctactgcgacaccatcctcgcggtgggcgtgccgtgcagcagcctgttccagacggtcaccgtgcggtgcggccactgcgccaacctgctctacgtcaacctccgcgccctcctgctgccgccggcgacggcgcccgcggccgccaaccatctaccgcccttcggccaggctctcctctccccgacctcaccgcacggtctactcgatgctgagacgatgtcgtcgtcgtcgttccaagcgccgagcctgccgagcgctgaaccgccgagcgccgcctgcgtgagcggcatcacgagcatcaacaacaccgcctgcggtggcaacaacgccgcgtcggccatggcgccgccaccggccaaacctgcactgcacgagccgccgcagctgcccaggagcgcagcgtcagcgaacaagacttcagagaagcggcagagagttccttccgcatacaaccgtttcatcaaagatgagatccagcgcattaaggccagcaatcccgacatcactcacagggaagctttcagcgcggctgccaagaattgggcccatttcccacacatccatttcggcctcatgcccgatcagggtctgaagaagcaccccatgcaaactcaggagggagctgaatgcatgcttttcaaggacggtctatacgccgccgccgccgccgccacagcggcgtccagcatgggcatctctccattctgatgacttcagctccaccgcggaatggtctatagcgttctgcctctctgtgcgcgcctagccgcttagggttctgatgtctcagttccctcgttatctcccggttgcttgagtgagagatagcttcaatgtctatcccagccggagaatctcgaaatgtctctcagtacccatatatctctaatagttctcctcagtttccagcttcttactttgttaatttgttattatgcaacctctagagaggttgttatgtgtatgacgatgtgcggcctcttatctttatatggacataattcgagctggatattcggctg

SEQ ID NO: 16255 - protein, 268 aa, Zea mays subsp. mays
  peptide (1)..(268): Ceres Seq. ID no. 12588710
  misc_feature (22)..(224): Pfam Name: YABBY protein Pfam Description: YABBY protein
  misc_feature (25)..(84): Homolog of NCBI NO: 27804377 NR Description: MADS-box transcription factor CDM51
  misc_feature (161)..(268): Homolog of NCBI NO: 27804377 NR Description: MADS-box transcription factor CDM51
  misc_feature (6)..(268): Homolog of NCBI NO: 37551421 NR Description: FIL-like protein [Triticum aestivum]
  misc_feature (22)..(268): Homolog of NCBI NO: 37535908 NR Description: hypothetical protein [Oryza sativa (japonica
  misc_feature (25)..(73): Homolog of NCBI NO: 18406725 NR Description: expressed protein
  misc_feature (142)..(268): Homolog of NCBI NO: 18406725 NR Description: expressed protein
  misc_feature (25)..(124): Homolog of NCBI NO: 30683176 NR Description: expressed protein [Arabidopsis thaliana]
  misc_feature (21)..(268): Homolog of NCBI NO: 32330677 NR Description: yabby15 protein [Zea mays]
  misc_feature (3)..(268): Homolog of NCBI NO: 38605890 NR Description: OSJNBb0020O11.2 [Oryza sativa (japonica
  misc_feature (1)..(268): Homolog of NCBI NO: 32330675 NR Description: yabby14 protein [Zea mays]
MTSPVPETFSLQDQQPPPPPPAEQEQICYVHCSYCDTILAVGVPCSSLFQTVTVRCGHCANLLYVNLRALLLPPATAPAAANHLPPFGQALLSPTSPHGLLDAETMSSSSFQAPSLPSAEPPSAACVSGITSINNTACGGNNAASAMAPPPAKPALHEPPQLPRSAASANKTSEKRQRVPSAYNRFIKDEIQRIKASNPDITHREAFSAAAKNWAHFPHIHFGLMPDQGLKKHPMQTQEGAECMLFKDGLYAAAAAATAASSMGISPF

SEQ ID NO: 16256 - protein, 172 aa, Zea mays subsp. mays
  peptide (1)..(172): Ceres Seq. ID no. 12588711
ARDHYLEHPNRKPTLPCTPNPSTSTRPSRPSSLPNAASLSPAIDSIILSTCTGDDEAAPSSAVLCFFWRHDVAGAGDVQPAGPAAAAAAASGAGADLLRALQLLRHHPRGGRAVQQPVPDGHRAVRPLRQPALRQPPRPPAAAGDGARGRQPSTALRPGSPLPDLTARSTRC

SEQ ID NO: 16257 - protein, 163 aa, Zea mays subsp. mays
  peptide (1)..(163): Ceres Seq. ID no. 12588712
  misc_feature (1)..(119): Pfam Name: YABBY protein Pfam Description: YABBY protein
  misc_feature (1)..(17): Homolog of NCBI NO: 4928751 NR Description: YABBY2 [Arabidopsis thaliana]
  misc_feature (65)..(120): Homolog of NCBI NO: 30683176 NR Description: expressed protein [Arabidopsis thaliana]
  misc_feature (1)..(19): Homolog of NCBI NO: 30683176 NR Description: expressed protein [Arabidopsis thaliana]
  misc_feature (37)..(163): Homolog of NCBI NO: 18406725 NR Description: expressed protein
  misc_feature (56)..(163): Homolog of NCBI NO: 27804377 NR Description: MADS-box transcription factor CDM51
  misc_feature (1)..(163): Homolog of NCBI NO: 37551421 NR Description: FIL-like protein [Triticum aestivum]
  misc_feature (1)..(163): Homolog of NCBI NO: 37535908 NR Description: hypothetical protein [Oryza sativa (japonica
  misc_feature (1)..(163): Homolog of NCBI NO: 32330677 NR Description: yabby15 protein [Zea mays]
  misc_feature (1)..(163): Homolog of NCBI NO: 38605890 NR Description: OSJNBb0020O11.2 [Oryza sativa (japonica
  misc_feature (1)..(163): Homolog of NCBI NO: 32330675 NR Description: yabby14 protein [Zea mays]
MSSSSFQAPSLPSAEPPSAACVSGITSINNTACGGNNAASAMAPPPAKPALHEPPQLPRSAASANKTSEKRQRVPSAYNRFIKDEIQRIKASNPDITHREAFSAAAKNWAHFPHIHFGLMPDQGLKKHPMQTQEGAECMLFKDGLYAAAAAATAASSMGISPF

SEQ ID NO: 16258 - DNA, 1253 bp, Zea mays subsp. mays
  misc_feature (1)..(1253): Ceres Seq. ID no. 12407485
  misc_feature: MA Experiment ID: 108527 Result: Up-regulated in Transcription
  misc_feature: MA Experiment 108527 PARAMETER Experiment Name: Zm_5mM_NO_P Parameter: Age (day) Value: 8
  misc_feature: MA Experiment 108527 PARAMETER Experiment Name: Zm_5mM_NO_P Parameter: Organism Value: Zea mays
  misc_feature: MA Experiment 108527 PARAMETER Experiment Name: Zm_5mM_NO_P Parameter: Plant Line Value: 35A19
  misc_feature: MA Experiment 108527 PARAMETER Experiment Name: Zm_5mM_NO_P Parameter: Timepoint (hr) Value: 6
  misc_feature: MA Experiment 108527 PARAMETER Experiment Name: Zm_5mM_NO_P Parameter: Tissue Value: Aerial
  misc_feature: MA Experiment 108527 PARAMETER Experiment Name: Zm_5mM_NO_P Parameter: Treatment Value: 5mM NO vs. No Treatment
  misc_feature: MA Experiment ID: 108535 Result: Down-regulated in Transcription
  misc_feature: MA Experiment 108535 PARAMETER Experiment Name: Zm_Meristem_P Parameter: Age (day) Value: 8
  misc_feature: MA Experiment 108535 PARAMETER Experiment Name: Zm_Meristem_P Parameter: Organism Value: Zea mays
  misc_feature: MA Experiment 108535 PARAMETER Experiment Name: Zm_Meristem_P Parameter: Plant Line Value: 35A19
  misc_feature: MA Experiment 108535 PARAMETER Experiment Name: Zm_Meristem_P Parameter: Tissue Value: Root Meristem vs. Above Root Meristem
  misc_feature: MA Experiment ID: 108542 Result: Up-regulated in Transcription
  misc_feature: MA Experiment 108542 PARAMETER Experiment Name: Zm_150mM_NaCl_P Parameter: Age (day) Value: 8
  misc_feature: MA Experiment 108542 PARAMETER Experiment Name: Zm_150mM_NaCl_P Parameter: Organism Value: Zea mays
  misc_feature: MA Experiment 108542 PARAMETER Experiment Name: Zm_150mM_NaCl_P Parameter: Plant Line Value: 35A19
  misc_feature: MA Experiment 108542 PARAMETER Experiment Name: Zm_150mM_NaCl_P Parameter: Timepoint (hr) Value: 6
  misc_feature: MA Experiment 108542 PARAMETER Experiment Name: Zm_150mM_NaCl_P Parameter: Tissue Value: Aerial
  misc_feature: MA Experiment 108542 PARAMETER Experiment Name: Zm_150mM_NaCl_P Parameter: Treatment Value: 150mM NaCl vs. No Treatment
  misc_feature: MA Experiment ID: 108543 Result: Up-regulated in Transcription
  misc_feature: MA Experiment ID: 108544 Result: Up-regulated in Transcription
  misc_feature: MA Experiment ID: 20000492 Result: Down-regulated in Transcription
  misc_feature: MA Experiment 20000492 PARAMETER Experiment Name: Zm_Hybrid_Seed_Dev_P Parameter: DAP Value: 12
  misc_feature: MA Experiment 20000492 PARAMETER Experiment Name: Zm_Hybrid_Seed_Dev_P Parameter: Organism Value: Zea mays
  misc_feature: MA Experiment 20000492 PARAMETER Experiment Name: Zm_Hybrid_Seed_Dev_P Parameter: Plant Line Value: 35A19
  misc_feature: MA Experiment 20000492 PARAMETER Experiment Name: Zm_Hybrid_Seed_Dev_P Parameter: Tissue Value: Fert Kernel vs. Unfert Floret
  misc_feature: MA Experiment ID: 20000535 Result: Down-regulated in Transcription
  misc_feature: MA Experiment 20000535 PARAMETER Experiment Name: Zm_Hybrid_Seed_Dev_P Parameter: DAP Value: 30 vs. 12
  misc_feature: MA Experiment 20000535 PARAMETER Experiment Name: Zm_Hybrid_Seed_Dev_P Parameter: Organism Value: Zea mays
  misc_feature: MA Experiment 20000535 PARAMETER Experiment Name: Zm_Hybrid_Seed_Dev_P Parameter: Plant Line Value: 35A19
  misc_feature: MA Experiment 20000535 PARAMETER Experiment Name: Zm_Hybrid_Seed_Dev_P Parameter: Tissue Value: Embryo vs. Unfert Floret
ctctgctcagctcgaacgaacaaaaagaactcccctcggccctctcctcttgtgcttctgcttccccaccgagtctcctcaaccccaggcactcgccctctgtcggtctgtcccctcccttcctcgcctccgatgccgccgccgccgccgcttctcgagccgcgcgactacctcggcgccggcgccacctcgtcgtgctgctcgtcgtcctgctcctccggccgcgagggcgcggggccccacctcgcgctgcggctcgggcttccggggtccgacgactcccccggccgcaggcgcggacgcggagcacgccggcgcccacgtcgacgccgcgctcaccctcggccccgcccccgcccccgcgcctcccaggggcagcgccaagcgcgggttcgccgactccctcgaccggtccgcgaagcgggacggcgttgccgcggatgacgctgctgggggcgtcacgcgggtagctggagctgctgccggagctccgcccgctgccaaggcacaagttgttggatggccgcctgttaggagctaccggaagaataccctagctgccagtgccacaaagacaaatgggggagatgaaggtaggagtgaggcgggatgctgttatgtcaaggtcagcatggatggagccccatacctaaggaaggtggacctcaagacctattcaagctatgaggatctctcgcttggtctggagaaaatgttcagttgcttcatcactggtcaaaacagttcatgcaagacatcaagaagggataggcttactgatggttctagggctgatgcccttcaggaccaagaatatgtccttacttacgaagataaagatgctgactggatgctcgttggtgatctgccctgggacttgttcaccacattttgccggaaacttaggatcatgagaggctctgatgctgctggcatggctcctccaagaccaccggaacagacagttcggaacaaatgagggcgggcagcttacttacctggcgctgaactgaagggagagcgacgctgccttggtcaggccttctttcacttgtgcagtgggatctgcgtcctgctgtctcggacgcccattttgcccacgagctggtcgtcacgtgctgtcgctttttgtctgggaaagatagcgtactgcttgctgtatgatactttcatctgtgttcggaagtttgtagcgcttcatatcctggaagggagtaaagaaaatgtccatgtgtccggtgagaatttctttc

SEQ ID NO: 16259 - protein, 325 aa, Zea mays subsp. mays
  peptide (1)..(325): Ceres Seq. ID no. 12407486
  misc_feature (108)..(314): Pfam Name: AUX/IAA family Pfam Description: AUX/IAA family
  misc_feature (159)..(314): Homolog of NCBI NO: 25989504 NR Description: Aux/IAA protein [Solanum tuberosum]
  misc_feature (164)..(324): Homolog of NCBI NO: 20257219 NR Description: auxin-regulated protein [Zinnia elegans]
  misc_feature (128)..(314): Homolog of NCBI NO: 15227275 NR Description: auxin-regulated protein (IAA8)
  misc_feature (55)..(325): Homolog of NCBI NO: 34911088 NR Description: OJ1117_G01.11 [Oryza sativa (japonica
SAQLERTKRTPLGPLLLCFCFPTESPQPQALALCRSVPSLPRLRCRRRRRFSSRATTSAPAPPRRAARRPAPPAARARGPTSRCGSGFRGPTTPPAAGADAEHAGAHVDAALTLGPAPAPAPPRGSAKRGFADSLDRSAKRDGVAADDAAGGVTRVAGAAAGAPPAAKAQVVGWPPVRSYRKNTLAASATKTNGGDEGRSEAGCCYVKVSMDGAPYLRKVDLKTYSSYEDLSLGLEKMFSCFITGQNSSCKTSRRDRLTDGSRADALQDQEYVLTYEDKDADWMLVGDLPWDLFTTFCRKLRIMRGSDAAGMAPPRPPEQTVRNK

SEQ ID NO: 16260 - DNA, 1726 bp, Zea mays subsp. mays
  misc_feature (1)..(1726): Ceres Seq. ID no. 12406291
  misc_feature: MA Experiment ID: 108523 Result: Down-regulated in Transcription
  misc_feature: MA Experiment 108523 PARAMETER Experiment Name: Zm_42deg_Heat_P Parameter: Age (day) Value: 8
  misc_feature: MA Experiment 108523 PARAMETER Experiment Name: Zm_42deg_Heat_P Parameter: Organism Value: Zea mays
  misc_feature: MA Experiment 108523 PARAMETER Experiment Name: Zm_42deg_Heat_P Parameter: Plant Line Value: 35A19
  misc_feature: MA Experiment 108523 PARAMETER Experiment Name: Zm_42deg_Heat_P Parameter: Temperature (deg C) Value: 42 vs. 22
  misc_feature: MA Experiment 108523 PARAMETER Experiment Name: Zm_42deg_Heat_P Parameter: Timepoint (hr) Value: 6
  misc_feature: MA Experiment 108523 PARAMETER Experiment Name: Zm_42deg_Heat_P Parameter: Tissue Value: Aerial
  misc_feature: MA Experiment ID: 108528 Result: Up-regulated in Transcription
  misc_feature: MA Experiment 108528 PARAMETER Experiment Name: Zm_Imbibed_Seeds_P Parameter: Age (day) Value: 5 vs. 2
  misc_feature: MA Experiment 108528 PARAMETER Experiment Name: Zm_Imbibed_Seeds_P Parameter: Organism Value: Zea mays
  misc_feature: MA Experiment 108528 PARAMETER Experiment Name: Zm_Imbibed_Seeds_P Parameter: Plant Line Value: 35A19
  misc_feature: MA Experiment 108528 PARAMETER Experiment Name: Zm_Imbibed_Seeds_P Parameter: Tissue Value: Aerial vs. Embryo
  misc_feature: MA Experiment ID: 108530 Result: Up-regulated in Transcription
  misc_feature: MA Experiment 108530 PARAMETER Experiment Name: Zm_Imbibed_Seeds_P Parameter: Age (day) Value: 6 vs. 2
  misc_feature: MA Experiment 108530 PARAMETER Experiment Name: Zm_Imbibed_Seeds_P Parameter: Organism Value: Zea mays
  misc_feature: MA Experiment 108530 PARAMETER Experiment Name: Zm_Imbibed_Seeds_P Parameter: Plant Line Value: 35A19
  misc_feature: MA Experiment 108530 PARAMETER Experiment Name: Zm_Imbibed_Seeds_P Parameter: Tissue Value: Aerial vs. Embryo
  misc_feature: MA Experiment ID: 108535 Result: Down-regulated in Transcription
  misc_feature: MA Experiment 108535 PARAMETER Experiment Name: Zm_Meristem_P Parameter: Age (day) Value: 8
  misc_feature: MA Experiment 108535 PARAMETER Experiment Name: Zm_Meristem_P Parameter: Organism Value: Zea mays
  misc_feature: MA Experiment 108535 PARAMETER Experiment Name: Zm_Meristem_P Parameter: Plant Line Value: 35A19
  misc_feature: MA Experiment 108535 PARAMETER Experiment Name: Zm_Meristem_P Parameter: Tissue Value: Root Meristem vs. Above Root Meristem
  misc_feature: MA Experiment ID: 108547 Result: Up-regulated in Transcription
  misc_feature: MA Experiment 108547 PARAMETER Experiment Name: Zm_Imbibed_Seeds_P Parameter: Age (day) Value: 4 vs. 2
  misc_feature: MA Experiment 108547 PARAMETER Experiment Name: Zm_Imbibed_Seeds_P Parameter: Organism Value: Zea mays
  misc_feature: MA Experiment 108547 PARAMETER Experiment Name: Zm_Imbibed_Seeds_P Parameter: Plant Line Value: 35A19
  misc_feature: MA Experiment 108547 PARAMETER Experiment Name: Zm_Imbibed_Seeds_P Parameter: Tissue Value: Aerial vs. Embryo
  misc_feature: MA Experiment ID: 108559 Result: Down-regulated in Transcription
  misc_feature: MA Experiment 108559 PARAMETER Experiment Name: Zm_5mM_NO_P Parameter: Age (day) Value: 8
  misc_feature: MA Experiment 108559 PARAMETER Experiment Name: Zm_5mM_NO_P Parameter: Organism Value: Zea mays
  misc_feature: MA Experiment 108559 PARAMETER Experiment Name: Zm_5mM_NO_P Parameter: Plant Line Value: 35A19
  misc_feature: MA Experiment 108559 PARAMETER Experiment Name: Zm_5mM_NO_P Parameter: Timepoint (hr) Value: 12
  misc_feature: MA Experiment 108559 PARAMETER Experiment Name: Zm_5mM_NO_P Parameter: Tissue Value: Aerial
  misc_feature: MA Experiment 108559 PARAMETER Experiment Name: Zm_5mM_NO_P Parameter: Treatment Value: 5mM NO vs. No Treatment
  misc_feature: MA Experiment ID: 20000108 Result: Down-regulated in Transcription
  misc_feature: MA Experiment 20000108 PARAMETER Experiment Name: Zm_Root-Tips_P Parameter: Age (day) Value: 12
  misc_feature: MA Experiment 20000108 PARAMETER Experiment Name: Zm_Root-Tips_P Parameter: Organism Value: Zea mays
  misc_feature: MA Experiment 20000108 PARAMETER Experiment Name: Zm_Root-Tips_P Parameter: Tissue Value: Root tips vs. Root mid region    35
  misc_feature: MA Experiment 20000108 PARAMETER Experiment Name: Zm_Root-Tips_P Parameter: Tissue Value: Root tips vs. Root mid region   Sequence Listing-Misc Features (4)
  misc_feature: MA Experiment ID: 20000535 Result: Down-regulated in Transcription
  misc_feature: MA Experiment 20000535 PARAMETER Experiment Name: Zm_Hybrid_Seed_Dev_P Parameter: DAP Value: 30 vs. 12
  misc_feature: MA Experiment 20000535 PARAMETER Experiment Name: Zm_Hybrid_Seed_Dev_P Parameter: Organism Value: Zea mays
  misc_feature: MA Experiment 20000535 PARAMETER Experiment Name: Zm_Hybrid_Seed_Dev_P Parameter: Plant Line Value: 35A19
  misc_feature: MA Experiment 20000535 PARAMETER Experiment Name: Zm_Hybrid_Seed_Dev_P Parameter: Tissue Value: Embryo vs. Unfert Floret
acctcccttcccccactctcttctctccccgcggcccgtgactcatccacccacagtccactcgccactccccccggaacggcggcggcggcgacggcggaggagtaacgcaagatggcgaggaaacctctcgactacgaggagctgaacgagaacgtcaagagggtgcagtacgcggtgcgcggggagctgtacctccgcgcctccgagctgcagaaggagggcaagaagatcatcttcaccaacgtcggcaacccgcacgccctcggccagaaaccgctcaccttcccgcgccaggtggtggcgctgtgccaggctccgttcctcctcgacgatccccacgtcggcctcatgttcccggcggacgccatcgctagggccaagcactatctcgccatggcgcccggcggtctaggtgcgtacagtgactcccgcggcatcccgggaatcaggaaggaagttgccgacttcatccacaagcgtgatggatatcccagtgatccggaactcatctacctcacagacggtgccagcaaaggtgtgatgcagatcctgaacaccatcattagaaacgagatggatgggatcttggtccctgttcctcagtacccactttattccgccaccatttccctctatggtggttctctggtcccgtactacttggaagaagaggctaactggagcctcgactttgtgaatatccggcaaacagtggcggaggcacggtccaagggaatctctgttcgagcgatggtgatgataaatccaggaaatcccactggccaatgccttagtgaagcgaatataaaggaacttctgcaattttgctaccatgaaaacttagttctgctagcagatgaagtgtatcaacagaacatttatcaagatgaacggccatttataagcgcaagaaaggttatgttcgacatgggtccaccaataagcagtgagcttcaggttgtttctttccacactgtgtcgaaagggtactggggagagtgcggacaacgtggtggatacttcgaaatgacaaatcttcctcccaagacagtagatgagatctacaaggttgcatcgatagcactgagtccaaacgttcctgggcaaatttttatgggagtaatggttaaccctcctaaacctggagatatctcgtacctgaagttcgctgctgaaagcaagtccatccatgaatctttgaggaggagagcacgcatgatgacagatggtttcaacagttgccgaaacgtcgtgtgcaatttcactgaaggagctatgtactctttcccccaaatacgtctgccaccgagagctattgaggcggcaagaagagccggcaaatcagcggacgtcttctactgcctcaagctcctggaggcgacaggaatctccactgttccgggctctggttttgggcaaaaggaaggggtgttccaccttcggaccactatccttccagcggaggaagacttccctgccatcatgtcgagcttcaagaagttcaacgactcgttcatggagcagtacgagggctactccaggctgtgagcaggaagagaaacaagagtttacagatctgaagaagagattattgattggaagcttattagttattgtaactcccttgaaaagcaggttgtgcggggattattgtttattgaataaaaagtccgccatttgattctactgccataccagtatatataattgtgaattggcttgt

SEQ ID NO: 16261 - protein, 478 aa, Zea mays subsp. mays
  peptide (1)..(478): Ceres Seq. ID no. 12406292
  misc_feature (118)..(465): Pfam Name: Aminotransferase class I and II Pfam Description: Aminotransferase class I and II
  misc_feature (1)..(472): Homolog of NCBI NO: 37533928 NR Description: putative alanine aminotransferase
  misc_feature (11)..(472): Homolog of NCBI NO: 7434113 NR Description: alanine transaminase (EC 2.6.1.2) - Chlamydomonas
  misc_feature (103)..(478): Homolog of NCBI NO: 14596229 NR Description: alanine aminotransferase-like protein
  misc_feature (1)..(478): Homolog of NCBI NO: 13430566 NR Description: putative alanine aminotransferase [Arabidopsis
  misc_feature (1)..(478): Homolog of NCBI NO: 21537112 NR Description: putative alanine aminotransferase [Arabidopsis
  misc_feature (1)..(478): Homolog of NCBI NO: 16604499 NR Description: At1g23310/F26F24_4 [Arabidopsis thaliana]
  misc_feature (1)..(478): Homolog of NCBI NO: 15223186 NR Description: putative alanine aminotransferase
  misc_feature (1)..(478): Homolog of NCBI NO: 30688330 NR Description: alanine aminotransferase -related [Arabidopsis
  misc_feature (3)..(478): Homolog of NCBI NO: 34899390 NR Description: putative alanine aminotransferase
  misc_feature (3)..(478): Homolog of NCBI NO: 29569153 NR Description: alanine aminotransferase [Oryza sativa (indica
MARKPLDYEELNENVKRVQYAVRGELYLRASELQKEGKKIIFTNVGNPHALGQKPLTFPRQVVALCQAPFLLDDPHVGLMFPADAIARAKHYLAMAPGGLGAYSDSRGIPGIRKEVADFIHKRDGYPSDPELIYLTDGASKGVMQILNTIIRNEMDGILVPVPQYPLYSATISLYGGSLVPYYLEEEANWSLDFVNIRQTVAEARSKGISVRAMVMINPGNPTGQCLSEANIKELLQFCYHENLVLLADEVYQQNIYQDERPFISARKVMFDMGPPISSELQVVSFHTVSKGYWGECGQRGGYFEMTNLPPKTVDEIYKVASIALSPNVPGQIFMGVMVNPPKPGDISYLKFAAESKSIHESLRRRARMMTDGFNSCRNVVCNFTEGAMYSFPQIRLPPRAIEAARRAGKSADVFYCLKLLEATGISTVPGSGFGQKEGVFHLRTTILPAEEDFPAIMSSFKKFNDSFMEQYEGYSRL

SEQ ID NO: 16262 - protein, 399 aa, Zea mays subsp. mays
  peptide (1)..(399): Ceres Seq. ID no. 12406293
  misc_feature (39)..(386): Pfam Name: Aminotransferase class I and II Pfam Description: Aminotransferase class I and II
  misc_feature (1)..(393): Homolog of NCBI NO: 37533928 NR Description: putative alanine aminotransferase
  misc_feature (1)..(393): Homolog of NCBI NO: 7434113 NR Description: alanine transaminase (EC 2.6.1.2) - Chlamydomonas
  misc_feature (24)..(399): Homolog of NCBI NO: 14596229 NR Description: alanine aminotransferase-like protein
  misc_feature (1)..(399): Homolog of NCBI NO: 13430566 NR Description: putative alanine aminotransferase [Arabidopsis
  misc_feature (1)..(399): Homolog of NCBI NO: 21537112 NR Description: putative alanine aminotransferase [Arabidopsis
  misc_feature (1)..(399): Homolog of NCBI NO: 16604499 NR Description: At1g23310/F26F24_4 [Arabidopsis thaliana]
  misc_feature (1)..(399): Homolog of NCBI NO: 15223186 NR Description: putative alanine aminotransferase
  misc_feature (1)..(399): Homolog of NCBI NO: 30688330 NR Description: alanine aminotransferase -related [Arabidopsis
  misc_feature (1)..(399): Homolog of NCBI NO: 34899390 NR Description: putative alanine aminotransferase
  misc_feature (1)..(399): Homolog of NCBI NO: 29569153 NR Description: alanine aminotransferase [Oryza sativa (indica
MFPADAIARAKHYLAMAPGGLGAYSDSRGIPGIRKEVADFIHKRDGYPSDPELIYLTDGASKGVMQILNTIIRNEMDGILVPVPQYPLYSATISLYGGSLVPYYLEEEANWSLDFVNIRQTVAEARSKGISVRAMVMINPGNPTGQCLSEANIKELLQFCYHENLVLLADEVYQQNIYQDERPFISARKVMFDMGPPISSELQVVSFHTVSKGYWGECGQRGGYFEMTNLPPKTVDEIYKVASIALSPNVPGQIFMGVMVNPPKPGDISYLKFAAESKSIHESLRRRARMMTDGFNSCRNVVCNFTEGAMYSFPQIRLPPRAIEAARRAGKSADVFYCLKLLEATGISTVPGSGFGQKEGVFHLRTTILPAEEDFPAIMSSFKKFNDSFMEQYEGYSRL

SEQ ID NO: 16263 - protein, 384 aa, Zea mays subsp. mays
  peptide (1)..(384): Ceres Seq. ID no. 12406294
  misc_feature (24)..(371): Pfam Name: Aminotransferase class I and II Pfam Description: Aminotransferase class I and II
  misc_feature (1)..(378): Homolog of NCBI NO: 37533928 NR Description: putative alanine aminotransferase
  misc_feature (1)..(378): Homolog of NCBI NO: 7434113 NR Description: alanine transaminase (EC 2.6.1.2) - Chlamydomonas
  misc_feature (9)..(384): Homolog of NCBI NO: 14596229 NR Description: alanine aminotransferase-like protein
  misc_feature (1)..(384): Homolog of NCBI NO: 13430566 NR Description: putative alanine aminotransferase [Arabidopsis
  misc_feature (1)..(384): Homolog of NCBI NO: 21537112 NR Description: putative alanine aminotransferase [Arabidopsis
  misc_feature (1)..(384): Homolog of NCBI NO: 16604499 NR Description: At1g23310/F26F24_4 [Arabidopsis thaliana]
  misc_feature (1)..(384): Homolog of NCBI NO: 15223186 NR Description: putative alanine aminotransferase
  misc_feature (1)..(384): Homolog of NCBI NO: 30688330 NR Description: alanine aminotransferase -related [Arabidopsis
  misc_feature (1)..(384): Homolog of NCBI NO: 34899390 NR Description: putative alanine aminotransferase
  misc_feature (1)..(384): Homolog of NCBI NO: 29569153 NR Description: alanine aminotransferase [Oryza sativa (indica
MAPGGLGAYSDSRGIPGIRKEVADFIHKRDGYPSDPELIYLTDGASKGVMQILNTIIRNEMDGILVPVPQYPLYSATISLYGGSLVPYYLEEEANWSLDFVNIRQTVAEARSKGISVRAMVMINPGNPTGQCLSEANIKELLQFCYHENLVLLADEVYQQNIYQDERPFISARKVMFDMGPPISSELQVVSFHTVSKGYWGECGQRGGYFEMTNLPPKTVDEIYKVASIALSPNVPGQIFMGVMVNPPKPGDISYLKFAAESKSIHESLRRRARMMTDGFNSCRNVVCNFTEGAMYSFPQIRLPPRAIEAARRAGKSADVFYCLKLLEATGISTVPGSGFGQKEGVFHLRTTILPAEEDFPAIMSSFKKFNDSFMEQYEGYSRL

SEQ ID NO: 16264 - DNA, 972 bp, Zea mays subsp. mays
  misc_feature (1)..(972): Ceres Seq. ID no. 12366045
  misc_feature: MA Experiment ID: 108515 Result: Up-regulated in Transcription
  misc_feature: MA Experiment 108515 PARAMETER Experiment Name: Zm_2mM_SA_P Parameter: Age (day) Value: 8
  misc_feature: MA Experiment 108515 PARAMETER Experiment Name: Zm_2mM_SA_P Parameter: Organism Value: Zea mays
  misc_feature: MA Experiment 108515 PARAMETER Experiment Name: Zm_2mM_SA_P Parameter: Plant Line Value: 35A19
  misc_feature: MA Experiment 108515 PARAMETER Experiment Name: Zm_2mM_SA_P Parameter: Timepoint (hr) Value: 12
  misc_feature: MA Experiment 108515 PARAMETER Experiment Name: Zm_2mM_SA_P Parameter: Tissue Value: Aerial
  misc_feature: MA Experiment 108515 PARAMETER Experiment Name: Zm_2mM_SA_P Parameter: Treatment Value: 2mM SA vs. No Treatment
  misc_feature: MA Experiment ID: 108527 Result: Up-regulated in Transcription
  misc_feature: MA Experiment 108527 PARAMETER Experiment Name: Zm_5mM_NO_P Parameter: Age (day) Value: 8
  misc_feature: MA Experiment 108527 PARAMETER Experiment Name: Zm_5mM_NO_P Parameter: Organism Value: Zea mays
  misc_feature: MA Experiment 108527 PARAMETER Experiment Name: Zm_5mM_NO_P Parameter: Plant Line Value: 35A19
  misc_feature: MA Experiment 108527 PARAMETER Experiment Name: Zm_5mM_NO_P Parameter: Timepoint (hr) Value: 6
  misc_feature: MA Experiment 108527 PARAMETER Experiment Name: Zm_5mM_NO_P Parameter: Tissue Value: Aerial
  misc_feature: MA Experiment 108527 PARAMETER Experiment Name: Zm_5mM_NO_P Parameter: Treatment Value: 5mM NO vs. No Treatment
  misc_feature: MA Experiment ID: 108535 Result: Down-regulated in Transcription
  misc_feature: MA Experiment 108535 PARAMETER Experiment Name: Zm_Meristem_P Parameter: Age (day) Value: 8
  misc_feature: MA Experiment 108535 PARAMETER Experiment Name: Zm_Meristem_P Parameter: Organism Value: Zea mays
  misc_feature: MA Experiment 108535 PARAMETER Experiment Name: Zm_Meristem_P Parameter: Plant Line Value: 35A19
  misc_feature: MA Experiment 108535 PARAMETER Experiment Name: Zm_Meristem_P Parameter: Tissue Value: Root Meristem vs. Above Root Meristem
  misc_feature: MA Experiment ID: 108559 Result: Up-regulated in Transcription
  misc_feature: MA Experiment 108559 PARAMETER Experiment Name: Zm_5mM_NO_P Parameter: Age (day) Value: 8
  misc_feature: MA Experiment 108559 PARAMETER Experiment Name: Zm_5mM_NO_P Parameter: Organism Value: Zea mays
  misc_feature: MA Experiment 108559 PARAMETER Experiment Name: Zm_5mM_NO_P Parameter: Plant Line Value: 35A19
  misc_feature: MA Experiment 108559 PARAMETER Experiment Name: Zm_5mM_NO_P Parameter: Timepoint (hr) Value: 12
  misc_feature: MA Experiment 108559 PARAMETER Experiment Name: Zm_5mM_NO_P Parameter: Tissue Value: Aerial
  misc_feature: MA Experiment 108559 PARAMETER Experiment Name: Zm_5mM_NO_P Parameter: Treatment Value: 5mM NO vs. No Treatment
  misc_feature: MA Experiment ID: 108599 Result: Down-regulated in Transcription
  misc_feature: MA Experiment 108599 PARAMETER Experiment Name: Zm_RT1_P Parameter: Age (day) Value: 11
  misc_feature: MA Experiment 108599 PARAMETER Experiment Name: Zm_RT1_P Parameter: Organism Value: Zea mays
  misc_feature: MA Experiment 108599 PARAMETER Experiment Name: Zm_RT1_P Parameter: Plant Line Value: rt1 mut vs. rt1 wt
  misc_feature: MA Experiment 108599 PARAMETER Experiment Name: Zm_RT1_P Parameter: Tissue Value: Roots
  misc_feature: MA Experiment ID: 108687 Result: Up-regulated in Transcription
  misc_feature: MA Experiment 108687 PARAMETER Experiment Name: Zm_Embryos-Flowers__P Parameter: Tissue Value: Embryo vs. Aerial+
  misc_feature: MA Experiment ID: 20000108 Result: Down-regulated in Transcription
  misc_feature: MA Experiment 20000108 PARAMETER Experiment Name: Zm_Root-Tips_P Parameter: Age (day) Value: 12
  misc_feature: MA Experiment 20000108 PARAMETER Experiment Name: Zm_Root-Tips_P Parameter: Organism Value: Zea mays
  misc_feature: MA Experiment 20000108 PARAMETER Experiment Name: Zm_Root-Tips_P Parameter: Tissue Value: Root tips vs. Root mid region    35
  misc_feature: MA Experiment 20000108 PARAMETER Experiment Name: Zm_Root-Tips_P Parameter: Tissue Value: Root tips vs. Root mid region   Sequence Listing-Misc Features (4)
  misc_feature: MA Experiment ID: 20000478 Result: Up-regulated in Transcription
  misc_feature: MA Experiment 20000478 PARAMETER Experiment Name: Zm_5mM_SA_P Parameter: Age (day) Value: 11
  misc_feature: MA Experiment 20000478 PARAMETER Experiment Name: Zm_5mM_SA_P Parameter: Organism Value: Zea mays
  misc_feature: MA Experiment 20000478 PARAMETER Experiment Name: Zm_5mM_SA_P Parameter: Plant Line Value: 35A19
  misc_feature: MA Experiment 20000478 PARAMETER Experiment Name: Zm_5mM_SA_P Parameter: Timepoint (hr) Value: 72
  misc_feature: MA Experiment 20000478 PARAMETER Experiment Name: Zm_5mM_SA_P Parameter: Tissue Value: Aerial
  misc_feature: MA Experiment 20000478 PARAMETER Experiment Name: Zm_5mM_SA_P Parameter: Treatment Value: 5mM SA vs. No Treatment
  misc_feature: MA Experiment ID: 20000479 Result: Up-regulated in Transcription
  misc_feature: MA Experiment 20000479 PARAMETER Experiment Name: Zm_Drought_P Parameter: Age (day) Value: 10
  misc_feature: MA Experiment 20000479 PARAMETER Experiment Name: Zm_Drought_P Parameter: Organism Value: Zea mays
  misc_feature: MA Experiment 20000479 PARAMETER Experiment Name: Zm_Drought_P Parameter: Plant Line Value: 35A19
  misc_feature: MA Experiment 20000479 PARAMETER Experiment Name: Zm_Drought_P Parameter: Timepoint (hr) Value: 48
  misc_feature: MA Experiment 20000479 PARAMETER Experiment Name: Zm_Drought_P Parameter: Tissue Value: Aerial
  misc_feature: MA Experiment 20000479 PARAMETER Experiment Name: Zm_Drought_P Parameter: Treatment Value: Drought vs. No Drought
  misc_feature: MA Experiment ID: 20000626 Result: Up-regulated in Transcription
  misc_feature: MA Experiment 20000626 PARAMETER Experiment Name: Zm_Herbicide-Treatments_P Parameter: Timepoint (hr) Value: 12
  misc_feature: MA Experiment 20000626 PARAMETER Experiment Name: Zm_Herbicide-Treatments_P Parameter: Tissue Value: Aerial
  misc_feature: MA Experiment 20000626 PARAMETER Experiment Name: Zm_Herbicide-Treatments_P Parameter: Treatment Value: Roundup vs. No Treatment
  misc_feature: MA Experiment ID: 20000627 Result: Up-regulated in Transcription
  misc_feature: MA Experiment 20000627 PARAMETER Experiment Name: Zm_Herbicide-Treatments_P Parameter: Timepoint (hr) Value: 12
  misc_feature: MA Experiment 20000627 PARAMETER Experiment Name: Zm_Herbicide-Treatments_P Parameter: Tissue Value: Aerial
  misc_feature: MA Experiment 20000627 PARAMETER Experiment Name: Zm_Herbicide-Treatments_P Parameter: Treatment Value: Finale vs. No Treatment
  misc_feature: MA Experiment ID: 20000629 Result: Up-regulated in Transcription
  misc_feature: MA Experiment 20000629 PARAMETER Experiment Name: Zm_Herbicide-Treatments_P Parameter: Timepoint (hr) Value: 12
  misc_feature: MA Experiment 20000629 PARAMETER Experiment Name: Zm_Herbicide-Treatments_P Parameter: Tissue Value: Aerial
  misc_feature: MA Experiment 20000629 PARAMETER Experiment Name: Zm_Herbicide-Treatments_P Parameter: Treatment Value: Trimec vs. No Treatment
actatggaccaggccttcgtgcaggcccccgagcaccgccccaagcccatcgtcaccgaggccaccggcatccctctcatcgacctctcgcctctggccgccagcggcggcgccgtggacgcgctggccgccgaggtgggcgcggcgagccgccgccgccggcagccgtggccgacggcgagcttgtgttcgataacaagtggccccaggatctaccgggcttcagagaggcgctggaggagtacgcgaaagcgatggaagagctggcgttcaagctgctggagctgatcgcccggagcctgaagctgaggcccgaccggctgcacggcttcttcaaggaccagacgaccttcatccggctgaaccactaccctccttgcccgagccccgacctggccctcggcgtggggcggcacaaggacgccggcgccctgaccatcctgtaccaggacgacgtcggggggctcgacgtccggcggcggctccgacggcgagtgggtccgcgtcaggcccgtgcccgactcgttcatcatcaacgtcggcgacctcatccaggtacgagagcgcggagcaccgggcgtcggtgaactcggcgagggagaggttctccatgccctacttcttcaacccggcgacctacaccatggtggagccggtggaggagctggtgagcaaggacgatccgcccaggtacgacgcctacaactggggcgacttcttcagcaccaggaagaacagcaacttcaagaagctcaacgtggagaacattcagatcgcgcatttcaagaagagcctcgtcctcgcctaactactgctactgctaggatccatgccattgccatgtcgtcttcagattcagagcacgccatgtcgtcgctagcttcgtggtagaacaaataatgatgtgcgtgctgtgtgtaagcatggatatggatgtgaatatgtaatatgatgagcactcctactttggtg

SEQ ID NO: 16265 - protein, 194 aa, Zea mays subsp. mays
  peptide (1)..(194): Ceres Seq. ID no. 12366046
  misc_feature (66)..(158): Homolog of NCBI NO: 15228785 NR Description: leucoanthocyanidin dioxygenase -like protein
  misc_feature (65)..(159): Homolog of NCBI NO: 21537324 NR Description: leucoanthocyanidin dioxygenase-like protein
  misc_feature (65)..(159): Homolog of NCBI NO: 15239179 NR Description: leucoanthocyanidin dioxygenase-like protein
  misc_feature (63)..(157): Homolog of NCBI NO: 15235124 NR Description: putative flavanone 3-beta-hydroxylase; protein
  misc_feature (61)..(160): Homolog of NCBI NO: 18103924 NR Description: putative oxylase protein [Pinus pinaster]
  misc_feature (61)..(160): Homolog of NCBI NO: 30685157 NR Description: flavonol synthase family [Arabidopsis thaliana]
  misc_feature (61)..(160): Homolog of NCBI NO: 18402081 NR Description: expressed protein
  misc_feature (61)..(160): Homolog of NCBI NO: 21593702 NR Description: unknown [Arabidopsis thaliana]
  misc_feature (58)..(160): Homolog of NCBI NO: 18402079 NR Description: expressed protein
  misc_feature (140)..(160): Homolog of NCBI NO: 40253917 NR Description: putative Isopenicillin N synthase and related
YGPGLRAGPRAPPQAHRHRGHRHPSHRPLASGRQRRRRGRAGRRGGRGEPPPPAAVADGELVFDNKWPQDLPGFREALEEYAKAMEELAFKLLELIARSLKLRPDRLHGFFKDQTTFIRLNHYPPCPSPDLALGVGRHKDAGALTILYQDDVGGLDVRRRLRRRVGPRQARARLVHHQRRRPHPGTRARSTGRR

SEQ ID NO: 16266 - protein, 110 aa, Zea mays subsp. mays
  peptide (1)..(110): Ceres Seq. ID no. 12366047
  misc_feature (1)..(74): Homolog of NCBI NO: 15228785 NR Description: leucoanthocyanidin dioxygenase -like protein
  misc_feature (1)..(75): Homolog of NCBI NO: 21537324 NR Description: leucoanthocyanidin dioxygenase-like protein
  misc_feature (1)..(75): Homolog of NCBI NO: 15239179 NR Description: leucoanthocyanidin dioxygenase-like protein
  misc_feature (1)..(73): Homolog of NCBI NO: 15235124 NR Description: putative flavanone 3-beta-hydroxylase; protein
  misc_feature (1)..(76): Homolog of NCBI NO: 18103924 NR Description: putative oxylase protein [Pinus pinaster]
  misc_feature (1)..(76): Homolog of NCBI NO: 30685157 NR Description: flavonol synthase family [Arabidopsis thaliana]
  misc_feature (1)..(76): Homolog of NCBI NO: 18402081 NR Description: expressed protein
  misc_feature (1)..(76): Homolog of NCBI NO: 21593702 NR Description: unknown [Arabidopsis thaliana]
  misc_feature (1)..(76): Homolog of NCBI NO: 18402079 NR Description: expressed protein
  misc_feature (56)..(76): Homolog of NCBI NO: 40253917 NR Description: putative Isopenicillin N synthase and related
MEELAFKLLELIARSLKLRPDRLHGFFKDQTTFIRLNHYPPCPSPDLALGVGRHKDAGALTILYQDDVGGLDVRRRLRRRVGPRQARARLVHHQRRRPHPGTRARSTGRR

SEQ ID NO: 16267 - DNA, 495 bp, Zea mays subsp. mays
  misc_feature (1)..(495): Ceres Seq. ID no. 5759922
  misc_feature: MA Experiment ID: 108535 Result: Up-regulated in Transcription
  misc_feature: MA Experiment 108535 PARAMETER Experiment Name: Zm_Meristem_P Parameter: Age (day) Value: 8
  misc_feature: MA Experiment 108535 PARAMETER Experiment Name: Zm_Meristem_P Parameter: Organism Value: Zea mays
  misc_feature: MA Experiment 108535 PARAMETER Experiment Name: Zm_Meristem_P Parameter: Plant Line Value: 35A19
  misc_feature: MA Experiment 108535 PARAMETER Experiment Name: Zm_Meristem_P Parameter: Tissue Value: Root Meristem vs. Above Root Meristem
  misc_feature: MA Experiment ID: 20000535 Result: Up-regulated in Transcription
  misc_feature: MA Experiment 20000535 PARAMETER Experiment Name: Zm_Hybrid_Seed_Dev_P Parameter: DAP Value: 30 vs. 12
  misc_feature: MA Experiment 20000535 PARAMETER Experiment Name: Zm_Hybrid_Seed_Dev_P Parameter: Organism Value: Zea mays
  misc_feature: MA Experiment 20000535 PARAMETER Experiment Name: Zm_Hybrid_Seed_Dev_P Parameter: Plant Line Value: 35A19
  misc_feature: MA Experiment 20000535 PARAMETER Experiment Name: Zm_Hybrid_Seed_Dev_P Parameter: Tissue Value: Embryo vs. Unfert Floret
gtaccaacaggaaaaaaggcccagaggcagtgccgtgaccgattcgagacgcaagagaaggatcgagacgaggcggcggttttccggggcagcatcgtctcggccacgaagatgtcttactcaaggggctcaagtgaaaggtatggatctcgctcaccttactcgagaagcacaaggtaccgaagtcgctctaggagtgtcgactctagtgatgctgaaaaccctgggaacaacctgtatgtgactggtttgtcggctcgtgtaacggatcgagatctggagaagcacttctccactgagggtgaggtgattgatgcaagcgttgtgtatgatccttggacaagggaatcacgggggtttggttttgttaccatggctgctgttaaagatgcagatcgctgcatcaaatatctggaccgttctgtgttgcaaggtcgggtcataactgttgagaaggtaaaatcataagattgggagcatctaactttcttattt

SEQ ID NO: 16268 - protein, 155 aa, Zea mays subsp. mays
  peptide (1)..(155): Ceres Seq. ID no. 5759923
  misc_feature (79)..(150): Pfam Name: RNA recognition motif. (a.k.a. RRM, RBD, or RNP domain) Pfam Description: RNA recognition motif. (a.k.a. RRM, RBD, or RNP
  misc_feature (13)..(154): Homolog of NCBI NO: 16944647 NR Description: conserved hypothetical protein [Neurospora crassa]
  misc_feature (45)..(154): Homolog of NCBI NO: 40738429 NR Description: hypothetical protein AN6676.2 [Aspergillus
  misc_feature (37)..(152): Homolog of NCBI NO: 7489207 NR Description: transformer-SR ribonucleoprotein - common tobacco
  misc_feature (37)..(154): Homolog of NCBI NO: 40253470 NR Description: putative transformer-SR ribonucleoprotein
  misc_feature (65)..(154): Homolog of NCBI NO: 8778550 NR Description: F22G5.31 [Arabidopsis thaliana]
  misc_feature (36)..(154): Homolog of NCBI NO: 11275253 NR Description: transformer-2-like protein - liverwort
  misc_feature (38)..(152): Homolog of NCBI NO: 30680096 NR Description: transformer serine/arginine-rich
  misc_feature (38)..(154): Homolog of NCBI NO: 28973767 NR Description: putative transformer-SR ribonucleoprotein
  misc_feature (38)..(154): Homolog of NCBI NO: 18390758 NR Description: transformer serine/arginine-rich
  misc_feature (60)..(154): Homolog of NCBI NO: 34902002 NR Description: putative transformer serine/arginine-rich
VPTGKKAQRQCRDRFETQEKDRDEAAVFRGSIVSATKMSYSRGSSERYGSRSPYSRSTRYRSRSRSVDSSDAENPGNNLYVTGLSARVTDRDLEKHFSTEGEVIDASVVYDPWTRESRGFGFVTMAAVKDADRCIKYLDRSVLQGRVITVEKVKS

SEQ ID NO: 16269 - protein, 118 aa, Zea mays subsp. mays
  peptide (1)..(118): Ceres Seq. ID no. 5759924
  misc_feature (42)..(113): Pfam Name: RNA recognition motif. (a.k.a. RRM, RBD, or RNP domain) Pfam Description: RNA recognition motif. (a.k.a. RRM, RBD, or RNP
  misc_feature (28)..(117): Homolog of NCBI NO: 8778550 NR Description: F22G5.31 [Arabidopsis thaliana]
  misc_feature (1)..(117): Homolog of NCBI NO: 11275253 NR Description: transformer-2-like protein - liverwort
  misc_feature (1)..(115): Homolog of NCBI NO: 30680096 NR Description: transformer serine/arginine-rich
  misc_feature (1)..(117): Homolog of NCBI NO: 16944647 NR Description: conserved hypothetical protein [Neurospora crassa]
  misc_feature (1)..(115): Homolog of NCBI NO: 7489207 NR Description: transformer-SR ribonucleoprotein - common tobacco
  misc_feature (1)..(117): Homolog of NCBI NO: 40253470 NR Description: putative transformer-SR ribonucleoprotein
  misc_feature (8)..(117): Homolog of NCBI NO: 40738429 NR Description: hypothetical protein AN6676.2 [Aspergillus
  misc_feature (1)..(117): Homolog of NCBI NO: 28973767 NR Description: putative transformer-SR ribonucleoprotein
  misc_feature (1)..(117): Homolog of NCBI NO: 18390758 NR Description: transformer serine/arginine-rich
  misc_feature (23)..(117): Homolog of NCBI NO: 34902002 NR Description: putative transformer serine/arginine-rich
MSYSRGSSERYGSRSPYSRSTRYRSRSRSVDSSDAENPGNNLYVTGLSARVTDRDLEKHFSTEGEVIDASVVYDPWTRESRGFGFVTMAAVKDADRCIKYLDRSVLQGRVITVEKVKS

SEQ ID NO: 16270 - protein, 80 aa, Zea mays subsp. mays
  peptide (1)..(80): Ceres Seq. ID no. 5759925
YQQEKRPRGSAVTDSRRKRRIETRRRFSGAASSRPRRCLTQGAQVKGMDLAHLTREAQGTEVALGVSTLVMLKTLGTTCM

SEQ ID NO: 16271 - DNA, 1316 bp, Zea mays subsp. mays
  misc_feature (1)..(1316): Ceres Seq. ID no. 12349557
  misc_feature: MA Experiment ID: 108522 Result: Up-regulated in Transcription
  misc_feature: MA Experiment 108522 PARAMETER Experiment Name: Zm_42deg_Heat_P Parameter: Age (day) Value: 8
  misc_feature: MA Experiment 108522 PARAMETER Experiment Name: Zm_42deg_Heat_P Parameter: Organism Value: Zea mays
  misc_feature: MA Experiment 108522 PARAMETER Experiment Name: Zm_42deg_Heat_P Parameter: Plant Line Value: 35A19
  misc_feature: MA Experiment 108522 PARAMETER Experiment Name: Zm_42deg_Heat_P Parameter: Temperature (deg C) Value: 42 vs. 22
  misc_feature: MA Experiment 108522 PARAMETER Experiment Name: Zm_42deg_Heat_P Parameter: Timepoint (hr) Value: 1
  misc_feature: MA Experiment 108522 PARAMETER Experiment Name: Zm_42deg_Heat_P Parameter: Tissue Value: Aerial
  misc_feature: MA Experiment ID: 108535 Result: Down-regulated in Transcription
  misc_feature: MA Experiment 108535 PARAMETER Experiment Name: Zm_Meristem_P Parameter: Age (day) Value: 8
  misc_feature: MA Experiment 108535 PARAMETER Experiment Name: Zm_Meristem_P Parameter: Organism Value: Zea mays
  misc_feature: MA Experiment 108535 PARAMETER Experiment Name: Zm_Meristem_P Parameter: Plant Line Value: 35A19
  misc_feature: MA Experiment 108535 PARAMETER Experiment Name: Zm_Meristem_P Parameter: Tissue Value: Root Meristem vs. Above Root Meristem
  misc_feature: MA Experiment ID: 108543 Result: Up-regulated in Transcription
  misc_feature: MA Experiment ID: 108544 Result: Up-regulated in Transcription
  misc_feature: MA Experiment ID: 108546 Result: Down-regulated in Transcription
  misc_feature: MA Experiment 108546 PARAMETER Experiment Name: Zm_Imbibed_Seeds_P Parameter: Age (day) Value: 3 vs. 2
  misc_feature: MA Experiment 108546 PARAMETER Experiment Name: Zm_Imbibed_Seeds_P Parameter: Organism Value: Zea mays
  misc_feature: MA Experiment 108546 PARAMETER Experiment Name: Zm_Imbibed_Seeds_P Parameter: Plant Line Value: 35A19
  misc_feature: MA Experiment 108546 PARAMETER Experiment Name: Zm_Imbibed_Seeds_P Parameter: Tissue Value: Roots vs. Embryo
  misc_feature: MA Experiment ID: 108687 Result: Down-regulated in Transcription
  misc_feature: MA Experiment 108687 PARAMETER Experiment Name: Zm_Embryos-Flowers__P Parameter: Tissue Value: Embryo vs. Aerial+
  misc_feature: MA Experiment ID: 108689 Result: Up-regulated in Transcription
  misc_feature: MA Experiment 108689 PARAMETER Experiment Name: Zm_Drought_Roots_P Parameter: Age (day) Value: 9
  misc_feature: MA Experiment 108689 PARAMETER Experiment Name: Zm_Drought_Roots_P Parameter: Organism Value: Zea mays
  misc_feature: MA Experiment 108689 PARAMETER Experiment Name: Zm_Drought_Roots_P Parameter: Plant Line Value: 35A19
  misc_feature: MA Experiment 108689 PARAMETER Experiment Name: Zm_Drought_Roots_P Parameter: Timepoint (hr) Value: 24
  misc_feature: MA Experiment 108689 PARAMETER Experiment Name: Zm_Drought_Roots_P Parameter: Tissue Value: Roots
  misc_feature: MA Experiment 108689 PARAMETER Experiment Name: Zm_Drought_Roots_P Parameter: Treatment Value: Drought vs. No Drought
  misc_feature: MA Experiment ID: 20000477 Result: Up-regulated in Transcription
  misc_feature: MA Experiment 20000477 PARAMETER Experiment Name: Zm_5mM_SA_P Parameter: Age (day) Value: 10
  misc_feature: MA Experiment 20000477 PARAMETER Experiment Name: Zm_5mM_SA_P Parameter: Organism Value: Zea mays
  misc_feature: MA Experiment 20000477 PARAMETER Experiment Name: Zm_5mM_SA_P Parameter: Plant Line Value: 35A19
  misc_feature: MA Experiment 20000477 PARAMETER Experiment Name: Zm_5mM_SA_P Parameter: Timepoint (hr) Value: 48
  misc_feature: MA Experiment 20000477 PARAMETER Experiment Name: Zm_5mM_SA_P Parameter: Tissue Value: Aerial
  misc_feature: MA Experiment 20000477 PARAMETER Experiment Name: Zm_5mM_SA_P Parameter: Treatment Value: 5mM SA vs. No Treatment
  misc_feature: MA Experiment ID: 20000478 Result: Up-regulated in Transcription
  misc_feature: MA Experiment 20000478 PARAMETER Experiment Name: Zm_5mM_SA_P Parameter: Age (day) Value: 11
  misc_feature: MA Experiment 20000478 PARAMETER Experiment Name: Zm_5mM_SA_P Parameter: Organism Value: Zea mays
  misc_feature: MA Experiment 20000478 PARAMETER Experiment Name: Zm_5mM_SA_P Parameter: Plant Line Value: 35A19
  misc_feature: MA Experiment 20000478 PARAMETER Experiment Name: Zm_5mM_SA_P Parameter: Timepoint (hr) Value: 72
  misc_feature: MA Experiment 20000478 PARAMETER Experiment Name: Zm_5mM_SA_P Parameter: Tissue Value: Aerial
  misc_feature: MA Experiment 20000478 PARAMETER Experiment Name: Zm_5mM_SA_P Parameter: Treatment Value: 5mM SA vs. No Treatment
  misc_feature: MA Experiment ID: 20000532 Result: Up-regulated in Transcription
  misc_feature: MA Experiment 20000532 PARAMETER Experiment Name: Zm_0.001percent_MeJA_P Parameter: Age (day) Value: 10
  misc_feature: MA Experiment 20000532 PARAMETER Experiment Name: Zm_0.001percent_MeJA_P Parameter: Organism Value: Zea mays
  misc_feature: MA Experiment 20000532 PARAMETER Experiment Name: Zm_0.001percent_MeJA_P Parameter: Plant Line Value: 35A19
  misc_feature: MA Experiment 20000532 PARAMETER Experiment Name: Zm_0.001percent_MeJA_P Parameter: Timepoint (hr) Value: 48
  misc_feature: MA Experiment 20000532 PARAMETER Experiment Name: Zm_0.001percent_MeJA_P Parameter: Tissue Value: Aerial
  misc_feature: MA Experiment 20000532 PARAMETER Experiment Name: Zm_0.001percent_MeJA_P Parameter: Treatment Value: 0.001percent MeJA vs. No Treatment
gtctagatcgctcgtccggtgtggtctctggacttgcttgccgttcacttctcttcagcggcagcgtggcaaggcaacgagagcaacgaagagtattcaaaccgaaaacaatggatccggtgcggaagagcgtgtgcgtgaccggcgctggcggcttcgtcgcgtcggagctggtgaagctcctcctctcccggggccaatacgcggtccgcggcaccgtgcgcgaccctggtgctagcaagaatgcccatctcaaggtgctggaaggagctgaggaaaggttgcagcttctcaaggctgatctgatggactacgacagcattgcatcagcagttgccggctgtgagggtgtcttccatgtagctagccctgtcctttcccatcgaccctccaaccctgaggtggaggtcatagctcccgctgtaataggtacaaccaatgtgttaaaggcttgctatgaggcaaaagttaggcgagttgtggtggtgtcttcatgtggagctgtgtatgctaatcctatttatccgaagggtaaggtgtttgatgaagactgctggtcagatgaggattactgcaggaagaaggaggattggtatttagtttccaaaacactgtcggaacgagaggctcttgcttttgcagcaaaaacagggctggacgttgtaactgtttgtccgtcattagtatttggacccttgatgcagcctacagtaaatttgagcagcgaaatgatccttaaatatttcaaagatctcgagactgttgaaaatgtactcagtaatatggtggatattcgtgatgttgctgatgctcttcttctgacttacgaaaagccagaagcgtctggacgatacatctgcagttcacatgcaataaaaatttctgatatgataaacatactgaagaccatgtatccgtcttacccttatcccaaaaattttgtggaagatgatgtcaactctgtatacagctctgagaaactgcagaagctggggtggagcttcaagcctatagaggaatccctccgtgacactgttgaatcctacaaggcatttggcatcctgaattgaacatcgaactaggattgtttccatctgctgttgcctccgaactcctcctgaataatgtaggcgcagtgacaacagcactgccgttctctttatttttcaacactattatgtagtggttcaggccaaataagtaggcccggtgctgactgttgtatggtttgtggcctattgtcgttgctaaaaactagaaatatgcgtactaatgttgcattgctgcacttgatttgcttgtcgtcattctgatgc

SEQ ID NO: 16272 - protein, 355 aa, Zea mays subsp. mays
  peptide (1)..(355): Ceres Seq. ID no. 12349558
  misc_feature (40)..(310): Pfam Name: 3-beta hydroxysteroid dehydrogenase/isomerase family Pfam Description: 3-beta hydroxysteroid dehydrogenase/isomerase
  misc_feature (42)..(354): Homolog of NCBI NO: 40233135 NR Description: cinnamoyl CoA reductase [Populus tomentosa]
  misc_feature (42)..(354): Homolog of NCBI NO: 25140434 NR Description: cinnamoyl CoA reductase [Solanum tuberosum]
  misc_feature (42)..(354): Homolog of NCBI NO: 9964087 NR Description: cinnamoyl CoA reductase [Lolium perenne]
  misc_feature (42)..(354): Homolog of NCBI NO: 9998901 NR Description: cinnamoyl-CoA reductase [Populus balsamifera
  misc_feature (42)..(354): Homolog of NCBI NO: 31414896 NR Description: cinnamoyl CoA reductase [Fragaria x ananassa]
  misc_feature (42)..(352): Homolog of NCBI NO: 17978649 NR Description: cinnamoyl-CoA reductase [Pinus taeda]
  misc_feature (40)..(354): Homolog of NCBI NO: 6554472 NR Description: putative cinnamoyl-CoA reductase; 14056-15506
  misc_feature (40)..(354): Homolog of NCBI NO: 15223068 NR Description: putative cinnamoyl-CoA reductase; protein id:
  misc_feature (37)..(349): Homolog of NCBI NO: 15226135 NR Description: putative cinnamoyl-CoA reductase
  misc_feature (37)..(349): Homolog of NCBI NO: 15226134 NR Description: putative cinnamoyl-CoA reductase
LDRSSGVVSGLACRSLLFSGSVARQREQRRVFKPKTMDPVRKSVCVTGAGGFVASELVKLLLSRGQYAVRGTVRDPGASKNAHLKVLEGAEERLQLLKADLMDYDSIASAVAGCEGVFHVASPVLSHRPSNPEVEVIAPAVIGTTNVLKACYEAKVRRVVVVSSCGAVYANPIYPKGKVFDEDCWSDEDYCRKKEDWYLVSKTLSEREALAFAAKTGLDVVTVCPSLVFGPLMQPTVNLSSEMILKYFKDLETVENVLSNMVDIRDVADALLLTYEKPEASGRYICSSHAIKISDMINILKTMYPSYPYPKNFVEDDVNSVYSSEKLQKLGWSFKPIEESLRDTVESYKAFGILN

SEQ ID NO: 16273 - protein, 319 aa, Zea mays subsp. mays
  peptide (1)..(319): Ceres Seq. ID no. 12349559
  misc_feature (4)..(274): Pfam Name: 3-beta hydroxysteroid dehydrogenase/isomerase family Pfam Description: 3-beta hydroxysteroid dehydrogenase/isomerase
  misc_feature (6)..(318): Homolog of NCBI NO: 40233135 NR Description: cinnamoyl CoA reductase [Populus tomentosa]
  misc_feature (6)..(318): Homolog of NCBI NO: 25140434 NR Description: cinnamoyl CoA reductase [Solanum tuberosum]
  misc_feature (6)..(318): Homolog of NCBI NO: 9964087 NR Description: cinnamoyl CoA reductase [Lolium perenne]
  misc_feature (6)..(318): Homolog of NCBI NO: 9998901 NR Description: cinnamoyl-CoA reductase [Populus balsamifera
  misc_feature (6)..(318): Homolog of NCBI NO: 31414896 NR Description: cinnamoyl CoA reductase [Fragaria x ananassa]
  misc_feature (6)..(316): Homolog of NCBI NO: 17978649 NR Description: cinnamoyl-CoA reductase [Pinus taeda]
  misc_feature (4)..(318): Homolog of NCBI NO: 6554472 NR Description: putative cinnamoyl-CoA reductase; 14056-15506
  misc_feature (4)..(318): Homolog of NCBI NO: 15223068 NR Description: putative cinnamoyl-CoA reductase; protein id:
  misc_feature (1)..(313): Homolog of NCBI NO: 15226135 NR Description: putative cinnamoyl-CoA reductase
  misc_feature (1)..(313): Homolog of NCBI NO: 15226134 NR Description: putative cinnamoyl-CoA reductase
MDPVRKSVCVTGAGGFVASELVKLLLSRGQYAVRGTVRDPGASKNAHLKVLEGAEERLQLLKADLMDYDSIASAVAGCEGVFHVASPVLSHRPSNPEVEVIAPAVIGTTNVLKACYEAKVRRVVVVSSCGAVYANPIYPKGKVFDEDCWSDEDYCRKKEDWYLVSKTLSEREALAFAAKTGLDVVTVCPSLVFGPLMQPTVNLSSEMILKYFKDLETVENVLSNMVDIRDVADALLLTYEKPEASGRYICSSHAIKISDMINILKTMYPSYPYPKNFVEDDVNSVYSSEKLQKLGWSFKPIEESLRDTVESYKAFGILN

SEQ ID NO: 16274 - protein, 254 aa, Zea mays subsp. mays
  peptide (1)..(254): Ceres Seq. ID no. 12349560
  misc_feature (1)..(209): Pfam Name: 3-beta hydroxysteroid dehydrogenase/isomerase family Pfam Description: 3-beta hydroxysteroid dehydrogenase/isomerase
  misc_feature (1)..(253): Homolog of NCBI NO: 40233135 NR Description: cinnamoyl CoA reductase [Populus tomentosa]
  misc_feature (1)..(253): Homolog of NCBI NO: 25140434 NR Description: cinnamoyl CoA reductase [Solanum tuberosum]
  misc_feature (1)..(253): Homolog of NCBI NO: 9964087 NR Description: cinnamoyl CoA reductase [Lolium perenne]
  misc_feature (1)..(253): Homolog of NCBI NO: 9998901 NR Description: cinnamoyl-CoA reductase [Populus balsamifera
  misc_feature (1)..(253): Homolog of NCBI NO: 31414896 NR Description: cinnamoyl CoA reductase [Fragaria x ananassa]
  misc_feature (1)..(251): Homolog of NCBI NO: 17978649 NR Description: cinnamoyl-CoA reductase [Pinus taeda]
  misc_feature (1)..(253): Homolog of NCBI NO: 6554472 NR Description: putative cinnamoyl-CoA reductase; 14056-15506
  misc_feature (1)..(253): Homolog of NCBI NO: 15223068 NR Description: putative cinnamoyl-CoA reductase; protein id:
  misc_feature (1)..(248): Homolog of NCBI NO: 15226135 NR Description: putative cinnamoyl-CoA reductase
  misc_feature (1)..(248): Homolog of NCBI NO: 15226134 NR Description: putative cinnamoyl-CoA reductase
MDYDSIASAVAGCEGVFHVASPVLSHRPSNPEVEVIAPAVIGTTNVLKACYEAKVRRVVVVSSCGAVYANPIYPKGKVFDEDCWSDEDYCRKKEDWYLVSKTLSEREALAFAAKTGLDVVTVCPSLVFGPLMQPTVNLSSEMILKYFKDLETVENVLSNMVDIRDVADALLLTYEKPEASGRYICSSHAIKISDMINILKTMYPSYPYPKNFVEDDVNSVYSSEKLQKLGWSFKPIEESLRDTVESYKAFGILN

SEQ ID NO: 16275 - DNA, 662 bp, Zea mays subsp. mays
  misc_feature (1)..(662): Ceres Seq. ID no. 12349561
  misc_feature: MA Experiment ID: 108528 Result: Up-regulated in Transcription
  misc_feature: MA Experiment 108528 PARAMETER Experiment Name: Zm_Imbibed_Seeds_P Parameter: Age (day) Value: 5 vs. 2
  misc_feature: MA Experiment 108528 PARAMETER Experiment Name: Zm_Imbibed_Seeds_P Parameter: Organism Value: Zea mays
  misc_feature: MA Experiment 108528 PARAMETER Experiment Name: Zm_Imbibed_Seeds_P Parameter: Plant Line Value: 35A19
  misc_feature: MA Experiment 108528 PARAMETER Experiment Name: Zm_Imbibed_Seeds_P Parameter: Tissue Value: Aerial vs. Embryo
  misc_feature: MA Experiment ID: 108530 Result: Up-regulated in Transcription
  misc_feature: MA Experiment 108530 PARAMETER Experiment Name: Zm_Imbibed_Seeds_P Parameter: Age (day) Value: 6 vs. 2
  misc_feature: MA Experiment 108530 PARAMETER Experiment Name: Zm_Imbibed_Seeds_P Parameter: Organism Value: Zea mays
  misc_feature: MA Experiment 108530 PARAMETER Experiment Name: Zm_Imbibed_Seeds_P Parameter: Plant Line Value: 35A19
  misc_feature: MA Experiment 108530 PARAMETER Experiment Name: Zm_Imbibed_Seeds_P Parameter: Tissue Value: Aerial vs. Embryo
  misc_feature: MA Experiment ID: 108536 Result: Down-regulated in Transcription
  misc_feature: MA Experiment 108536 PARAMETER Experiment Name: Zm_Meristem_P Parameter: Age (day) Value: 8
  misc_feature: MA Experiment 108536 PARAMETER Experiment Name: Zm_Meristem_P Parameter: Organism Value: Zea mays
  misc_feature: MA Experiment 108536 PARAMETER Experiment Name: Zm_Meristem_P Parameter: Plant Line Value: 35A19
  misc_feature: MA Experiment 108536 PARAMETER Experiment Name: Zm_Meristem_P Parameter: Tissue Value: Shoot Meristem vs. Above Shoot Meristem
  misc_feature: MA Experiment ID: 108545 Result: Up-regulated in Transcription
  misc_feature: MA Experiment 108545 PARAMETER Experiment Name: Zm_Imbibed_Seeds_P Parameter: Age (day) Value: 3 vs. 2
  misc_feature: MA Experiment 108545 PARAMETER Experiment Name: Zm_Imbibed_Seeds_P Parameter: Organism Value: Zea mays
  misc_feature: MA Experiment 108545 PARAMETER Experiment Name: Zm_Imbibed_Seeds_P Parameter: Plant Line Value: 35A19
  misc_feature: MA Experiment 108545 PARAMETER Experiment Name: Zm_Imbibed_Seeds_P Parameter: Tissue Value: Aerial vs. Embryo
  misc_feature: MA Experiment ID: 108547 Result: Up-regulated in Transcription
  misc_feature: MA Experiment 108547 PARAMETER Experiment Name: Zm_Imbibed_Seeds_P Parameter: Age (day) Value: 4 vs. 2
  misc_feature: MA Experiment 108547 PARAMETER Experiment Name: Zm_Imbibed_Seeds_P Parameter: Organism Value: Zea mays
  misc_feature: MA Experiment 108547 PARAMETER Experiment Name: Zm_Imbibed_Seeds_P Parameter: Plant Line Value: 35A19
  misc_feature: MA Experiment 108547 PARAMETER Experiment Name: Zm_Imbibed_Seeds_P Parameter: Tissue Value: Aerial vs. Embryo
  misc_feature: MA Experiment ID: 20000479 Result: Down-regulated in Transcription
  misc_feature: MA Experiment 20000479 PARAMETER Experiment Name: Zm_Drought_P Parameter: Age (day) Value: 10
  misc_feature: MA Experiment 20000479 PARAMETER Experiment Name: Zm_Drought_P Parameter: Organism Value: Zea mays
  misc_feature: MA Experiment 20000479 PARAMETER Experiment Name: Zm_Drought_P Parameter: Plant Line Value: 35A19
  misc_feature: MA Experiment 20000479 PARAMETER Experiment Name: Zm_Drought_P Parameter: Timepoint (hr) Value: 48
  misc_feature: MA Experiment 20000479 PARAMETER Experiment Name: Zm_Drought_P Parameter: Tissue Value: Aerial
  misc_feature: MA Experiment 20000479 PARAMETER Experiment Name: Zm_Drought_P Parameter: Treatment Value: Drought vs. No Drought
  misc_feature: MA Experiment ID: 20000492 Result: Down-regulated in Transcription
  misc_feature: MA Experiment 20000492 PARAMETER Experiment Name: Zm_Hybrid_Seed_Dev_P Parameter: DAP Value: 12
  misc_feature: MA Experiment 20000492 PARAMETER Experiment Name: Zm_Hybrid_Seed_Dev_P Parameter: Organism Value: Zea mays
  misc_feature: MA Experiment 20000492 PARAMETER Experiment Name: Zm_Hybrid_Seed_Dev_P Parameter: Plant Line Value: 35A19
  misc_feature: MA Experiment 20000492 PARAMETER Experiment Name: Zm_Hybrid_Seed_Dev_P Parameter: Tissue Value: Fert Kernel vs. Unfert Floret
  misc_feature: MA Experiment ID: 20000535 Result: Down-regulated in Transcription
  misc_feature: MA Experiment 20000535 PARAMETER Experiment Name: Zm_Hybrid_Seed_Dev_P Parameter: DAP Value: 30 vs. 12
  misc_feature: MA Experiment 20000535 PARAMETER Experiment Name: Zm_Hybrid_Seed_Dev_P Parameter: Organism Value: Zea mays
  misc_feature: MA Experiment 20000535 PARAMETER Experiment Name: Zm_Hybrid_Seed_Dev_P Parameter: Plant Line Value: 35A19
  misc_feature: MA Experiment 20000535 PARAMETER Experiment Name: Zm_Hybrid_Seed_Dev_P Parameter: Tissue Value: Embryo vs. Unfert Floret
actagttgctagtgctaccaagaacaggaaggaaacaccgccgccgccgcgccttccattccagtactcgcggaggaaaggaacaccagccagcgccatggtcacgtcgacgaccgccgccgccgtgctgtccccgccgtccgtggccgggcttcgcctggcgccgtctccccgggcgcgcgtggcgttccgcgcggcgcgggcgcggcggtccgtggcggcgcgcgcggagctgagcccgtcgctggtgatcagcctgagcacgggcgtgtcgctcttcctgggccgcttcgtcttcttcaacttccagcgggagaacgtggcgaagcaggtgcccgagcagaacggcaagacgcacttcgacgccggcgacgagcgcgccaaggagttctcgggcctgctcaagtccaacgaccccgtgggcttcaacctcgtcgacgtcctcgcctggggctcgctcggccacatcgtcgcctactacatcctcgccacctcaagcaacggatacgaccccaacttcttctgagcggccggctgcgggcatgttcttgagcctgcctgtattctactccgtgtgtgttgagccatatatctgatgctcaaggattggttaatttgaacaagtggtgcaactgcgcgtgtacatggatttgctcttcccc

SEQ ID NO: 16276 - protein, 174 aa, Zea mays subsp. mays
  peptide (1)..(174): Ceres Seq. ID no. 12349562
  misc_feature (78)..(171): Pfam Name: Photosystem I psaG / psaK Pfam Description: Photosystem I psaG / psaK
  misc_feature (40)..(167): Homolog of NCBI NO: 548605 NR Description: Photosystem I reaction center subunit psaK, precursor (Photosystem I subunit X) (PSI-K) (Light-harvesting
  misc_feature (67)..(162): Homolog of NCBI NO: 12831160 NR Description: PsaG-like protein [Dunaliella salina]
  misc_feature (77)..(114): Homolog of NCBI NO: 131193 NR Description: Photosystem I reaction center subunit V (PSI-G)
  misc_feature (53)..(166): Homolog of NCBI NO: 131191 NR Description: Photosystem I reaction center subunit V, precursor (PSI-G) (Light-harvesting complex I 10 kDa protein)
  misc_feature (81)..(170): Homolog of NCBI NO: 17369611 NR Description: Photosystem I reaction center subunit V,
  misc_feature (68)..(174): Homolog of NCBI NO: 131194 NR Description: Photosystem I reaction center subunit V,
  misc_feature (28)..(174): Homolog of NCBI NO: 15222757 NR Description: photosystem I subunit V precursor, putative
  misc_feature (33)..(174): Homolog of NCBI NO: 131192 NR Description: Photosystem I reaction center subunit V,
LVASATKNRKETPPPPRLPFQYSRRKGTPASAMVTSTTAAAVLSPPSVAGLRLAPSPRARVAFRAARARRSVAARAELSPSLVISLSTGVSLFLGRFVFFNFQRENVAKQVPEQNGKTHFDAGDERAKEFSGLLKSNDPVGFNLVDVLAWGSLGHIVAYYILATSSNGYDPNFF

SEQ ID NO: 16277 - protein, 142 aa, Zea mays subsp. mays
  peptide (1)..(142): Ceres Seq. ID no. 12349563
  misc_feature (46)..(139): Pfam Name: Photosystem I psaG / psaK Pfam Description: Photosystem I psaG / psaK
  misc_feature (8)..(135): Homolog of NCBI NO: 548605 NR Description: Photosystem I reaction center subunit psaK, precursor (Photosystem I subunit X) (PSI-K) (Light-harvesting
  misc_feature (35)..(130): Homolog of NCBI NO: 12831160 NR Description: PsaG-like protein [Dunaliella salina]
  misc_feature (45)..(82): Homolog of NCBI NO: 131193 NR Description: Photosystem I reaction center subunit V (PSI-G)
  misc_feature (21)..(134): Homolog of NCBI NO: 131191 NR Description: Photosystem I reaction center subunit V, precursor (PSI-G) (Light-harvesting complex I 10 kDa protein)
  misc_feature (49)..(138): Homolog of NCBI NO: 17369611 NR Description: Photosystem I reaction center subunit V,
  misc_feature (36)..(142): Homolog of NCBI NO: 131194 NR Description: Photosystem I reaction center subunit V,
  misc_feature (1)..(142): Homolog of NCBI NO: 15222757 NR Description: photosystem I subunit V precursor, putative
  misc_feature (1)..(142): Homolog of NCBI NO: 131192 NR Description: Photosystem I reaction center subunit V,
MVTSTTAAAVLSPPSVAGLRLAPSPRARVAFRAARARRSVAARAELSPSLVISLSTGVSLFLGRFVFFNFQRENVAKQVPEQNGKTHFDAGDERAKEFSGLLKSNDPVGFNLVDVLAWGSLGHIVAYYILATSSNGYDPNFF

SEQ ID NO: 16278 - DNA, 1366 bp, Zea mays subsp. mays
  misc_feature (1)..(1366): Ceres Seq. ID no. 12406423
  misc_feature: MA Experiment ID: 108503 Result: Up-regulated in Transcription
  misc_feature: MA Experiment 108503 PARAMETER Experiment Name: Zm_Drought_P Parameter: Age (day) Value: 8
  misc_feature: MA Experiment 108503 PARAMETER Experiment Name: Zm_Drought_P Parameter: Organism Value: Zea mays
  misc_feature: MA Experiment 108503 PARAMETER Experiment Name: Zm_Drought_P Parameter: Plant Line Value: 35A19
  misc_feature: MA Experiment 108503 PARAMETER Experiment Name: Zm_Drought_P Parameter: Timepoint (hr) Value: 6
  misc_feature: MA Experiment 108503 PARAMETER Experiment Name: Zm_Drought_P Parameter: Tissue Value: Aerial
  misc_feature: MA Experiment 108503 PARAMETER Experiment Name: Zm_Drought_P Parameter: Treatment Value: Drought vs. No Drought
  misc_feature: MA Experiment ID: 108504 Result: Up-regulated in Transcription
  misc_feature: MA Experiment 108504 PARAMETER Experiment Name: Zm_Drought_P Parameter: Age (day) Value: 8
  misc_feature: MA Experiment 108504 PARAMETER Experiment Name: Zm_Drought_P Parameter: Organism Value: Zea mays
  misc_feature: MA Experiment 108504 PARAMETER Experiment Name: Zm_Drought_P Parameter: Plant Line Value: 35A19
  misc_feature: MA Experiment 108504 PARAMETER Experiment Name: Zm_Drought_P Parameter: Timepoint (hr) Value: 12
  misc_feature: MA Experiment 108504 PARAMETER Experiment Name: Zm_Drought_P Parameter: Tissue Value: Aerial
  misc_feature: MA Experiment 108504 PARAMETER Experiment Name: Zm_Drought_P Parameter: Treatment Value: Drought vs. No Drought
  misc_feature: MA Experiment ID: 108515 Result: Up-regulated in Transcription
  misc_feature: MA Experiment 108515 PARAMETER Experiment Name: Zm_2mM_SA_P Parameter: Age (day) Value: 8
  misc_feature: MA Experiment 108515 PARAMETER Experiment Name: Zm_2mM_SA_P Parameter: Organism Value: Zea mays
  misc_feature: MA Experiment 108515 PARAMETER Experiment Name: Zm_2mM_SA_P Parameter: Plant Line Value: 35A19
  misc_feature: MA Experiment 108515 PARAMETER Experiment Name: Zm_2mM_SA_P Parameter: Timepoint (hr) Value: 12
  misc_feature: MA Experiment 108515 PARAMETER Experiment Name: Zm_2mM_SA_P Parameter: Tissue Value: Aerial
  misc_feature: MA Experiment 108515 PARAMETER Experiment Name: Zm_2mM_SA_P Parameter: Treatment Value: 2mM SA vs. No Treatment
  misc_feature: MA Experiment ID: 108522 Result: Up-regulated in Transcription
  misc_feature: MA Experiment 108522 PARAMETER Experiment Name: Zm_42deg_Heat_P Parameter: Age (day) Value: 8
  misc_feature: MA Experiment 108522 PARAMETER Experiment Name: Zm_42deg_Heat_P Parameter: Organism Value: Zea mays
  misc_feature: MA Experiment 108522 PARAMETER Experiment Name: Zm_42deg_Heat_P Parameter: Plant Line Value: 35A19
  misc_feature: MA Experiment 108522 PARAMETER Experiment Name: Zm_42deg_Heat_P Parameter: Temperature (deg C) Value: 42 vs. 22
  misc_feature: MA Experiment 108522 PARAMETER Experiment Name: Zm_42deg_Heat_P Parameter: Timepoint (hr) Value: 1
  misc_feature: MA Experiment 108522 PARAMETER Experiment Name: Zm_42deg_Heat_P Parameter: Tissue Value: Aerial
  misc_feature: MA Experiment ID: 108523 Result: Up-regulated in Transcription
  misc_feature: MA Experiment 108523 PARAMETER Experiment Name: Zm_42deg_Heat_P Parameter: Age (day) Value: 8
  misc_feature: MA Experiment 108523 PARAMETER Experiment Name: Zm_42deg_Heat_P Parameter: Organism Value: Zea mays
  misc_feature: MA Experiment 108523 PARAMETER Experiment Name: Zm_42deg_Heat_P Parameter: Plant Line Value: 35A19
  misc_feature: MA Experiment 108523 PARAMETER Experiment Name: Zm_42deg_Heat_P Parameter: Temperature (deg C) Value: 42 vs. 22
  misc_feature: MA Experiment 108523 PARAMETER Experiment Name: Zm_42deg_Heat_P Parameter: Timepoint (hr) Value: 6
  misc_feature: MA Experiment 108523 PARAMETER Experiment Name: Zm_42deg_Heat_P Parameter: Tissue Value: Aerial
  misc_feature: MA Experiment ID: 108526 Result: Up-regulated in Transcription
  misc_feature: MA Experiment 108526 PARAMETER Experiment Name: Zm_5mM_NO_P Parameter: Age (day) Value: 8
  misc_feature: MA Experiment 108526 PARAMETER Experiment Name: Zm_5mM_NO_P Parameter: Organism Value: Zea mays
  misc_feature: MA Experiment 108526 PARAMETER Experiment Name: Zm_5mM_NO_P Parameter: Plant Line Value: 35A19
  misc_feature: MA Experiment 108526 PARAMETER Experiment Name: Zm_5mM_NO_P Parameter: Timepoint (hr) Value: 1
  misc_feature: MA Experiment 108526 PARAMETER Experiment Name: Zm_5mM_NO_P Parameter: Tissue Value: Aerial
  misc_feature: MA Experiment 108526 PARAMETER Experiment Name: Zm_5mM_NO_P Parameter: Treatment Value: 5mM NO vs. No Treatment
  misc_feature: MA Experiment ID: 108527 Result: Up-regulated in Transcription
  misc_feature: MA Experiment 108527 PARAMETER Experiment Name: Zm_5mM_NO_P Parameter: Age (day) Value: 8
  misc_feature: MA Experiment 108527 PARAMETER Experiment Name: Zm_5mM_NO_P Parameter: Organism Value: Zea mays
  misc_feature: MA Experiment 108527 PARAMETER Experiment Name: Zm_5mM_NO_P Parameter: Plant Line Value: 35A19
  misc_feature: MA Experiment 108527 PARAMETER Experiment Name: Zm_5mM_NO_P Parameter: Timepoint (hr) Value: 6
  misc_feature: MA Experiment 108527 PARAMETER Experiment Name: Zm_5mM_NO_P Parameter: Tissue Value: Aerial
  misc_feature: MA Experiment 108527 PARAMETER Experiment Name: Zm_5mM_NO_P Parameter: Treatment Value: 5mM NO vs. No Treatment
  misc_feature: MA Experiment ID: 108535 Result: Up-regulated in Transcription
  misc_feature: MA Experiment 108535 PARAMETER Experiment Name: Zm_Meristem_P Parameter: Age (day) Value: 8
  misc_feature: MA Experiment 108535 PARAMETER Experiment Name: Zm_Meristem_P Parameter: Organism Value: Zea mays
  misc_feature: MA Experiment 108535 PARAMETER Experiment Name: Zm_Meristem_P Parameter: Plant Line Value: 35A19
  misc_feature: MA Experiment 108535 PARAMETER Experiment Name: Zm_Meristem_P Parameter: Tissue Value: Root Meristem vs. Above Root Meristem
  misc_feature: MA Experiment ID: 108540 Result: Up-regulated in Transcription
  misc_feature: MA Experiment 108540 PARAMETER Experiment Name: Zm_20percent_PEG_P Parameter: Age (day) Value: 8
  misc_feature: MA Experiment 108540 PARAMETER Experiment Name: Zm_20percent_PEG_P Parameter: Organism Value: Zea mays
  misc_feature: MA Experiment 108540 PARAMETER Experiment Name: Zm_20percent_PEG_P Parameter: Plant Line Value: 35A19
  misc_feature: MA Experiment 108540 PARAMETER Experiment Name: Zm_20percent_PEG_P Parameter: Timepoint (hr) Value: 6
  misc_feature: MA Experiment 108540 PARAMETER Experiment Name: Zm_20percent_PEG_P Parameter: Tissue Value: Aerial
  misc_feature: MA Experiment 108540 PARAMETER Experiment Name: Zm_20percent_PEG_P Parameter: Treatment Value: 20percent PEG vs. No Treatment
  misc_feature: MA Experiment ID: 108542 Result: Up-regulated in Transcription
  misc_feature: MA Experiment 108542 PARAMETER Experiment Name: Zm_150mM_NaCl_P Parameter: Age (day) Value: 8
  misc_feature: MA Experiment 108542 PARAMETER Experiment Name: Zm_150mM_NaCl_P Parameter: Organism Value: Zea mays
  misc_feature: MA Experiment 108542 PARAMETER Experiment Name: Zm_150mM_NaCl_P Parameter: Plant Line Value: 35A19
  misc_feature: MA Experiment 108542 PARAMETER Experiment Name: Zm_150mM_NaCl_P Parameter: Timepoint (hr) Value: 6
  misc_feature: MA Experiment 108542 PARAMETER Experiment Name: Zm_150mM_NaCl_P Parameter: Tissue Value: Aerial
  misc_feature: MA Experiment 108542 PARAMETER Experiment Name: Zm_150mM_NaCl_P Parameter: Treatment Value: 150mM NaCl vs. No Treatment
  misc_feature: MA Experiment ID: 108543 Result: Down-regulated in Transcription
  misc_feature: MA Experiment ID: 108556 Result: Up-regulated in Transcription
  misc_feature: MA Experiment 108556 PARAMETER Experiment Name: Zm_Drought_P Parameter: Age (day) Value: 9
  misc_feature: MA Experiment 108556 PARAMETER Experiment Name: Zm_Drought_P Parameter: Organism Value: Zea mays
  misc_feature: MA Experiment 108556 PARAMETER Experiment Name: Zm_Drought_P Parameter: Plant Line Value: 35A19
  misc_feature: MA Experiment 108556 PARAMETER Experiment Name: Zm_Drought_P Parameter: Timepoint (hr) Value: 24
  misc_feature: MA Experiment 108556 PARAMETER Experiment Name: Zm_Drought_P Parameter: Tissue Value: Aerial
  misc_feature: MA Experiment 108556 PARAMETER Experiment Name: Zm_Drought_P Parameter: Treatment Value: Drought vs. No Drought
  misc_feature: MA Experiment ID: 108559 Result: Up-regulated in Transcription
  misc_feature: MA Experiment 108559 PARAMETER Experiment Name: Zm_5mM_NO_P Parameter: Age (day) Value: 8
  misc_feature: MA Experiment 108559 PARAMETER Experiment Name: Zm_5mM_NO_P Parameter: Organism Value: Zea mays
  misc_feature: MA Experiment 108559 PARAMETER Experiment Name: Zm_5mM_NO_P Parameter: Plant Line Value: 35A19
  misc_feature: MA Experiment 108559 PARAMETER Experiment Name: Zm_5mM_NO_P Parameter: Timepoint (hr) Value: 12
  misc_feature: MA Experiment 108559 PARAMETER Experiment Name: Zm_5mM_NO_P Parameter: Tissue Value: Aerial
  misc_feature: MA Experiment 108559 PARAMETER Experiment Name: Zm_5mM_NO_P Parameter: Treatment Value: 5mM NO vs. No Treatment
  misc_feature: MA Experiment ID: 108597 Result: Up-regulated in Transcription
  misc_feature: MA Experiment 108597 PARAMETER Experiment Name: Zm_100uM_ABA_P Parameter: Age (day) Value: 9
  misc_feature: MA Experiment 108597 PARAMETER Experiment Name: Zm_100uM_ABA_P Parameter: Organism Value: Zea mays
  misc_feature: MA Experiment 108597 PARAMETER Experiment Name: Zm_100uM_ABA_P Parameter: Plant Line Value: 35A19
  misc_feature: MA Experiment 108597 PARAMETER Experiment Name: Zm_100uM_ABA_P Parameter: Timepoint (hr) Value: 24
  misc_feature: MA Experiment 108597 PARAMETER Experiment Name: Zm_100uM_ABA_P Parameter: Tissue Value: Aerial
  misc_feature: MA Experiment 108597 PARAMETER Experiment Name: Zm_100uM_ABA_P Parameter: Treatment Value: 100uM ABA vs. No Treatment
  misc_feature: MA Experiment ID: 108689 Result: Up-regulated in Transcription
  misc_feature: MA Experiment 108689 PARAMETER Experiment Name: Zm_Drought_Roots_P Parameter: Age (day) Value: 9
  misc_feature: MA Experiment 108689 PARAMETER Experiment Name: Zm_Drought_Roots_P Parameter: Organism Value: Zea mays
  misc_feature: MA Experiment 108689 PARAMETER Experiment Name: Zm_Drought_Roots_P Parameter: Plant Line Value: 35A19
  misc_feature: MA Experiment 108689 PARAMETER Experiment Name: Zm_Drought_Roots_P Parameter: Timepoint (hr) Value: 24
  misc_feature: MA Experiment 108689 PARAMETER Experiment Name: Zm_Drought_Roots_P Parameter: Tissue Value: Roots
  misc_feature: MA Experiment 108689 PARAMETER Experiment Name: Zm_Drought_Roots_P Parameter: Treatment Value: Drought vs. No Drought
  misc_feature: MA Experiment ID: 20000478 Result: Up-regulated in Transcription
  misc_feature: MA Experiment 20000478 PARAMETER Experiment Name: Zm_5mM_SA_P Parameter: Age (day) Value: 11
  misc_feature: MA Experiment 20000478 PARAMETER Experiment Name: Zm_5mM_SA_P Parameter: Organism Value: Zea mays
  misc_feature: MA Experiment 20000478 PARAMETER Experiment Name: Zm_5mM_SA_P Parameter: Plant Line Value: 35A19
  misc_feature: MA Experiment 20000478 PARAMETER Experiment Name: Zm_5mM_SA_P Parameter: Timepoint (hr) Value: 72
  misc_feature: MA Experiment 20000478 PARAMETER Experiment Name: Zm_5mM_SA_P Parameter: Tissue Value: Aerial
  misc_feature: MA Experiment 20000478 PARAMETER Experiment Name: Zm_5mM_SA_P Parameter: Treatment Value: 5mM SA vs. No Treatment
  misc_feature: MA Experiment ID: 20000480 Result: Up-regulated in Transcription
  misc_feature: MA Experiment 20000480 PARAMETER Experiment Name: Zm_Drought_P Parameter: Age (day) Value: 11
  misc_feature: MA Experiment 20000480 PARAMETER Experiment Name: Zm_Drought_P Parameter: Organism Value: Zea mays
  misc_feature: MA Experiment 20000480 PARAMETER Experiment Name: Zm_Drought_P Parameter: Plant Line Value: 35A19
  misc_feature: MA Experiment 20000480 PARAMETER Experiment Name: Zm_Drought_P Parameter: Timepoint (hr) Value: 72
  misc_feature: MA Experiment 20000480 PARAMETER Experiment Name: Zm_Drought_P Parameter: Tissue Value: Aerial
  misc_feature: MA Experiment 20000480 PARAMETER Experiment Name: Zm_Drought_P Parameter: Treatment Value: Drought vs. No Drought
  misc_feature: MA Experiment ID: 20000533 Result: Up-regulated in Transcription
  misc_feature: MA Experiment 20000533 PARAMETER Experiment Name: Zm_0.001percent_MeJA_P Parameter: Age (day) Value: 11
  misc_feature: MA Experiment 20000533 PARAMETER Experiment Name: Zm_0.001percent_MeJA_P Parameter: Organism Value: Zea mays
  misc_feature: MA Experiment 20000533 PARAMETER Experiment Name: Zm_0.001percent_MeJA_P Parameter: Plant Line Value: 35A19
  misc_feature: MA Experiment 20000533 PARAMETER Experiment Name: Zm_0.001percent_MeJA_P Parameter: Timepoint (hr) Value: 72
  misc_feature: MA Experiment 20000533 PARAMETER Experiment Name: Zm_0.001percent_MeJA_P Parameter: Tissue Value: Aerial
  misc_feature: MA Experiment 20000533 PARAMETER Experiment Name: Zm_0.001percent_MeJA_P Parameter: Treatment Value: 0.001percent MeJA vs. No Treatment
  misc_feature: MA Experiment ID: 20000535 Result: Up-regulated in Transcription
  misc_feature: MA Experiment 20000535 PARAMETER Experiment Name: Zm_Hybrid_Seed_Dev_P Parameter: DAP Value: 30 vs. 12
  misc_feature: MA Experiment 20000535 PARAMETER Experiment Name: Zm_Hybrid_Seed_Dev_P Parameter: Organism Value: Zea mays
  misc_feature: MA Experiment 20000535 PARAMETER Experiment Name: Zm_Hybrid_Seed_Dev_P Parameter: Plant Line Value: 35A19
  misc_feature: MA Experiment 20000535 PARAMETER Experiment Name: Zm_Hybrid_Seed_Dev_P Parameter: Tissue Value: Embryo vs. Unfert Floret
  misc_feature: MA Experiment ID: 20000630 Result: Up-regulated in Transcription
  misc_feature: MA Experiment 20000630 PARAMETER Experiment Name: Zm_Herbicide-Treatments_P Parameter: Timepoint (hr) Value: 4
  misc_feature: MA Experiment 20000630 PARAMETER Experiment Name: Zm_Herbicide-Treatments_P Parameter: Tissue Value: Aerial
  misc_feature: MA Experiment 20000630 PARAMETER Experiment Name: Zm_Herbicide-Treatments_P Parameter: Treatment Value: Roundup vs. No Treatment
ctcctctcaactgttctctcgccgccgttctagttccgttttgccttgaggtgcacgtggcggtggaagcttcccgggcggtggcggttgttggttcatgtcgatggcgcaggtgtgctgcgactcggccgcagcggcgacaccggtggccggaccggaggcggaggccagggccagggcgcgcgccgagaggcgccgccgggccgcggaggccgggaggtggaagcacgcggcggctgctggcactggcacggcagccgcagatgccacgaggaagcggagcctcgaggccggggagctgctcgtcgcgcggaagcacggggccgcgtcggtggccggccgccggagggagatggaggacgccgtgtccgtgcgcgagtccttcgccgcggagggcgaggccgacggcggccggaggcgcgacttctacggggtgttcgacggccacggctgctcgcacgtggccgaggcgtgccgggaccggatgcacgacctgctcgccgaggagctcgccgctgccgtcgccgccgacggctccgcggcgacctggaccgccgcgatggaacgcagcttcgcgcggatggacgccgaggcgatgtcggccggcgggagcgccgcctgccgctgcgacccgcacaagtgcgaccacgtgggctccaccgccgtggtggccgtcgtggaggagcgccgcgtcgtggtggccaactgtggcgacagccgcgcgctgctgtgccgcgggggcggcgcgccgccgctgccgctgtcgtcggaccacaagcccgaccgccccgacgagctggagcggatcgaggccgcgggcggccgcgtcatcttctgggagggcgcgcgcgtgctgggcgtcctcgccatgtcccgcgccatcggggacggctacctcaagccgtacgtctcgtccgtgcccgaggtcacgctcaccgaccgctccgacgccgacgagtgcctcatcctcgccagcgacggcctctgggacgtggttagcaacgaggccgcgtgcgaggtggcgcgcgcctgcctccgccgggggcgggccaggtggtgcgccgaggccgccgcgctgctcaccaagctggccctcgccaggcgcagctccgacaacgtctcggtggtcgtcgtcgatctccggaagagggatcgctagctagctctgtgccgttagtactaatacagtagtaggatggtgcacaaaaggatctcgcgggtgtctactaattgtttctctttgtcgtcaacagttattttgctgctctccctgaatcaaaaaagttcagaggagcccttagattaattgttgtggtggaaccggaatttgacccggataccatttgggatgaatggaaccttgcat

SEQ ID NO: 16279 - protein, 386 aa, Zea mays subsp. mays
  peptide (1)..(386): Ceres Seq. ID no. 12406424
  misc_feature (91)..(386): Pfam Name: Equine herpesvirus glycoprotein gp2 Pfam Description: Equine herpesvirus glycoprotein gp2
  misc_feature (58)..(373): Homolog of NCBI NO: 34014801 NR Description: MUC19 [Mus musculus]
  misc_feature (61)..(370): Homolog of NCBI NO: 30984464 NR Description: very large tegument protein [Cercopithecine
PLNCSLAAVLVPFCLEVHVAVEASRAVAVVGSCRWRRCAATRPQRRHRWPDRRRRPGPGRAPRGAAGPRRPGGGSTRRLLALARQPQMPRGSGASRPGSCSSRGSTGPRRWPAAGGRWRTPCPCASPSPRRARPTAAGGATSTGCSTATAARTWPRRAGTGCTTCSPRSSPLPSPPTAPRRPGPPRWNAASRGWTPRRCRPAGAPPAAATRTSATTWAPPPWWPSWRSAASWWPTVATAARCCAAGAARRRCRCRRTTSPTAPTSWSGSRPRAAASSSGRARACWASSPCPAPSGTATSSRTSRPCPRSRSPTAPTPTSASSSPATASGTWLATRPRARWRAPASAGGGPGGAPRPPRCSPSWPSPGAAPTTSRWSSSISGRGIAS

SEQ ID NO: 16280 - protein, 353 aa, Zea mays subsp. mays
  peptide (1)..(353): Ceres Seq. ID no. 12406425
  misc_feature (73)..(312): Pfam Name: Protein phosphatase 2C Pfam Description: Protein phosphatase 2C
  misc_feature (321)..(350): Homolog of NCBI NO: 15237839 NR Description: protein phosphatase 2C (PP2C)
  misc_feature (73)..(314): Homolog of NCBI NO: 16226419 NR Description: AT5g59220/mnc17_110 [Arabidopsis thaliana]
  misc_feature (73)..(314): Homolog of NCBI NO: 15237839 NR Description: protein phosphatase 2C (PP2C)
  misc_feature (321)..(351): Homolog of NCBI NO: 15222398 NR Description: protein phosphatase 2C (PP2C), putative
  misc_feature (73)..(319): Homolog of NCBI NO: 15222398 NR Description: protein phosphatase 2C (PP2C), putative
  misc_feature (3)..(350): Homolog of NCBI NO: 15227078 NR Description: protein phosphatase 2C (PP2C), putative; protein
  misc_feature (321)..(350): Homolog of NCBI NO: 34908256 NR Description: putative protein phosphatase 2C
  misc_feature (10)..(312): Homolog of NCBI NO: 34908256 NR Description: putative protein phosphatase 2C
  misc_feature (321)..(351): Homolog of NCBI NO: 34902050 NR Description: putative Serine/threonine phosphatases
  misc_feature (3)..(317): Homolog of NCBI NO: 34902050 NR Description: putative Serine/threonine phosphatases
MSMAQVCCDSAAAATPVAGPEAEARARARAERRRRAAEAGRWKHAAAAGTGTAAADATRKRSLEAGELLVARKHGAASVAGRRREMEDAVSVRESFAAEGEADGGRRRDFYGVFDGHGCSHVAEACRDRMHDLLAEELAAAVAADGSAATWTAAMERSFARMDAEAMSAGGSAACRCDPHKCDHVGSTAVVAVVEERRVVVANCGDSRALLCRGGGAPPLPLSSDHKPDRPDELERIEAAGGRVIFWEGARVLGVLAMSRAIGDGYLKPYVSSVPEVTLTDRSDADECLILASDGLWDVVSNEAACEVARACLRRGRARWCAEAAALLTKLALARRSSDNVSVVVVDLRKRDR

SEQ ID NO: 16281 - protein, 351 aa, Zea mays subsp. mays
  peptide (1)..(351): Ceres Seq. ID no. 12406426
  misc_feature (71)..(310): Pfam Name: Protein phosphatase 2C Pfam Description: Protein phosphatase 2C
  misc_feature (319)..(348): Homolog of NCBI NO: 15237839 NR Description: protein phosphatase 2C (PP2C)
  misc_feature (71)..(312): Homolog of NCBI NO: 16226419 NR Description: AT5g59220/mnc17_110 [Arabidopsis thaliana]
  misc_feature (71)..(312): Homolog of NCBI NO: 15237839 NR Description: protein phosphatase 2C (PP2C)
  misc_feature (319)..(349): Homolog of NCBI NO: 15222398 NR Description: protein phosphatase 2C (PP2C), putative
  misc_feature (71)..(317): Homolog of NCBI NO: 15222398 NR Description: protein phosphatase 2C (PP2C), putative
  misc_feature (1)..(348): Homolog of NCBI NO: 15227078 NR Description: protein phosphatase 2C (PP2C), putative; protein
  misc_feature (319)..(348): Homolog of NCBI NO: 34908256 NR Description: putative protein phosphatase 2C
  misc_feature (8)..(310): Homolog of NCBI NO: 34908256 NR Description: putative protein phosphatase 2C
  misc_feature (319)..(349): Homolog of NCBI NO: 34902050 NR Description: putative Serine/threonine phosphatases
  misc_feature (1)..(315): Homolog of NCBI NO: 34902050 NR Description: putative Serine/threonine phosphatases
MAQVCCDSAAAATPVAGPEAEARARARAERRRRAAEAGRWKHAAAAGTGTAAADATRKRSLEAGELLVARKHGAASVAGRRREMEDAVSVRESFAAEGEADGGRRRDFYGVFDGHGCSHVAEACRDRMHDLLAEELAAAVAADGSAATWTAAMERSFARMDAEAMSAGGSAACRCDPHKCDHVGSTAVVAVVEERRVVVANCGDSRALLCRGGGAPPLPLSSDHKPDRPDELERIEAAGGRVIFWEGARVLGVLAMSRAIGDGYLKPYVSSVPEVTLTDRSDADECLILASDGLWDVVSNEAACEVARACLRRGRARWCAEAAALLTKLALARRSSDNVSVVVVDLRKRDR

SEQ ID NO: 16282 - DNA, 1271 bp, Zea mays subsp. mays
  misc_feature (1)..(1271): Ceres Seq. ID no. 12358434
  misc_feature: MA Experiment ID: 108528 Result: Up-regulated in Transcription
  misc_feature: MA Experiment 108528 PARAMETER Experiment Name: Zm_Imbibed_Seeds_P Parameter: Age (day) Value: 5 vs. 2
  misc_feature: MA Experiment 108528 PARAMETER Experiment Name: Zm_Imbibed_Seeds_P Parameter: Organism Value: Zea mays
  misc_feature: MA Experiment 108528 PARAMETER Experiment Name: Zm_Imbibed_Seeds_P Parameter: Plant Line Value: 35A19
  misc_feature: MA Experiment 108528 PARAMETER Experiment Name: Zm_Imbibed_Seeds_P Parameter: Tissue Value: Aerial vs. Embryo
  misc_feature: MA Experiment ID: 108530 Result: Up-regulated in Transcription
  misc_feature: MA Experiment 108530 PARAMETER Experiment Name: Zm_Imbibed_Seeds_P Parameter: Age (day) Value: 6 vs. 2
  misc_feature: MA Experiment 108530 PARAMETER Experiment Name: Zm_Imbibed_Seeds_P Parameter: Organism Value: Zea mays
  misc_feature: MA Experiment 108530 PARAMETER Experiment Name: Zm_Imbibed_Seeds_P Parameter: Plant Line Value: 35A19
  misc_feature: MA Experiment 108530 PARAMETER Experiment Name: Zm_Imbibed_Seeds_P Parameter: Tissue Value: Aerial vs. Embryo
  misc_feature: MA Experiment ID: 108545 Result: Up-regulated in Transcription
  misc_feature: MA Experiment 108545 PARAMETER Experiment Name: Zm_Imbibed_Seeds_P Parameter: Age (day) Value: 3 vs. 2
  misc_feature: MA Experiment 108545 PARAMETER Experiment Name: Zm_Imbibed_Seeds_P Parameter: Organism Value: Zea mays
  misc_feature: MA Experiment 108545 PARAMETER Experiment Name: Zm_Imbibed_Seeds_P Parameter: Plant Line Value: 35A19
  misc_feature: MA Experiment 108545 PARAMETER Experiment Name: Zm_Imbibed_Seeds_P Parameter: Tissue Value: Aerial vs. Embryo
  misc_feature: MA Experiment ID: 108547 Result: Up-regulated in Transcription
  misc_feature: MA Experiment 108547 PARAMETER Experiment Name: Zm_Imbibed_Seeds_P Parameter: Age (day) Value: 4 vs. 2
  misc_feature: MA Experiment 108547 PARAMETER Experiment Name: Zm_Imbibed_Seeds_P Parameter: Organism Value: Zea mays
  misc_feature: MA Experiment 108547 PARAMETER Experiment Name: Zm_Imbibed_Seeds_P Parameter: Plant Line Value: 35A19
  misc_feature: MA Experiment 108547 PARAMETER Experiment Name: Zm_Imbibed_Seeds_P Parameter: Tissue Value: Aerial vs. Embryo
  misc_feature: MA Experiment ID: 108559 Result: Down-regulated in Transcription
  misc_feature: MA Experiment 108559 PARAMETER Experiment Name: Zm_5mM_NO_P Parameter: Age (day) Value: 8
  misc_feature: MA Experiment 108559 PARAMETER Experiment Name: Zm_5mM_NO_P Parameter: Organism Value: Zea mays
  misc_feature: MA Experiment 108559 PARAMETER Experiment Name: Zm_5mM_NO_P Parameter: Plant Line Value: 35A19
  misc_feature: MA Experiment 108559 PARAMETER Experiment Name: Zm_5mM_NO_P Parameter: Timepoint (hr) Value: 12
  misc_feature: MA Experiment 108559 PARAMETER Experiment Name: Zm_5mM_NO_P Parameter: Tissue Value: Aerial
  misc_feature: MA Experiment 108559 PARAMETER Experiment Name: Zm_5mM_NO_P Parameter: Treatment Value: 5mM NO vs. No Treatment
  misc_feature: MA Experiment ID: 20000480 Result: Down-regulated in Transcription
  misc_feature: MA Experiment 20000480 PARAMETER Experiment Name: Zm_Drought_P Parameter: Age (day) Value: 11
  misc_feature: MA Experiment 20000480 PARAMETER Experiment Name: Zm_Drought_P Parameter: Organism Value: Zea mays
  misc_feature: MA Experiment 20000480 PARAMETER Experiment Name: Zm_Drought_P Parameter: Plant Line Value: 35A19
  misc_feature: MA Experiment 20000480 PARAMETER Experiment Name: Zm_Drought_P Parameter: Timepoint (hr) Value: 72
  misc_feature: MA Experiment 20000480 PARAMETER Experiment Name: Zm_Drought_P Parameter: Tissue Value: Aerial
  misc_feature: MA Experiment 20000480 PARAMETER Experiment Name: Zm_Drought_P Parameter: Treatment Value: Drought vs. No Drought
  misc_feature: MA Experiment ID: 20000535 Result: Down-regulated in Transcription
  misc_feature: MA Experiment 20000535 PARAMETER Experiment Name: Zm_Hybrid_Seed_Dev_P Parameter: DAP Value: 30 vs. 12
  misc_feature: MA Experiment 20000535 PARAMETER Experiment Name: Zm_Hybrid_Seed_Dev_P Parameter: Organism Value: Zea mays
  misc_feature: MA Experiment 20000535 PARAMETER Experiment Name: Zm_Hybrid_Seed_Dev_P Parameter: Plant Line Value: 35A19
  misc_feature: MA Experiment 20000535 PARAMETER Experiment Name: Zm_Hybrid_Seed_Dev_P Parameter: Tissue Value: Embryo vs. Unfert Floret
ctctctccatccccagcccacgaccctccgccaccagccatcgtctgcatcagatctcccgcccgtccgttacatcccagggcgacgcggccgcggccatgacgccatcctcagctctcgccctcgcgcaccacgccgcggtatccccgctcccgtcctccacgccgcggccctcccccaggtccagctctctgagcctgggcccgggctccgccgggctcgggccgcgccggctcgtcgcggcggcgcccccacgggcgttcttctcctcgtccccctaccagccgccccagccggaggggttctcgcagcaccgcgagtacggtctggtccccatggtcatcgagaccacctcccgcggggagcgcgcctacgacatcttctcgcgcctgctcaaggagcgcatcgtctgcatccacgggcccatcgccgacgacacggcctcgcttgtcgtcgcgcagctgctcttcctcgagtccgagaacccgctcaagcccgtccacctctacatcaactcccccgggggcgtcgtcaccgcggggctcgccatctacgacaccatgcagtacatccgctgccccgtcaccaccctctgcatcggccaggcggcctccatgggctcgctcctcctcgcggctggggcgccgggtgagaggcgcgcgcttcccaacgccagggtcatgatccaccagccctcgggcggcgcgcaggggcaagccaccgacatcgccatccaggccaaggagatcctcaaaatgcgcgaccgcctcaacaagatctaccagaagcacacgcgccagcccatcgataagattgagcagtgcatggagagggacctcttcatggaccctgaagaggcgcgcgactggggcctcatcgacgaggtcatcgagaatcgacctgcctcgttcatgcccgacgtaatcggtggaggcctcgatgtgcccaggctcggtggcgttggcggcggacgggggagggacgtcgaggaaccttccgcggtgtgaggattggcctcaaaggtgaaatccttcctcatccggtggatgtgttgtttgttgttagatccaaaggttcaattcttactatacaaggttaaccttgttattatggttatggaaacgtccggctccccattgtccttgttgcttaaattgcttcaattgagctattggggatataattattgcaactctaaggaaattctgcactgttgatactgataaattgacacagtattgtgtatgttgtactatatttgtatcaattcc

SEQ ID NO: 16283 - protein, 334 aa, Zea mays subsp. mays
  peptide (1)..(334): Ceres Seq. ID no. 12358435
  misc_feature (118)..(299): Pfam Name: Clp protease Pfam Description: Clp protease
  misc_feature (1)..(300): Homolog of NCBI NO: 34882298 NR Description: similar to ClpP protease [Rattus norvegicus]
  misc_feature (105)..(309): Homolog of NCBI NO: 18420643 NR Description: ATP-dependent Clp protease proteolytic subunit
  misc_feature (109)..(302): Homolog of NCBI NO: 22967580 NR Description: hypothetical protein [Rhodospirillum rubrum]
  misc_feature (109)..(302): Homolog of NCBI NO: 23014984 NR Description: hypothetical protein [Magnetospirillum
  misc_feature (109)..(302): Homolog of NCBI NO: 6685315 NR Description: ATP-dependent Clp protease proteolytic subunit
  misc_feature (69)..(300): Homolog of NCBI NO: 8393156 NR Description: caseinolytic protease, ATP-dependent, proteolytic
  misc_feature (105)..(300): Homolog of NCBI NO: 5174419 NR Description: endopeptidase Clp precursor
  misc_feature (105)..(300): Homolog of NCBI NO: 20129427 NR Description: CG5045-PA [Drosophila melanogaster]
  misc_feature (110)..(299): Homolog of NCBI NO: 23474550 NR Description: hypothetical protein [Desulfovibrio desulfuricans
  misc_feature (76)..(332): Homolog of NCBI NO: 38344435 NR Description: OSJNBa0038O10.7 [Oryza sativa (japonica
LSIPSPRPSATSHRLHQISRPSVTSQGDAAAAMTPSSALALAHHAAVSPLPSSTPRPSPRSSSLSLGPGSAGLGPRRLVAAAPPRAFFSSSPYQPPQPEGFSQHREYGLVPMVIETTSRGERAYDIFSRLLKERIVCIHGPIADDTASLVVAQLLFLESENPLKPVHLYINSPGGVVTAGLAIYDTMQYIRCPVTTLCIGQAASMGSLLLAAGAPGERRALPNARVMIHQPSGGAQGQATDIAIQAKEILKMRDRLNKIYQKHTRQPIDKIEQCMERDLFMDPEEARDWGLIDEVIENRPASFMPDVIGGGLDVPRLGGVGGGRGRDVEEPSAV

SEQ ID NO: 16284 - protein, 302 aa, Zea mays subsp. mays
  peptide (1)..(302): Ceres Seq. ID no. 12358436
  misc_feature (86)..(267): Pfam Name: Clp protease Pfam Description: Clp protease
  misc_feature (78)..(267): Homolog of NCBI NO: 23474550 NR Description: hypothetical protein [Desulfovibrio desulfuricans
  misc_feature (77)..(270): Homolog of NCBI NO: 22967580 NR Description: hypothetical protein [Rhodospirillum rubrum]
  misc_feature (73)..(268): Homolog of NCBI NO: 20129427 NR Description: CG5045-PA [Drosophila melanogaster]
  misc_feature (77)..(270): Homolog of NCBI NO: 23014984 NR Description: hypothetical protein [Magnetospirillum
  misc_feature (73)..(268): Homolog of NCBI NO: 5174419 NR Description: endopeptidase Clp precursor
  misc_feature (77)..(270): Homolog of NCBI NO: 6685315 NR Description: ATP-dependent Clp protease proteolytic subunit
  misc_feature (37)..(268): Homolog of NCBI NO: 8393156 NR Description: caseinolytic protease, ATP-dependent, proteolytic
  misc_feature (1)..(268): Homolog of NCBI NO: 34882298 NR Description: similar to ClpP protease [Rattus norvegicus]
  misc_feature (73)..(277): Homolog of NCBI NO: 18420643 NR Description: ATP-dependent Clp protease proteolytic subunit
  misc_feature (44)..(300): Homolog of NCBI NO: 38344435 NR Description: OSJNBa0038O10.7 [Oryza sativa (japonica
MTPSSALALAHHAAVSPLPSSTPRPSPRSSSLSLGPGSAGLGPRRLVAAAPPRAFFSSSPYQPPQPEGFSQHREYGLVPMVIETTSRGERAYDIFSRLLKERIVCIHGPIADDTASLVVAQLLFLESENPLKPVHLYINSPGGVVTAGLAIYDTMQYIRCPVTTLCIGQAASMGSLLLAAGAPGERRALPNARVMIHQPSGGAQGQATDIAIQAKEILKMRDRLNKIYQKHTRQPIDKIEQCMERDLFMDPEEARDWGLIDEVIENRPASFMPDVIGGGLDVPRLGGVGGGRGRDVEEPSAV

SEQ ID NO: 16285 - protein, 223 aa, Zea mays subsp. mays
  peptide (1)..(223): Ceres Seq. ID no. 12358437
  misc_feature (7)..(188): Pfam Name: Clp protease Pfam Description: Clp protease
  misc_feature (1)..(188): Homolog of NCBI NO: 23474550 NR Description: hypothetical protein [Desulfovibrio desulfuricans
  misc_feature (1)..(191): Homolog of NCBI NO: 22967580 NR Description: hypothetical protein [Rhodospirillum rubrum]
  misc_feature (1)..(189): Homolog of NCBI NO: 20129427 NR Description: CG5045-PA [Drosophila melanogaster]
  misc_feature (1)..(191): Homolog of NCBI NO: 23014984 NR Description: hypothetical protein [Magnetospirillum
  misc_feature (1)..(189): Homolog of NCBI NO: 5174419 NR Description: endopeptidase Clp precursor
  misc_feature (1)..(191): Homolog of NCBI NO: 6685315 NR Description: ATP-dependent Clp protease proteolytic subunit
  misc_feature (1)..(189): Homolog of NCBI NO: 8393156 NR Description: caseinolytic protease, ATP-dependent, proteolytic
  misc_feature (1)..(189): Homolog of NCBI NO: 34882298 NR Description: similar to ClpP protease [Rattus norvegicus]
  misc_feature (1)..(198): Homolog of NCBI NO: 18420643 NR Description: ATP-dependent Clp protease proteolytic subunit
  misc_feature (1)..(221): Homolog of NCBI NO: 38344435 NR Description: OSJNBa0038O10.7 [Oryza sativa (japonica
MVIETTSRGERAYDIFSRLLKERIVCIHGPIADDTASLVVAQLLFLESENPLKPVHLYINSPGGVVTAGLAIYDTMQYIRCPVTTLCIGQAASMGSLLLAAGAPGERRALPNARVMIHQPSGGAQGQATDIAIQAKEILKMRDRLNKIYQKHTRQPIDKIEQCMERDLFMDPEEARDWGLIDEVIENRPASFMPDVIGGGLDVPRLGGVGGGRGRDVEEPSAV

SEQ ID NO: 16286 - DNA, 1883 bp, Zea mays subsp. mays
  misc_feature (1)..(1883): Ceres Seq. ID no. 12369615
  misc_feature: MA Experiment ID: 108528 Result: Up-regulated in Transcription
  misc_feature: MA Experiment 108528 PARAMETER Experiment Name: Zm_Imbibed_Seeds_P Parameter: Age (day) Value: 5 vs. 2
  misc_feature: MA Experiment 108528 PARAMETER Experiment Name: Zm_Imbibed_Seeds_P Parameter: Organism Value: Zea mays
  misc_feature: MA Experiment 108528 PARAMETER Experiment Name: Zm_Imbibed_Seeds_P Parameter: Plant Line Value: 35A19
  misc_feature: MA Experiment 108528 PARAMETER Experiment Name: Zm_Imbibed_Seeds_P Parameter: Tissue Value: Aerial vs. Embryo
  misc_feature: MA Experiment ID: 108530 Result: Up-regulated in Transcription
  misc_feature: MA Experiment 108530 PARAMETER Experiment Name: Zm_Imbibed_Seeds_P Parameter: Age (day) Value: 6 vs. 2
  misc_feature: MA Experiment 108530 PARAMETER Experiment Name: Zm_Imbibed_Seeds_P Parameter: Organism Value: Zea mays
  misc_feature: MA Experiment 108530 PARAMETER Experiment Name: Zm_Imbibed_Seeds_P Parameter: Plant Line Value: 35A19
  misc_feature: MA Experiment 108530 PARAMETER Experiment Name: Zm_Imbibed_Seeds_P Parameter: Tissue Value: Aerial vs. Embryo
  misc_feature: MA Experiment ID: 108535 Result: Down-regulated in Transcription
  misc_feature: MA Experiment 108535 PARAMETER Experiment Name: Zm_Meristem_P Parameter: Age (day) Value: 8
  misc_feature: MA Experiment 108535 PARAMETER Experiment Name: Zm_Meristem_P Parameter: Organism Value: Zea mays
  misc_feature: MA Experiment 108535 PARAMETER Experiment Name: Zm_Meristem_P Parameter: Plant Line Value: 35A19
  misc_feature: MA Experiment 108535 PARAMETER Experiment Name: Zm_Meristem_P Parameter: Tissue Value: Root Meristem vs. Above Root Meristem
  misc_feature: MA Experiment ID: 108545 Result: Up-regulated in Transcription
  misc_feature: MA Experiment 108545 PARAMETER Experiment Name: Zm_Imbibed_Seeds_P Parameter: Age (day) Value: 3 vs. 2
  misc_feature: MA Experiment 108545 PARAMETER Experiment Name: Zm_Imbibed_Seeds_P Parameter: Organism Value: Zea mays
  misc_feature: MA Experiment 108545 PARAMETER Experiment Name: Zm_Imbibed_Seeds_P Parameter: Plant Line Value: 35A19
  misc_feature: MA Experiment 108545 PARAMETER Experiment Name: Zm_Imbibed_Seeds_P Parameter: Tissue Value: Aerial vs. Embryo
  misc_feature: MA Experiment ID: 108547 Result: Up-regulated in Transcription
  misc_feature: MA Experiment 108547 PARAMETER Experiment Name: Zm_Imbibed_Seeds_P Parameter: Age (day) Value: 4 vs. 2
  misc_feature: MA Experiment 108547 PARAMETER Experiment Name: Zm_Imbibed_Seeds_P Parameter: Organism Value: Zea mays
  misc_feature: MA Experiment 108547 PARAMETER Experiment Name: Zm_Imbibed_Seeds_P Parameter: Plant Line Value: 35A19
  misc_feature: MA Experiment 108547 PARAMETER Experiment Name: Zm_Imbibed_Seeds_P Parameter: Tissue Value: Aerial vs. Embryo
  misc_feature: MA Experiment ID: 108687 Result: Down-regulated in Transcription
  misc_feature: MA Experiment 108687 PARAMETER Experiment Name: Zm_Embryos-Flowers__P Parameter: Tissue Value: Embryo vs. Aerial+
  misc_feature: MA Experiment ID: 20000480 Result: Up-regulated in Transcription
  misc_feature: MA Experiment 20000480 PARAMETER Experiment Name: Zm_Drought_P Parameter: Age (day) Value: 11
  misc_feature: MA Experiment 20000480 PARAMETER Experiment Name: Zm_Drought_P Parameter: Organism Value: Zea mays
  misc_feature: MA Experiment 20000480 PARAMETER Experiment Name: Zm_Drought_P Parameter: Plant Line Value: 35A19
  misc_feature: MA Experiment 20000480 PARAMETER Experiment Name: Zm_Drought_P Parameter: Timepoint (hr) Value: 72
  misc_feature: MA Experiment 20000480 PARAMETER Experiment Name: Zm_Drought_P Parameter: Tissue Value: Aerial
  misc_feature: MA Experiment 20000480 PARAMETER Experiment Name: Zm_Drought_P Parameter: Treatment Value: Drought vs. No Drought
  misc_feature: MA Experiment ID: 20000535 Result: Down-regulated in Transcription
  misc_feature: MA Experiment 20000535 PARAMETER Experiment Name: Zm_Hybrid_Seed_Dev_P Parameter: DAP Value: 30 vs. 12
  misc_feature: MA Experiment 20000535 PARAMETER Experiment Name: Zm_Hybrid_Seed_Dev_P Parameter: Organism Value: Zea mays
  misc_feature: MA Experiment 20000535 PARAMETER Experiment Name: Zm_Hybrid_Seed_Dev_P Parameter: Plant Line Value: 35A19
  misc_feature: MA Experiment 20000535 PARAMETER Experiment Name: Zm_Hybrid_Seed_Dev_P Parameter: Tissue Value: Embryo vs. Unfert Floret
cttgactcactcacttggccactcttcttcctcctcatcaatccgctctccagcacttgttcggaagaaaaagaagctagaacacgctaacaagacaacaaggatcatggggcgcgggcgcggccacctcctgctgccggcagcagccgcctgcctgtgggcgctgtcgtgcgcgctgctgctgcgcgcgtcccctcaccgcgctggcgccggcgccggcgggctgctgagggtcgggctcagcaggcgcggcggcgggctcgaccagcgcgcgctggcggcggccaaggccgcgaggcagcaggaggcaagccgtctcggggcctccggcggcggcgacgtccctctcgtcgactacctcaacacccagtactatggggtcgtcggcatcggcacaccgccgcagaacttcaccgtcatcttcgacaccggcagctccaacctctgggtcccctcctccagatgctacttctcgattgcctgctacctgcaccacagatacaagtcggccaagtctagcacgtacaaggcggacggcgagacctgcaagatcacctacggctccggctcgatcgccgggttcttcagcgacgacgacgtgctggtcggggacctgaccgtcaaaaaccagaagttcatcgagacaacgcgcgaaagcagcgtaacgttcataatcggcaagttcgacggcatcctcggtctcggataccccgagatctccgtcggcaaggctcctccgatctggcagagcatgcaggagcaggagctgctggcggaggacgtcttctccttctggctgaaccggagcccggacgcggacgcagcgtccggcggcgagctcgtcttcggcggcgtcgaccctgcgcacttcagcgggaaccacacctacgtccccgtctcccgcaagggatactggcagttcgacatgggggaccttctcatcgacggccactccaccggtttctgcgccaaggggtgcgctgccatcgtcgactccgggacttccttgctcgctggcccaacggccataattgcccaggtgaacgaagcgatcggggcagacgggatcatcagcacggagtgcaaggaagttgtgagccagtacggagagatgatcctcgacatgctcatcgcacagacggatccacagagggtgtgcagccaggttggtctgtgcgtgttcgatggcgctcgatctgtcagcgaggggattgaatctgttgtcgggaaagaaaacctgggctcagatgtcatgtgctcggcctgtcagatggctgtcgtgtggatagagaaccagctccgcgaaaacaagaccaaggagctcatactgcagtacgctaaccagctgtgtgagcgtctgccgagccccaacggagagtcaacagtcagctgccaggagatctccaagatgcccagccttgcgtttcaccatcgcaaacaagaccttcaccctaacacccgagcagtacattgtgaagctggagcaaggaggccaaaccgtctgcatcagtgggttcatggcgtatgacgtgccaccgccgcgtggtcctctctggattcttggggacgtcttcatgggagcttaccacacggtgttcgacttcggcaacgacaggattggcttcgcggaatctgcatgagtgtggagagcactctcatctttataaagacgataccctatgtattagggatgtgtagtttattgtctatccactacatgccaacagtacgctgcaaataaatcggtggccaaaattgctgaaaccagaaacgtgaacagtactgctttctttgtttctggagaagagcaaatggatgcttcaagacatgcatgtccgatgtgtattgagaaatagagcgatgagtgctgctcgatcgtctcg

SEQ ID NO: 16287 - protein, 508 aa, Zea mays subsp. mays
  peptide (1)..(508): Ceres Seq. ID no. 12369616
  misc_feature (75)..(400): Pfam Name: Eukaryotic aspartyl protease Pfam Description: Eukaryotic aspartyl protease
  misc_feature (106)..(360): Homolog of NCBI NO: 17549909 NR Description: Aspartic protease ASP-4 (49.3 kD) (asp-4)
  misc_feature (80)..(484): Homolog of NCBI NO: 20800441 NR Description: aspartic proteinase [Vigna unguiculata]
  misc_feature (49)..(475): Homolog of NCBI NO: 13897888 NR Description: putative aspartic protease [Ipomoea batatas]
  misc_feature (74)..(475): Homolog of NCBI NO: 22330379 NR Description: aspartic protease, putative
  misc_feature (79)..(475): Homolog of NCBI NO: 5822248 NR Description: Chain A, Crystal Structure Of Prophytepsin, A
  misc_feature (48)..(475): Homolog of NCBI NO: 7435839 NR Description: aspartic proteinase precursor, wound-induced -
  misc_feature (75)..(475): Homolog of NCBI NO: 21616051 NR Description: aspartic proteinase [Theobroma cacao]
  misc_feature (54)..(475): Homolog of NCBI NO: 1168536 NR Description: Phytepsin precursor (Aspartic proteinase)
  misc_feature (55)..(475): Homolog of NCBI NO: 2499819 NR Description: Aspartic proteinase oryzasin 1 precursor
  misc_feature (42)..(496): Homolog of NCBI NO: 1168537 NR Description: Aspartic proteinase precursor
LTHSLGHSSSSSSIRSPALVRKKKKLEHANKTTRIMGRGRGHLLLPAAAACLWALSCALLLRASPHRAGAGAGGLLRVGLSRRGGGLDQRALAAAKAARQQEASRLGASGGGDVPLVDYLNTQYYGVVGIGTPPQNFTVIFDTGSSNLWVPSSRCYFSIACYLHHRYKSAKSSTYKADGETCKITYGSGSIAGFFSDDDVLVGDLTVKNQKFIETTRESSVTFIIGKFDGILGLGYPEISVGKAPPIWQSMQEQELLAEDVFSFWLNRSPDADAASGGELVFGGVDPAHFSGNHTYVPVSRKGYWQFDMGDLLIDGHSTGFCAKGCAAIVDSGTSLLAGPTAIIAQVNEAIGADGIISTECKEVVSQYGEMILDMLIAQTDPQRVCSQVGLCVFDGARSVSEGIESVVGKENLGSDVMCSACQMAVVWIENQLRENKTKELILQYANQLCERLPSPNGESTVSCQEISKMPSLAFHHRKQDLHPNTRAVHCEAGARRPNRLHQWVHGV

SEQ ID NO: 16288 - protein, 473 aa, Zea mays subsp. mays
  peptide (1)..(473): Ceres Seq. ID no. 12369617
  misc_feature (40)..(365): Pfam Name: Eukaryotic aspartyl protease Pfam Description: Eukaryotic aspartyl protease
  misc_feature (71)..(325): Homolog of NCBI NO: 17549909 NR Description: Aspartic protease ASP-4 (49.3 kD) (asp-4)
  misc_feature (45)..(449): Homolog of NCBI NO: 20800441 NR Description: aspartic proteinase [Vigna unguiculata]
  misc_feature (14)..(440): Homolog of NCBI NO: 13897888 NR Description: putative aspartic protease [Ipomoea batatas]
  misc_feature (39)..(440): Homolog of NCBI NO: 22330379 NR Description: aspartic protease, putative
  misc_feature (44)..(440): Homolog of NCBI NO: 5822248 NR Description: Chain A, Crystal Structure Of Prophytepsin, A
  misc_feature (13)..(440): Homolog of NCBI NO: 7435839 NR Description: aspartic proteinase precursor, wound-induced -
  misc_feature (40)..(440): Homolog of NCBI NO: 21616051 NR Description: aspartic proteinase [Theobroma cacao]
  misc_feature (19)..(440): Homolog of NCBI NO: 1168536 NR Description: Phytepsin precursor (Aspartic proteinase)
  misc_feature (20)..(440): Homolog of NCBI NO: 2499819 NR Description: Aspartic proteinase oryzasin 1 precursor
  misc_feature (7)..(461): Homolog of NCBI NO: 1168537 NR Description: Aspartic proteinase precursor
MGRGRGHLLLPAAAACLWALSCALLLRASPHRAGAGAGGLLRVGLSRRGGGLDQRALAAAKAARQQEASRLGASGGGDVPLVDYLNTQYYGVVGIGTPPQNFTVIFDTGSSNLWVPSSRCYFSIACYLHHRYKSAKSSTYKADGETCKITYGSGSIAGFFSDDDVLVGDLTVKNQKFIETTRESSVTFIIGKFDGILGLGYPEISVGKAPPIWQSMQEQELLAEDVFSFWLNRSPDADAASGGELVFGGVDPAHFSGNHTYVPVSRKGYWQFDMGDLLIDGHSTGFCAKGCAAIVDSGTSLLAGPTAIIAQVNEAIGADGIISTECKEVVSQYGEMILDMLIAQTDPQRVCSQVGLCVFDGARSVSEGIESVVGKENLGSDVMCSACQMAVVWIENQLRENKTKELILQYANQLCERLPSPNGESTVSCQEISKMPSLAFHHRKQDLHPNTRAVHCEAGARRPNRLHQWVHGV

SEQ ID NO: 16289 - protein, 258 aa, Zea mays subsp. mays
  peptide (1)..(258): Ceres Seq. ID no. 12369618
  misc_feature (1)..(150): Pfam Name: Eukaryotic aspartyl protease Pfam Description: Eukaryotic aspartyl protease
  misc_feature (1)..(110): Homolog of NCBI NO: 17549909 NR Description: Aspartic protease ASP-4 (49.3 kD) (asp-4)
  misc_feature (1)..(234): Homolog of NCBI NO: 20800441 NR Description: aspartic proteinase [Vigna unguiculata]
  misc_feature (1)..(225): Homolog of NCBI NO: 13897888 NR Description: putative aspartic protease [Ipomoea batatas]
  misc_feature (1)..(225): Homolog of NCBI NO: 22330379 NR Description: aspartic protease, putative
  misc_feature (1)..(225): Homolog of NCBI NO: 5822248 NR Description: Chain A, Crystal Structure Of Prophytepsin, A
  misc_feature (1)..(225): Homolog of NCBI NO: 7435839 NR Description: aspartic proteinase precursor, wound-induced -
  misc_feature (1)..(225): Homolog of NCBI NO: 21616051 NR Description: aspartic proteinase [Theobroma cacao]
  misc_feature (1)..(225): Homolog of NCBI NO: 1168536 NR Description: Phytepsin precursor (Aspartic proteinase)
  misc_feature (1)..(225): Homolog of NCBI NO: 2499819 NR Description: Aspartic proteinase oryzasin 1 precursor
  misc_feature (1)..(246): Homolog of NCBI NO: 1168537 NR Description: Aspartic proteinase precursor
MQEQELLAEDVFSFWLNRSPDADAASGGELVFGGVDPAHFSGNHTYVPVSRKGYWQFDMGDLLIDGHSTGFCAKGCAAIVDSGTSLLAGPTAIIAQVNEAIGADGIISTECKEVVSQYGEMILDMLIAQTDPQRVCSQVGLCVFDGARSVSEGIESVVGKENLGSDVMCSACQMAVVWIENQLRENKTKELILQYANQLCERLPSPNGESTVSCQEISKMPSLAFHHRKQDLHPNTRAVHCEAGARRPNRLHQWVHGV

SEQ ID NO: 16290 - DNA, 1384 bp, Zea mays subsp. mays
  misc_feature (1)..(1384): Ceres Seq. ID no. 12368172
  misc_feature: MA Experiment ID: 108535 Result: Down-regulated in Transcription
  misc_feature: MA Experiment 108535 PARAMETER Experiment Name: Zm_Meristem_P Parameter: Age (day) Value: 8
  misc_feature: MA Experiment 108535 PARAMETER Experiment Name: Zm_Meristem_P Parameter: Organism Value: Zea mays
  misc_feature: MA Experiment 108535 PARAMETER Experiment Name: Zm_Meristem_P Parameter: Plant Line Value: 35A19
  misc_feature: MA Experiment 108535 PARAMETER Experiment Name: Zm_Meristem_P Parameter: Tissue Value: Root Meristem vs. Above Root Meristem
  misc_feature: MA Experiment ID: 108559 Result: Down-regulated in Transcription
  misc_feature: MA Experiment 108559 PARAMETER Experiment Name: Zm_5mM_NO_P Parameter: Age (day) Value: 8
  misc_feature: MA Experiment 108559 PARAMETER Experiment Name: Zm_5mM_NO_P Parameter: Organism Value: Zea mays
  misc_feature: MA Experiment 108559 PARAMETER Experiment Name: Zm_5mM_NO_P Parameter: Plant Line Value: 35A19
  misc_feature: MA Experiment 108559 PARAMETER Experiment Name: Zm_5mM_NO_P Parameter: Timepoint (hr) Value: 12
  misc_feature: MA Experiment 108559 PARAMETER Experiment Name: Zm_5mM_NO_P Parameter: Tissue Value: Aerial
  misc_feature: MA Experiment 108559 PARAMETER Experiment Name: Zm_5mM_NO_P Parameter: Treatment Value: 5mM NO vs. No Treatment
  misc_feature: MA Experiment ID: 108689 Result: Up-regulated in Transcription
  misc_feature: MA Experiment 108689 PARAMETER Experiment Name: Zm_Drought_Roots_P Parameter: Age (day) Value: 9
  misc_feature: MA Experiment 108689 PARAMETER Experiment Name: Zm_Drought_Roots_P Parameter: Organism Value: Zea mays
  misc_feature: MA Experiment 108689 PARAMETER Experiment Name: Zm_Drought_Roots_P Parameter: Plant Line Value: 35A19
  misc_feature: MA Experiment 108689 PARAMETER Experiment Name: Zm_Drought_Roots_P Parameter: Timepoint (hr) Value: 24
  misc_feature: MA Experiment 108689 PARAMETER Experiment Name: Zm_Drought_Roots_P Parameter: Tissue Value: Roots
  misc_feature: MA Experiment 108689 PARAMETER Experiment Name: Zm_Drought_Roots_P Parameter: Treatment Value: Drought vs. No Drought
  misc_feature: MA Experiment ID: 20000480 Result: Down-regulated in Transcription
  misc_feature: MA Experiment 20000480 PARAMETER Experiment Name: Zm_Drought_P Parameter: Age (day) Value: 11
  misc_feature: MA Experiment 20000480 PARAMETER Experiment Name: Zm_Drought_P Parameter: Organism Value: Zea mays
  misc_feature: MA Experiment 20000480 PARAMETER Experiment Name: Zm_Drought_P Parameter: Plant Line Value: 35A19
  misc_feature: MA Experiment 20000480 PARAMETER Experiment Name: Zm_Drought_P Parameter: Timepoint (hr) Value: 72
  misc_feature: MA Experiment 20000480 PARAMETER Experiment Name: Zm_Drought_P Parameter: Tissue Value: Aerial
  misc_feature: MA Experiment 20000480 PARAMETER Experiment Name: Zm_Drought_P Parameter: Treatment Value: Drought vs. No Drought
  misc_feature: MA Experiment ID: 20000535 Result: Down-regulated in Transcription
  misc_feature: MA Experiment 20000535 PARAMETER Experiment Name: Zm_Hybrid_Seed_Dev_P Parameter: DAP Value: 30 vs. 12
  misc_feature: MA Experiment 20000535 PARAMETER Experiment Name: Zm_Hybrid_Seed_Dev_P Parameter: Organism Value: Zea mays
  misc_feature: MA Experiment 20000535 PARAMETER Experiment Name: Zm_Hybrid_Seed_Dev_P Parameter: Plant Line Value: 35A19
  misc_feature: MA Experiment 20000535 PARAMETER Experiment Name: Zm_Hybrid_Seed_Dev_P Parameter: Tissue Value: Embryo vs. Unfert Floret
attacatccgagggcactccatctcttgcgtcccttaacccctccaccaatccaatccaatcccttaaccccgcaccgaatccagccttcgaagcttcctcttcctcccggccccggtcccggtcccggtcccggagccctgttcttggtacttaggacaagacgctccgagaccctcgagattgagagctcgctcgctcgctcggtgtcttcgccagctgcccaccctccttcctgctcgtccccccgctcgcgcctcctcttcctcggactgatgggcgaccatctcgcgttgatcgtggaccggctgctgacagagtcgacgctggaggcggcgatcggcggtgggaagcacatggtcgatctgcgtcaggagacggtggacgtcgagtactgccatcgcgggctaggcggcggctcggcgacgaaggtggtggagtgcaggatttgccaggaggaggactgggacacctgcatggaggccccctgcgcctgttgtggcagcctcaagtatgcgcatcggaaatgcattcagcgctggtgcaatgagaaaggcgacactatgtgtgaaatatgcctgcagcaattcaggccaggttatacttctccacaacagctgtttcactatggaagtataccaatgaatttcagagggaactgggagattgccaggcaagatctcaatgattcccagataataacaatgatgcccacggagcgtgattttatggacaattacgatgactactttcctatcaggacaagaagcagcaccttgtgttgccggacaattgccataattttcatgtcactcctggtccttcgccacactcttcctcttgtgattggtgacaatggggagtactcattggccttattctcgcttctggtgctgagaactgcgggaatcctctttccaatcctggtgatggtgagagcattggcaagcttccatcatcgacggcggcagcaggaaagccaggaagcatatatatcttcatcagagagcgaggaggaagaggaagagtatacagttgccaattctgcacaaacaaactactcgcaaccgcgcttcataccagtctactgacatggccaagaacaagccttccaacctcacatctgacagggaattccagcgcctgagtttagctgacagatgcaaggatgaatggatgatcacaaggggggaaattacaaaattgtgaatgtggtgacatagtaagatagcctgaagccactcgcttctatgcccatagagaagaatgtagtggccctgctacttgtacataggagagagtacagcagcagagtgctgacaaacccggatactgtgactcgagtctctactgcagtaacccttgtgcactgctctccccgtccc

SEQ ID NO: 16291 - protein, 362 aa, Zea mays subsp. mays
  peptide (1)..(362): Ceres Seq. ID no. 12368173
  misc_feature (147)..(192): Pfam Name: Zinc finger, C3HC4 type (RING finger) Pfam Description: Zinc finger, C3HC4 type (RING finger)
  misc_feature (146)..(328): Homolog of NCBI NO: 25365878 NR Description: F14L17.2 protein - Arabidopsis thaliana
  misc_feature (146)..(326): Homolog of NCBI NO: 15227065 NR Description: unknown protein
  misc_feature (146)..(328): Homolog of NCBI NO: 21537046 NR Description: nucleoside triphosphatase, putative [Arabidopsis
  misc_feature (146)..(328): Homolog of NCBI NO: 26451292 NR Description: unknown protein [Arabidopsis thaliana]
  misc_feature (146)..(328): Homolog of NCBI NO: 15223693 NR Description: nucleoside triphosphatase, putative
  misc_feature (145)..(335): Homolog of NCBI NO: 18424590 NR Description: expressed protein
  misc_feature (92)..(324): Homolog of NCBI NO: 30692888 NR Description: expressed protein [Arabidopsis thaliana]
  misc_feature (92)..(335): Homolog of NCBI NO: 15232824 NR Description: putative protein; protein id: At3g47550.1
  misc_feature (92)..(335): Homolog of NCBI NO: 15240828 NR Description: putative protein; protein id: At5g38070.1
  misc_feature (92)..(343): Homolog of NCBI NO: 22325409 NR Description: similar to nucleoside triphosphatase, putative
LHPRALHLLRPLTPPPIQSNPLTPHRIQPSKLPLPPGPGPGPGPGALFLVLRTRRSETLEIESSLARSVSSPAAHPPSCSSPRSRLLFLGLMGDHLALIVDRLLTESTLEAAIGGGKHMVDLRQETVDVEYCHRGLGGGSATKVVECRICQEEDWDTCMEAPCACCGSLKYAHRKCIQRWCNEKGDTMCEICLQQFRPGYTSPQQLFHYGSIPMNFRGNWEIARQDLNDSQIITMMPTERDFMDNYDDYFPIRTRSSTLCCRTIAIIFMSLLVLRHTLPLVIGDNGEYSLALFSLLVLRTAGILFPILVMVRALASFHHRRRQQESQEAYISSSESEEEEEEYTVANSAQTNYSQPRFIPVY

SEQ ID NO: 16292 - protein, 271 aa, Zea mays subsp. mays
  peptide (1)..(271): Ceres Seq. ID no. 12368174
  misc_feature (56)..(101): Pfam Name: Zinc finger, C3HC4 type (RING finger) Pfam Description: Zinc finger, C3HC4 type (RING finger)
  misc_feature (55)..(237): Homolog of NCBI NO: 25365878 NR Description: F14L17.2 protein - Arabidopsis thaliana
  misc_feature (55)..(235): Homolog of NCBI NO: 15227065 NR Description: unknown protein
  misc_feature (55)..(237): Homolog of NCBI NO: 21537046 NR Description: nucleoside triphosphatase, putative [Arabidopsis
  misc_feature (55)..(237): Homolog of NCBI NO: 26451292 NR Description: unknown protein [Arabidopsis thaliana]
  misc_feature (55)..(237): Homolog of NCBI NO: 15223693 NR Description: nucleoside triphosphatase, putative
  misc_feature (54)..(244): Homolog of NCBI NO: 18424590 NR Description: expressed protein
  misc_feature (1)..(233): Homolog of NCBI NO: 30692888 NR Description: expressed protein [Arabidopsis thaliana]
  misc_feature (1)..(244): Homolog of NCBI NO: 15232824 NR Description: putative protein; protein id: At3g47550.1
  misc_feature (1)..(244): Homolog of NCBI NO: 15240828 NR Description: putative protein; protein id: At5g38070.1
  misc_feature (1)..(252): Homolog of NCBI NO: 22325409 NR Description: similar to nucleoside triphosphatase, putative
MGDHLALIVDRLLTESTLEAAIGGGKHMVDLRQETVDVEYCHRGLGGGSATKVVECRICQEEDWDTCMEAPCACCGSLKYAHRKCIQRWCNEKGDTMCEICLQQFRPGYTSPQQLFHYGSIPMNFRGNWEIARQDLNDSQIITMMPTERDFMDNYDDYFPIRTRSSTLCCRTIAIIFMSLLVLRHTLPLVIGDNGEYSLALFSLLVLRTAGILFPILVMVRALASFHHRRRQQESQEAYISSSESEEEEEEYTVANSAQTNYSQPRFIPVY

SEQ ID NO: 16293 - protein, 244 aa, Zea mays subsp. mays
  peptide (1)..(244): Ceres Seq. ID no. 12368175
  misc_feature (29)..(74): Pfam Name: Zinc finger, C3HC4 type (RING finger) Pfam Description: Zinc finger, C3HC4 type (RING finger)
  misc_feature (1)..(217): Homolog of NCBI NO: 15240828 NR Description: putative protein; protein id: At5g38070.1
  misc_feature (28)..(210): Homolog of NCBI NO: 25365878 NR Description: F14L17.2 protein - Arabidopsis thaliana
  misc_feature (28)..(210): Homolog of NCBI NO: 26451292 NR Description: unknown protein [Arabidopsis thaliana]
  misc_feature (28)..(210): Homolog of NCBI NO: 15223693 NR Description: nucleoside triphosphatase, putative
  misc_feature (1)..(206): Homolog of NCBI NO: 30692888 NR Description: expressed protein [Arabidopsis thaliana]
  misc_feature (1)..(217): Homolog of NCBI NO: 15232824 NR Description: putative protein; protein id: At3g47550.1
  misc_feature (27)..(217): Homolog of NCBI NO: 18424590 NR Description: expressed protein
  misc_feature (28)..(210): Homolog of NCBI NO: 21537046 NR Description: nucleoside triphosphatase, putative [Arabidopsis
  misc_feature (28)..(208): Homolog of NCBI NO: 15227065 NR Description: unknown protein
  misc_feature (1)..(225): Homolog of NCBI NO: 22325409 NR Description: similar to nucleoside triphosphatase, putative
MVDLRQETVDVEYCHRGLGGGSATKVVECRICQEEDWDTCMEAPCACCGSLKYAHRKCIQRWCNEKGDTMCEICLQQFRPGYTSPQQLFHYGSIPMNFRGNWEIARQDLNDSQIITMMPTERDFMDNYDDYFPIRTRSSTLCCRTIAIIFMSLLVLRHTLPLVIGDNGEYSLALFSLLVLRTAGILFPILVMVRALASFHHRRRQQESQEAYISSSESEEEEEEYTVANSAQTNYSQPRFIPVY

SEQ ID NO: 16294 - DNA, 1582 bp, Zea mays subsp. mays
  misc_feature (1)..(1582): Ceres Seq. ID no. 12376690
  misc_feature: MA Experiment ID: 108504 Result: Down-regulated in Transcription
  misc_feature: MA Experiment 108504 PARAMETER Experiment Name: Zm_Drought_P Parameter: Age (day) Value: 8
  misc_feature: MA Experiment 108504 PARAMETER Experiment Name: Zm_Drought_P Parameter: Organism Value: Zea mays
  misc_feature: MA Experiment 108504 PARAMETER Experiment Name: Zm_Drought_P Parameter: Plant Line Value: 35A19
  misc_feature: MA Experiment 108504 PARAMETER Experiment Name: Zm_Drought_P Parameter: Timepoint (hr) Value: 12
  misc_feature: MA Experiment 108504 PARAMETER Experiment Name: Zm_Drought_P Parameter: Tissue Value: Aerial
  misc_feature: MA Experiment 108504 PARAMETER Experiment Name: Zm_Drought_P Parameter: Treatment Value: Drought vs. No Drought
  misc_feature: MA Experiment ID: 108523 Result: Down-regulated in Transcription
  misc_feature: MA Experiment 108523 PARAMETER Experiment Name: Zm_42deg_Heat_P Parameter: Age (day) Value: 8
  misc_feature: MA Experiment 108523 PARAMETER Experiment Name: Zm_42deg_Heat_P Parameter: Organism Value: Zea mays
  misc_feature: MA Experiment 108523 PARAMETER Experiment Name: Zm_42deg_Heat_P Parameter: Plant Line Value: 35A19
  misc_feature: MA Experiment 108523 PARAMETER Experiment Name: Zm_42deg_Heat_P Parameter: Temperature (deg C) Value: 42 vs. 22
  misc_feature: MA Experiment 108523 PARAMETER Experiment Name: Zm_42deg_Heat_P Parameter: Timepoint (hr) Value: 6
  misc_feature: MA Experiment 108523 PARAMETER Experiment Name: Zm_42deg_Heat_P Parameter: Tissue Value: Aerial
  misc_feature: MA Experiment ID: 108529 Result: Up-regulated in Transcription
  misc_feature: MA Experiment 108529 PARAMETER Experiment Name: Zm_Imbibed_Seeds_P Parameter: Age (day) Value: 5 vs. 2
  misc_feature: MA Experiment 108529 PARAMETER Experiment Name: Zm_Imbibed_Seeds_P Parameter: Organism Value: Zea mays
  misc_feature: MA Experiment 108529 PARAMETER Experiment Name: Zm_Imbibed_Seeds_P Parameter: Plant Line Value: 35A19
  misc_feature: MA Experiment 108529 PARAMETER Experiment Name: Zm_Imbibed_Seeds_P Parameter: Tissue Value: Roots vs. Embryo
  misc_feature: MA Experiment ID: 108530 Result: Up-regulated in Transcription
  misc_feature: MA Experiment 108530 PARAMETER Experiment Name: Zm_Imbibed_Seeds_P Parameter: Age (day) Value: 6 vs. 2
  misc_feature: MA Experiment 108530 PARAMETER Experiment Name: Zm_Imbibed_Seeds_P Parameter: Organism Value: Zea mays
  misc_feature: MA Experiment 108530 PARAMETER Experiment Name: Zm_Imbibed_Seeds_P Parameter: Plant Line Value: 35A19
  misc_feature: MA Experiment 108530 PARAMETER Experiment Name: Zm_Imbibed_Seeds_P Parameter: Tissue Value: Aerial vs. Embryo
  misc_feature: MA Experiment ID: 108542 Result: Down-regulated in Transcription
  misc_feature: MA Experiment 108542 PARAMETER Experiment Name: Zm_150mM_NaCl_P Parameter: Age (day) Value: 8
  misc_feature: MA Experiment 108542 PARAMETER Experiment Name: Zm_150mM_NaCl_P Parameter: Organism Value: Zea mays
  misc_feature: MA Experiment 108542 PARAMETER Experiment Name: Zm_150mM_NaCl_P Parameter: Plant Line Value: 35A19
  misc_feature: MA Experiment 108542 PARAMETER Experiment Name: Zm_150mM_NaCl_P Parameter: Timepoint (hr) Value: 6
  misc_feature: MA Experiment 108542 PARAMETER Experiment Name: Zm_150mM_NaCl_P Parameter: Tissue Value: Aerial
  misc_feature: MA Experiment 108542 PARAMETER Experiment Name: Zm_150mM_NaCl_P Parameter: Treatment Value: 150mM NaCl vs. No Treatment
  misc_feature: MA Experiment ID: 108556 Result: Down-regulated in Transcription
  misc_feature: MA Experiment 108556 PARAMETER Experiment Name: Zm_Drought_P Parameter: Age (day) Value: 9
  misc_feature: MA Experiment 108556 PARAMETER Experiment Name: Zm_Drought_P Parameter: Organism Value: Zea mays
  misc_feature: MA Experiment 108556 PARAMETER Experiment Name: Zm_Drought_P Parameter: Plant Line Value: 35A19
  misc_feature: MA Experiment 108556 PARAMETER Experiment Name: Zm_Drought_P Parameter: Timepoint (hr) Value: 24
  misc_feature: MA Experiment 108556 PARAMETER Experiment Name: Zm_Drought_P Parameter: Tissue Value: Aerial
  misc_feature: MA Experiment 108556 PARAMETER Experiment Name: Zm_Drought_P Parameter: Treatment Value: Drought vs. No Drought
  misc_feature: MA Experiment ID: 108559 Result: Down-regulated in Transcription
  misc_feature: MA Experiment 108559 PARAMETER Experiment Name: Zm_5mM_NO_P Parameter: Age (day) Value: 8
  misc_feature: MA Experiment 108559 PARAMETER Experiment Name: Zm_5mM_NO_P Parameter: Organism Value: Zea mays
  misc_feature: MA Experiment 108559 PARAMETER Experiment Name: Zm_5mM_NO_P Parameter: Plant Line Value: 35A19
  misc_feature: MA Experiment 108559 PARAMETER Experiment Name: Zm_5mM_NO_P Parameter: Timepoint (hr) Value: 12
  misc_feature: MA Experiment 108559 PARAMETER Experiment Name: Zm_5mM_NO_P Parameter: Tissue Value: Aerial
  misc_feature: MA Experiment 108559 PARAMETER Experiment Name: Zm_5mM_NO_P Parameter: Treatment Value: 5mM NO vs. No Treatment
  misc_feature: MA Experiment ID: 108597 Result: Down-regulated in Transcription
  misc_feature: MA Experiment 108597 PARAMETER Experiment Name: Zm_100uM_ABA_P Parameter: Age (day) Value: 9
  misc_feature: MA Experiment 108597 PARAMETER Experiment Name: Zm_100uM_ABA_P Parameter: Organism Value: Zea mays
  misc_feature: MA Experiment 108597 PARAMETER Experiment Name: Zm_100uM_ABA_P Parameter: Plant Line Value: 35A19
  misc_feature: MA Experiment 108597 PARAMETER Experiment Name: Zm_100uM_ABA_P Parameter: Timepoint (hr) Value: 24
  misc_feature: MA Experiment 108597 PARAMETER Experiment Name: Zm_100uM_ABA_P Parameter: Tissue Value: Aerial
  misc_feature: MA Experiment 108597 PARAMETER Experiment Name: Zm_100uM_ABA_P Parameter: Treatment Value: 100uM ABA vs. No Treatment
  misc_feature: MA Experiment ID: 20001605 Result: Down-regulated in Transcription
  misc_feature: MA Experiment 20001605 PARAMETER Experiment Name: Zm_50ppm_KNO3_L-to-H_P Parameter: Age (day) Value: 19
  misc_feature: MA Experiment 20001605 PARAMETER Experiment Name: Zm_50ppm_KNO3_L-to-H_P Parameter: Organism Value: Zea mays
  misc_feature: MA Experiment 20001605 PARAMETER Experiment Name: Zm_50ppm_KNO3_L-to-H_P Parameter: Plant Line Value: 35A19
  misc_feature: MA Experiment 20001605 PARAMETER Experiment Name: Zm_50ppm_KNO3_L-to-H_P Parameter: Timepoint (hr) Value: 4
  misc_feature: MA Experiment 20001605 PARAMETER Experiment Name: Zm_50ppm_KNO3_L-to-H_P Parameter: Tissue Value: Shoots
  misc_feature: MA Experiment 20001605 PARAMETER Experiment Name: Zm_50ppm_KNO3_L-to-H_P Parameter: Treatment Value: 50ppm KNO3 vs. 50ppm KCl
aaagcaccagctaagctaaagacgacactagcattgcacacactaactacatatatagctaaatacactagcatacccccccaaaaaaatgtccgcgtcacgggttcctcctcgccgtcctcgtggtgggcagcgtactgtgcaccgccgccgctccccgcgcgctcgcggcggcggctcgcgagctggccggggacgacgaggccgccgccgcgatggcgtcgcggcacgagaagtggatggcggagcacgggcgcgcgtacaaggatgaggccgagaaggcgcggcggctggaggtgttccgggccaacgcggagctgatcgactcgttcaacgccgcagggacgcacagccaccggctggcgaccaacaggttcgccgacctcaccgtcgaggagttccgcgcggccaggaccgggctccggcagcgcccggcgccgtccgcgggcgccggccggttcaggtacgagaacttcagcctggcggacgcggcgcagagcgtggactggcgggccatgggtgccgtcaccggcgtcaaggaccagggagcgtgcggctgctgctgggcgttctcggcggtggcggcggtggaagggctaaacaagatccggacggggcggctggtgtcgctgtcggagcaggagctggtggactgcgacgtcagcggcgtggaccagggctgcgacggcggcctcatggacaacgccttccagttcgtcgcgcgccgcggcgggctggcctcggagtcgggctacccgtaccagggccggggacgggccctgccgctcgtccgccgccgccgccgcgtccatccggggccacgaggacgtgccgcgcaacaacgaggccgcgctcgcggccgccgtggccaaccagcccgtgtccgtggccatcaacggcgaggacatggcgttccgcttctacgacagcggcgtgctgggcggggcctgcggcacggacctcaaccacgccatcacggccgtcgggtacggcacggcgaacgacggcacaaggtactggctgatgaagaactcctggggcgcgtcgtggggcgagggcggatacgtccgcatccgccgcggcgtccgtggggagggcgtctgcggtctcgccaagctgccgtcctacccggtctagaggccaggcccagcggatcggagcaccgatcgcgtccaccaacgtaaccatcgcacagcatacagtacgcatgatgctgttacgtcatccaagacaagcgtgcacgtgcatggcatttatatttgactagctacgaatttaccgttctttttatttgtagccgacgataaatattggagaacagagatattactatttataagattgtatataatcatacgattcatggttatatatatgtatagtggtatagtcgaaatcacgacccacgccaagcattatgtattgtactcccagccataagaatgtcgctgaggtattagttggaccttacgtgtgatggtcacgtattgtaatgtacagattgcgttgaatgcaaccagtttagtgtaaacaaatacattcatactagaatgtgtgatttttaaaaaaaaaatatatgctc

SEQ ID NO: 16295 - protein, 322 aa, Zea mays subsp. mays
  peptide (1)..(322): Ceres Seq. ID no. 12376691
  misc_feature (92)..(184): Pfam Name: Papain family cysteine protease Pfam Description: Papain family cysteine protease
  misc_feature (1)..(184): Homolog of NCBI NO: 37780045 NR Description: cysteine protease 5 [Trifolium repens]
  misc_feature (1)..(183): Homolog of NCBI NO: 40806498 NR Description: putative cysteine protease 1 [Iris hollandica]
  misc_feature (1)..(184): Homolog of NCBI NO: 535454 NR Description: cysteine proteinase
  misc_feature (1)..(184): Homolog of NCBI NO: 24285904 NR Description: cysteine proteinase precursor [Ipomoea batatas]
  misc_feature (1)..(184): Homolog of NCBI NO: 13491750 NR Description: cysteine protease [Ipomoea batatas]
  misc_feature (1)..(182): Homolog of NCBI NO: 38346003 NR Description: OSJNBa0035O13.5 [Oryza sativa (japonica
  misc_feature (1)..(182): Homolog of NCBI NO: 38346007 NR Description: OSJNBa0035O13.9 [Oryza sativa (japonica
  misc_feature (1)..(182): Homolog of NCBI NO: 38345008 NR Description: OSJNBa0052O21.11 [Oryza sativa (japonica
  misc_feature (1)..(184): Homolog of NCBI NO: 21070926 NR Description: putative cysteine proteinase
  misc_feature (1)..(184): Homolog of NCBI NO: 7435799 NR Description: cysteine proteinase (EC 3.4.22.-) - barley
MASRHEKWMAEHGRAYKDEAEKARRLEVFRANAELIDSFNAAGTHSHRLATNRFADLTVEEFRAARTGLRQRPAPSAGAGRFRYENFSLADAAQSVDWRAMGAVTGVKDQGACGCCWAFSAVAAVEGLNKIRTGRLVSLSEQELVDCDVSGVDQGCDGGLMDNAFQFVARRGGLASESGYPYQGRGRALPLVRRRRRVHPGPRGRAAQQRGRARGRRGQPARVRGHQRRGHGVPLLRQRRAGRGLRHGPQPRHHGRRVRHGERRHKVLADEELLGRVVGRGRIRPHPPRRPWGGRLRSRQAAVLPGLEARPSGSEHRSRPPT

SEQ ID NO: 16296 - protein, 314 aa, Zea mays subsp. mays
  peptide (1)..(314): Ceres Seq. ID no. 12376692
  misc_feature (84)..(176): Pfam Name: Papain family cysteine protease Pfam Description: Papain family cysteine protease
  misc_feature (1)..(176): Homolog of NCBI NO: 37780045 NR Description: cysteine protease 5 [Trifolium repens]
  misc_feature (1)..(175): Homolog of NCBI NO: 40806498 NR Description: putative cysteine protease 1 [Iris hollandica]
  misc_feature (1)..(176): Homolog of NCBI NO: 535454 NR Description: cysteine proteinase
  misc_feature (1)..(176): Homolog of NCBI NO: 24285904 NR Description: cysteine proteinase precursor [Ipomoea batatas]
  misc_feature (1)..(176): Homolog of NCBI NO: 13491750 NR Description: cysteine protease [Ipomoea batatas]
  misc_feature (1)..(174): Homolog of NCBI NO: 38346003 NR Description: OSJNBa0035O13.5 [Oryza sativa (japonica
  misc_feature (1)..(174): Homolog of NCBI NO: 38346007 NR Description: OSJNBa0035O13.9 [Oryza sativa (japonica
  misc_feature (1)..(174): Homolog of NCBI NO: 38345008 NR Description: OSJNBa0052O21.11 [Oryza sativa (japonica
  misc_feature (1)..(176): Homolog of NCBI NO: 21070926 NR Description: putative cysteine proteinase
  misc_feature (1)..(176): Homolog of NCBI NO: 7435799 NR Description: cysteine proteinase (EC 3.4.22.-) - barley
MAEHGRAYKDEAEKARRLEVFRANAELIDSFNAAGTHSHRLATNRFADLTVEEFRAARTGLRQRPAPSAGAGRFRYENFSLADAAQSVDWRAMGAVTGVKDQGACGCCWAFSAVAAVEGLNKIRTGRLVSLSEQELVDCDVSGVDQGCDGGLMDNAFQFVARRGGLASESGYPYQGRGRALPLVRRRRRVHPGPRGRAAQQRGRARGRRGQPARVRGHQRRGHGVPLLRQRRAGRGLRHGPQPRHHGRRVRHGERRHKVLADEELLGRVVGRGRIRPHPPRRPWGGRLRSRQAAVLPGLEARPSGSEHRSRPPT

SEQ ID NO: 16297 - protein, 222 aa, Zea mays subsp. mays
  peptide (1)..(222): Ceres Seq. ID no. 12376693
  misc_feature (1)..(84): Pfam Name: Papain family cysteine protease Pfam Description: Papain family cysteine protease
  misc_feature (1)..(84): Homolog of NCBI NO: 37780045 NR Description: cysteine protease 5 [Trifolium repens]
  misc_feature (1)..(83): Homolog of NCBI NO: 40806498 NR Description: putative cysteine protease 1 [Iris hollandica]
  misc_feature (1)..(84): Homolog of NCBI NO: 535454 NR Description: cysteine proteinase
  misc_feature (1)..(84): Homolog of NCBI NO: 24285904 NR Description: cysteine proteinase precursor [Ipomoea batatas]
  misc_feature (1)..(84): Homolog of NCBI NO: 13491750 NR Description: cysteine protease [Ipomoea batatas]
  misc_feature (1)..(82): Homolog of NCBI NO: 38346003 NR Description: OSJNBa0035O13.5 [Oryza sativa (japonica
  misc_feature (1)..(82): Homolog of NCBI NO: 38346007 NR Description: OSJNBa0035O13.9 [Oryza sativa (japonica
  misc_feature (1)..(82): Homolog of NCBI NO: 38345008 NR Description: OSJNBa0052O21.11 [Oryza sativa (japonica
  misc_feature (1)..(84): Homolog of NCBI NO: 21070926 NR Description: putative cysteine proteinase
  misc_feature (1)..(84): Homolog of NCBI NO: 7435799 NR Description: cysteine proteinase (EC 3.4.22.-) - barley
MGAVTGVKDQGACGCCWAFSAVAAVEGLNKIRTGRLVSLSEQELVDCDVSGVDQGCDGGLMDNAFQFVARRGGLASESGYPYQGRGRALPLVRRRRRVHPGPRGRAAQQRGRARGRRGQPARVRGHQRRGHGVPLLRQRRAGRGLRHGPQPRHHGRRVRHGERRHKVLADEELLGRVVGRGRIRPHPPRRPWGGRLRSRQAAVLPGLEARPSGSEHRSRPPT

SEQ ID NO: 16298 - DNA, 1474 bp, Zea mays subsp. mays
  misc_feature (1)..(1474): Ceres Seq. ID no. 12353165
  misc_feature: MA Experiment ID: 20000477 Result: Down-regulated in Transcription
  misc_feature: MA Experiment 20000477 PARAMETER Experiment Name: Zm_5mM_SA_P Parameter: Age (day) Value: 10
  misc_feature: MA Experiment 20000477 PARAMETER Experiment Name: Zm_5mM_SA_P Parameter: Organism Value: Zea mays
  misc_feature: MA Experiment 20000477 PARAMETER Experiment Name: Zm_5mM_SA_P Parameter: Plant Line Value: 35A19
  misc_feature: MA Experiment 20000477 PARAMETER Experiment Name: Zm_5mM_SA_P Parameter: Timepoint (hr) Value: 48
  misc_feature: MA Experiment 20000477 PARAMETER Experiment Name: Zm_5mM_SA_P Parameter: Tissue Value: Aerial
  misc_feature: MA Experiment 20000477 PARAMETER Experiment Name: Zm_5mM_SA_P Parameter: Treatment Value: 5mM SA vs. No Treatment
  misc_feature: MA Experiment ID: 20000488 Result: Up-regulated in Transcription
  misc_feature: MA Experiment 20000488 PARAMETER Experiment Name: Zm_50mM_NH4NO3_L_to_H_P Parameter: Organism Value: Zea mays
  misc_feature: MA Experiment 20000488 PARAMETER Experiment Name: Zm_50mM_NH4NO3_L_to_H_P Parameter: Timepoint (hr) Value: 8
  misc_feature: MA Experiment 20000488 PARAMETER Experiment Name: Zm_50mM_NH4NO3_L_to_H_P Parameter: Tissue Value: Leaves
  misc_feature: MA Experiment 20000488 PARAMETER Experiment Name: Zm_50mM_NH4NO3_L_to_H_P Parameter: Treatment Value: 50mM NH4NO3 vs. 100mM Mannitol
aacctttgttcttagcttcgaagctgtctgcatcctcgttcagatgactatttgatttctcagtattttatgtagtgtaactgttacagcactagcccacgaaggcaatcagaacaattgccaagagccccatgtttgctcgtgatccaaggcatcttcaatttgaagctgatgtgaatcgtttgtttctctatacaagctattatcgtctcggggagaatgctgacgagaaggacgctgaggagattattgacttggctagcaaagcttctattgctgatcagcagaaacaagtgcaggataatgttcattatgaacttacgcatatgtgccaagcaatggatagcattttatgtcctgatacaataaacgacccatcaaaaggaccttcagaagcacataatcattctcagcgtagtggcttaagttttgccgttggtggtgctgcatctgcaaacaagcaaagtgcaattatccctgctacacgacctttaactcgagcagaattgtcaaagaaattcagggatcattttgggtacacacttgacatcggaccatctggaattcctcataaagacgcaggtcaaggtttattcttatcaggacaagcaaatgccggtgctgtcctagccatctatcctggtgttatatattcacctgcttactatcgatatatacctggatacccaagaattgatgtttgcaacaactatctaatcacaagatatgatgggacaataattgatgcaaaaccatggtgttttggtggtgaaacaagagcattatgggatggttcagatttggtggattacaatgctatggcacctaaaggctcagagaacaactctgatcgggtgtggagaatgctaagcaagcctctagaaaaaggtgtaagggaaaattttggtgaagtgcttgaacgacgaaatccccttgcttttggtcattttgcaaatcatccacccaaaggttcaagtcctaatgtcatgatctgcccatacgattttcctttgacagagaaggacatgagagtatacatccctaacattacgtttggtggtcaagagaccattaggatgaagaggtttggctccttctatttcaagtctggaggttctgataatcaggctggtgattctctagtactgaagacgctagtgctggtgagcacaaggtccatatgtgatgaagagctctttcttaattaccgttacagtaactcaaaaagacgaccagagtggtacagccctgtcgatgaagaagaggataagaggagatggagctagtttagcacttctgtatcattctggttgtgcatttttttggctaacttttttagttctttcccccctggaaattgcaactgagcattggtaagctcctgagatcgagatgacagttttgacttaattcgtcatttggtattacatactttggtgtcccaattaccatcatgataaaagttaagctactc

SEQ ID NO: 16299 - protein, 384 aa, Zea mays subsp. mays
  peptide (1)..(384): Ceres Seq. ID no. 12353166
  misc_feature (1)..(309): Homolog of NCBI NO: 11358190 NR Description: hypothetical protein T22D6.210 - Arabidopsis
  misc_feature (1)..(376): Homolog of NCBI NO: 26453064 NR Description: unknown protein [Arabidopsis thaliana]
  misc_feature (1)..(376): Homolog of NCBI NO: 15241572 NR Description: hypothetical protein (fragment at BAC end)
  misc_feature (1)..(384): Homolog of NCBI NO: 22327005 NR Description: unknown protein
  misc_feature (1)..(384): Homolog of NCBI NO: 10177809 NR Description: gene_id:MKD15.6~unknown protein [Arabidopsis
MFARDPRHLQFEADVNRLFLYTSYYRLGENADEKDAEEIIDLASKASIADQQKQVQDNVHYELTHMCQAMDSILCPDTINDPSKGPSEAHNHSQRSGLSFAVGGAASANKQSAIIPATRPLTRAELSKKFRDHFGYTLDIGPSGIPHKDAGQGLFLSGQANAGAVLAIYPGVIYSPAYYRYIPGYPRIDVCNNYLITRYDGTIIDAKPWCFGGETRALWDGSDLVDYNAMAPKGSENNSDRVWRMLSKPLEKGVRENFGEVLERRNPLAFGHFANHPPKGSSPNVMICPYDFPLTEKDMRVYIPNITFGGQETIRMKRFGSFYFKSGGSDNQAGDSLVLKTLVLVSTRSICDEELFLNYRYSNSKRRPEWYSPVDEEEDKRRWS

SEQ ID NO: 16300 - protein, 319 aa, Zea mays subsp. mays
  peptide (1)..(319): Ceres Seq. ID no. 12353167
  misc_feature (1)..(244): Homolog of NCBI NO: 11358190 NR Description: hypothetical protein T22D6.210 - Arabidopsis
  misc_feature (1)..(311): Homolog of NCBI NO: 26453064 NR Description: unknown protein [Arabidopsis thaliana]
  misc_feature (1)..(311): Homolog of NCBI NO: 15241572 NR Description: hypothetical protein (fragment at BAC end)
  misc_feature (1)..(319): Homolog of NCBI NO: 22327005 NR Description: unknown protein
  misc_feature (1)..(319): Homolog of NCBI NO: 10177809 NR Description: gene_id:MKD15.6~unknown protein [Arabidopsis
MCQAMDSILCPDTINDPSKGPSEAHNHSQRSGLSFAVGGAASANKQSAIIPATRPLTRAELSKKFRDHFGYTLDIGPSGIPHKDAGQGLFLSGQANAGAVLAIYPGVIYSPAYYRYIPGYPRIDVCNNYLITRYDGTIIDAKPWCFGGETRALWDGSDLVDYNAMAPKGSENNSDRVWRMLSKPLEKGVRENFGEVLERRNPLAFGHFANHPPKGSSPNVMICPYDFPLTEKDMRVYIPNITFGGQETIRMKRFGSFYFKSGGSDNQAGDSLVLKTLVLVSTRSICDEELFLNYRYSNSKRRPEWYSPVDEEEDKRRWS

SEQ ID NO: 16301 - protein, 315 aa, Zea mays subsp. mays
  peptide (1)..(315): Ceres Seq. ID no. 12353168
  misc_feature (1)..(240): Homolog of NCBI NO: 11358190 NR Description: hypothetical protein T22D6.210 - Arabidopsis
  misc_feature (1)..(307): Homolog of NCBI NO: 26453064 NR Description: unknown protein [Arabidopsis thaliana]
  misc_feature (1)..(307): Homolog of NCBI NO: 15241572 NR Description: hypothetical protein (fragment at BAC end)
  misc_feature (1)..(315): Homolog of NCBI NO: 22327005 NR Description: unknown protein
  misc_feature (1)..(315): Homolog of NCBI NO: 10177809 NR Description: gene_id:MKD15.6~unknown protein [Arabidopsis
MDSILCPDTINDPSKGPSEAHNHSQRSGLSFAVGGAASANKQSAIIPATRPLTRAELSKKFRDHFGYTLDIGPSGIPHKDAGQGLFLSGQANAGAVLAIYPGVIYSPAYYRYIPGYPRIDVCNNYLITRYDGTIIDAKPWCFGGETRALWDGSDLVDYNAMAPKGSENNSDRVWRMLSKPLEKGVRENFGEVLERRNPLAFGHFANHPPKGSSPNVMICPYDFPLTEKDMRVYIPNITFGGQETIRMKRFGSFYFKSGGSDNQAGDSLVLKTLVLVSTRSICDEELFLNYRYSNSKRRPEWYSPVDEEEDKRRWS

SEQ ID NO: 16302 - DNA, 1681 bp, Zea mays subsp. mays
  misc_feature (1)..(1681): Ceres Seq. ID no. 12353169
  misc_feature: MA Experiment ID: 108527 Result: Down-regulated in Transcription
  misc_feature: MA Experiment 108527 PARAMETER Experiment Name: Zm_5mM_NO_P Parameter: Age (day) Value: 8
  misc_feature: MA Experiment 108527 PARAMETER Experiment Name: Zm_5mM_NO_P Parameter: Organism Value: Zea mays
  misc_feature: MA Experiment 108527 PARAMETER Experiment Name: Zm_5mM_NO_P Parameter: Plant Line Value: 35A19
  misc_feature: MA Experiment 108527 PARAMETER Experiment Name: Zm_5mM_NO_P Parameter: Timepoint (hr) Value: 6
  misc_feature: MA Experiment 108527 PARAMETER Experiment Name: Zm_5mM_NO_P Parameter: Tissue Value: Aerial
  misc_feature: MA Experiment 108527 PARAMETER Experiment Name: Zm_5mM_NO_P Parameter: Treatment Value: 5mM NO vs. No Treatment
  misc_feature: MA Experiment ID: 108528 Result: Up-regulated in Transcription
  misc_feature: MA Experiment 108528 PARAMETER Experiment Name: Zm_Imbibed_Seeds_P Parameter: Age (day) Value: 5 vs. 2
  misc_feature: MA Experiment 108528 PARAMETER Experiment Name: Zm_Imbibed_Seeds_P Parameter: Organism Value: Zea mays
  misc_feature: MA Experiment 108528 PARAMETER Experiment Name: Zm_Imbibed_Seeds_P Parameter: Plant Line Value: 35A19
  misc_feature: MA Experiment 108528 PARAMETER Experiment Name: Zm_Imbibed_Seeds_P Parameter: Tissue Value: Aerial vs. Embryo
  misc_feature: MA Experiment ID: 108530 Result: Up-regulated in Transcription
  misc_feature: MA Experiment 108530 PARAMETER Experiment Name: Zm_Imbibed_Seeds_P Parameter: Age (day) Value: 6 vs. 2
  misc_feature: MA Experiment 108530 PARAMETER Experiment Name: Zm_Imbibed_Seeds_P Parameter: Organism Value: Zea mays
  misc_feature: MA Experiment 108530 PARAMETER Experiment Name: Zm_Imbibed_Seeds_P Parameter: Plant Line Value: 35A19
  misc_feature: MA Experiment 108530 PARAMETER Experiment Name: Zm_Imbibed_Seeds_P Parameter: Tissue Value: Aerial vs. Embryo
  misc_feature: MA Experiment ID: 108547 Result: Up-regulated in Transcription
  misc_feature: MA Experiment 108547 PARAMETER Experiment Name: Zm_Imbibed_Seeds_P Parameter: Age (day) Value: 4 vs. 2
  misc_feature: MA Experiment 108547 PARAMETER Experiment Name: Zm_Imbibed_Seeds_P Parameter: Organism Value: Zea mays
  misc_feature: MA Experiment 108547 PARAMETER Experiment Name: Zm_Imbibed_Seeds_P Parameter: Plant Line Value: 35A19
  misc_feature: MA Experiment 108547 PARAMETER Experiment Name: Zm_Imbibed_Seeds_P Parameter: Tissue Value: Aerial vs. Embryo
  misc_feature: MA Experiment ID: 20000480 Result: Down-regulated in Transcription
  misc_feature: MA Experiment 20000480 PARAMETER Experiment Name: Zm_Drought_P Parameter: Age (day) Value: 11
  misc_feature: MA Experiment 20000480 PARAMETER Experiment Name: Zm_Drought_P Parameter: Organism Value: Zea mays
  misc_feature: MA Experiment 20000480 PARAMETER Experiment Name: Zm_Drought_P Parameter: Plant Line Value: 35A19
  misc_feature: MA Experiment 20000480 PARAMETER Experiment Name: Zm_Drought_P Parameter: Timepoint (hr) Value: 72
  misc_feature: MA Experiment 20000480 PARAMETER Experiment Name: Zm_Drought_P Parameter: Tissue Value: Aerial
  misc_feature: MA Experiment 20000480 PARAMETER Experiment Name: Zm_Drought_P Parameter: Treatment Value: Drought vs. No Drought
  misc_feature: MA Experiment ID: 20000487 Result: Up-regulated in Transcription
  misc_feature: MA Experiment 20000487 PARAMETER Experiment Name: Zm_50mM_NH4NO3_L_to_H_P Parameter: Organism Value: Zea mays
  misc_feature: MA Experiment 20000487 PARAMETER Experiment Name: Zm_50mM_NH4NO3_L_to_H_P Parameter: Timepoint (hr) Value: 4
  misc_feature: MA Experiment 20000487 PARAMETER Experiment Name: Zm_50mM_NH4NO3_L_to_H_P Parameter: Tissue Value: Leaves
  misc_feature: MA Experiment 20000487 PARAMETER Experiment Name: Zm_50mM_NH4NO3_L_to_H_P Parameter: Treatment Value: 50mM NH4NO3 vs. 100mM Mannitol
  misc_feature: MA Experiment ID: 20000626 Result: Down-regulated in Transcription
  misc_feature: MA Experiment 20000626 PARAMETER Experiment Name: Zm_Herbicide-Treatments_P Parameter: Timepoint (hr) Value: 12
  misc_feature: MA Experiment 20000626 PARAMETER Experiment Name: Zm_Herbicide-Treatments_P Parameter: Tissue Value: Aerial
  misc_feature: MA Experiment 20000626 PARAMETER Experiment Name: Zm_Herbicide-Treatments_P Parameter: Treatment Value: Roundup vs. No Treatment
aaaccccgtcccaacccccactacggccttccccccatggctcccctggcctcccttcctctcccgcccagtactgccgtcaccgctcgcttcctcgccgcccccgccatccgcgtgatcagcccatcgcggcccgcgctgccgctcctctcatccgcctccgcaggcggcttccctcacgcctctcgcgctccctgcagtgccgcccgcgagcaccgccgcggcaccgtgcgggaatgctctcgagctgatgctgctggagcagctccattatcaaagacactgttagacctcaaggattcctgctggagatttttaaggccacatacaatccgaggaactgctttaggatccatagcattggttgcgagagccttgatagagaattcccatctgataaactggtggttgatattcaaagcattctatggacttggggcattgatatttggcaatggttacatagttgggattaatcagatctatgatgttgctattgacaagataaacaagccatatttacccattgctgctggtgatctctcaattcagtcagcatggttgttggtgatattatttgcagctgcaggtttttcaattgttatatcaaactttggacctttcattacctctctatactgccttggcctatttcttggcactatatattctgttcctccattcagactgaagagatatccggttgctgcttttcttatcattgcaacggttcgtggtttccttctcaactttggcgtgtactatgctactagggctgcactaggtcttacattccaatggagctcccctgttgctttcattacatgcttcgtgacactatttgctttggtcattgctataaccaaagatctccctgatgttgaaggagatcgcaagtatcaaatatcaactttggcaacaaagcttggtgtcagaaatattgcattccttggatctggtttattattagcaaactatattgctgctattgctgtagcttttaccatgcctcaggctttcaggtgcactgtaatggttcctgtgcatgctgtccttgctggtggtttaattttccagacatgggttctggagcaagcgaagtacagaaaggatgctatttcgcagtactatcggttcatctggaatctcttctatgctgaatatatcttcttcccgttaatatagagagatcttgtagttcatcttgatcttgggctacagcctaattcatggtgaaaagagggagaagttggcaaagtgaggtctgtcgtgcatattttcaacggaaacaatggagtagcaatattgctatgctagggttctgaagttgtaggagcttttctaagcttttacgatgttgaaggcgttgttggagctgtggaagctgttttccttttttttccttttgtatcaacagtgtcgcgttctgtacggtcttacttggaagtgctttgacctttgagcacatgggttgaagcttgagatctggtcccgaacaggtggcggtggaacggccaagacaagcttgtttcatgccactcgaggtcgaggctaaaccactacggcgtgctcttccatgaaacgcagaaaactagggaaatgactatatatatggtgcaatacgttgtatattttctgagtttcagctcgtatatatagtaggaacctcaacttttacctc

SEQ ID NO: 16303 - protein, 394 aa, Zea mays subsp. mays
  peptide (1)..(394): Ceres Seq. ID no. 12353170
  misc_feature (112)..(357): Pfam Name: UbiA prenyltransferase family Pfam Description: UbiA prenyltransferase family
  misc_feature (93)..(394): Homolog of NCBI NO: 30680535 NR Description: tocopherol polyprenyltransferase (homogentisate
  misc_feature (103)..(393): Homolog of NCBI NO: 37519852 NR Description: unknown protein [Gloeobacter violaceus]
  misc_feature (103)..(393): Homolog of NCBI NO: 17230940 NR Description: hypothetical protein [Nostoc sp. PCC 7120]
  misc_feature (103)..(393): Homolog of NCBI NO: 16330366 NR Description: unknown protein [Synechocystis sp. PCC 6803]
  misc_feature (274)..(393): Homolog of NCBI NO: 23039416 NR Description: hypothetical protein [Trichodesmium erythraeum
  misc_feature (101)..(254): Homolog of NCBI NO: 23039416 NR Description: hypothetical protein [Trichodesmium erythraeum
  misc_feature (103)..(393): Homolog of NCBI NO: 23125851 NR Description: hypothetical protein [Nostoc punctiforme]
  misc_feature (10)..(370): Homolog of NCBI NO: 10998133 NR Description: dbj|BAA17774.1~gene_id:MEC18.5~similar to unknown
  misc_feature (87)..(394): Homolog of NCBI NO: 30681973 NR Description: UbiA prenyltransferase family [Arabidopsis
  misc_feature (13)..(394): Homolog of NCBI NO: 34393498 NR Description: putative tocopherol polyprenyltransferase
KPRPNPHYGLPPMAPLASLPLPPSTAVTARFLAAPAIRVISPSRPALPLLSSASAGGFPHASRAPCSAAREHRRGTVRECSRADAAGAAPLSKTLLDLKDSCWRFLRPHTIRGTALGSIALVARALIENSHLINWWLIFKAFYGLGALIFGNGYIVGINQIYDVAIDKINKPYLPIAAGDLSIQSAWLLVILFAAAGFSIVISNFGPFITSLYCLGLFLGTIYSVPPFRLKRYPVAAFLIIATVRGFLLNFGVYYATRAALGLTFQWSSPVAFITCFVTLFALVIAITKDLPDVEGDRKYQISTLATKLGVRNIAFLGSGLLLANYIAAIAVAFTMPQAFRCTVMVPVHAVLAGGLIFQTWVLEQAKYRKDAISQYYRFIWNLFYAEYIFFPLI

SEQ ID NO: 16304 - protein, 382 aa, Zea mays subsp. mays; identical to SEQ ID NO: 11986
  peptide (1)..(382): Ceres Seq. ID no. 12353171
  misc_feature (100)..(345): Pfam Name: UbiA prenyltransferase family Pfam Description: UbiA prenyltransferase family
  misc_feature (81)..(382): Homolog of NCBI NO: 30680535 NR Description: tocopherol polyprenyltransferase (homogentisate
  misc_feature (91)..(381): Homolog of NCBI NO: 37519852 NR Description: unknown protein [Gloeobacter violaceus]
  misc_feature (91)..(381): Homolog of NCBI NO: 17230940 NR Description: hypothetical protein [Nostoc sp. PCC 7120]
  misc_feature (91)..(381): Homolog of NCBI NO: 16330366 NR Description: unknown protein [Synechocystis sp. PCC 6803]
  misc_feature (262)..(381): Homolog of NCBI NO: 23039416 NR Description: hypothetical protein [Trichodesmium erythraeum
  misc_feature (89)..(242): Homolog of NCBI NO: 23039416 NR Description: hypothetical protein [Trichodesmium erythraeum
  misc_feature (91)..(381): Homolog of NCBI NO: 23125851 NR Description: hypothetical protein [Nostoc punctiforme]
  misc_feature (1)..(358): Homolog of NCBI NO: 10998133 NR Description: dbj|BAA17774.1~gene_id:MEC18.5~similar to unknown
  misc_feature (75)..(382): Homolog of NCBI NO: 30681973 NR Description: UbiA prenyltransferase family [Arabidopsis
  misc_feature (1)..(382): Homolog of NCBI NO: 34393498 NR Description: putative tocopherol polyprenyltransferase

SEQ ID NO: 16305 - DNA, 1539 bp, Zea mays subsp. mays
  misc_feature (1)..(1539): Ceres Seq. ID no. 12352768
  misc_feature: MA Experiment ID: 108523 Result: Down-regulated in Transcription
  misc_feature: MA Experiment 108523 PARAMETER Experiment Name: Zm_42deg_Heat_P Parameter: Age (day) Value: 8
  misc_feature: MA Experiment 108523 PARAMETER Experiment Name: Zm_42deg_Heat_P Parameter: Organism Value: Zea mays
  misc_feature: MA Experiment 108523 PARAMETER Experiment Name: Zm_42deg_Heat_P Parameter: Plant Line Value: 35A19
  misc_feature: MA Experiment 108523 PARAMETER Experiment Name: Zm_42deg_Heat_P Parameter: Temperature (deg C) Value: 42 vs. 22
  misc_feature: MA Experiment 108523 PARAMETER Experiment Name: Zm_42deg_Heat_P Parameter: Timepoint (hr) Value: 6
  misc_feature: MA Experiment 108523 PARAMETER Experiment Name: Zm_42deg_Heat_P Parameter: Tissue Value: Aerial
  misc_feature: MA Experiment ID: 108528 Result: Down-regulated in Transcription
  misc_feature: MA Experiment 108528 PARAMETER Experiment Name: Zm_Imbibed_Seeds_P Parameter: Age (day) Value: 5 vs. 2
  misc_feature: MA Experiment 108528 PARAMETER Experiment Name: Zm_Imbibed_Seeds_P Parameter: Organism Value: Zea mays
  misc_feature: MA Experiment 108528 PARAMETER Experiment Name: Zm_Imbibed_Seeds_P Parameter: Plant Line Value: 35A19
  misc_feature: MA Experiment 108528 PARAMETER Experiment Name: Zm_Imbibed_Seeds_P Parameter: Tissue Value: Aerial vs. Embryo
  misc_feature: MA Experiment ID: 108535 Result: Up-regulated in Transcription
  misc_feature: MA Experiment 108535 PARAMETER Experiment Name: Zm_Meristem_P Parameter: Age (day) Value: 8
  misc_feature: MA Experiment 108535 PARAMETER Experiment Name: Zm_Meristem_P Parameter: Organism Value: Zea mays
  misc_feature: MA Experiment 108535 PARAMETER Experiment Name: Zm_Meristem_P Parameter: Plant Line Value: 35A19
  misc_feature: MA Experiment 108535 PARAMETER Experiment Name: Zm_Meristem_P Parameter: Tissue Value: Root Meristem vs. Above Root Meristem
  misc_feature: MA Experiment ID: 108543 Result: Up-regulated in Transcription
  misc_feature: MA Experiment ID: 108547 Result: Down-regulated in Transcription
  misc_feature: MA Experiment 108547 PARAMETER Experiment Name: Zm_Imbibed_Seeds_P Parameter: Age (day) Value: 4 vs. 2
  misc_feature: MA Experiment 108547 PARAMETER Experiment Name: Zm_Imbibed_Seeds_P Parameter: Organism Value: Zea mays
  misc_feature: MA Experiment 108547 PARAMETER Experiment Name: Zm_Imbibed_Seeds_P Parameter: Plant Line Value: 35A19
  misc_feature: MA Experiment 108547 PARAMETER Experiment Name: Zm_Imbibed_Seeds_P Parameter: Tissue Value: Aerial vs. Embryo
  misc_feature: MA Experiment ID: 108556 Result: Up-regulated in Transcription
  misc_feature: MA Experiment 108556 PARAMETER Experiment Name: Zm_Drought_P Parameter: Age (day) Value: 9
  misc_feature: MA Experiment 108556 PARAMETER Experiment Name: Zm_Drought_P Parameter: Organism Value: Zea mays
  misc_feature: MA Experiment 108556 PARAMETER Experiment Name: Zm_Drought_P Parameter: Plant Line Value: 35A19
  misc_feature: MA Experiment 108556 PARAMETER Experiment Name: Zm_Drought_P Parameter: Timepoint (hr) Value: 24
  misc_feature: MA Experiment 108556 PARAMETER Experiment Name: Zm_Drought_P Parameter: Tissue Value: Aerial
  misc_feature: MA Experiment 108556 PARAMETER Experiment Name: Zm_Drought_P Parameter: Treatment Value: Drought vs. No Drought
  misc_feature: MA Experiment ID: 108559 Result: Down-regulated in Transcription
  misc_feature: MA Experiment 108559 PARAMETER Experiment Name: Zm_5mM_NO_P Parameter: Age (day) Value: 8
  misc_feature: MA Experiment 108559 PARAMETER Experiment Name: Zm_5mM_NO_P Parameter: Organism Value: Zea mays
  misc_feature: MA Experiment 108559 PARAMETER Experiment Name: Zm_5mM_NO_P Parameter: Plant Line Value: 35A19
  misc_feature: MA Experiment 108559 PARAMETER Experiment Name: Zm_5mM_NO_P Parameter: Timepoint (hr) Value: 12
  misc_feature: MA Experiment 108559 PARAMETER Experiment Name: Zm_5mM_NO_P Parameter: Tissue Value: Aerial
  misc_feature: MA Experiment 108559 PARAMETER Experiment Name: Zm_5mM_NO_P Parameter: Treatment Value: 5mM NO vs. No Treatment
  misc_feature: MA Experiment ID: 108687 Result: Down-regulated in Transcription
  misc_feature: MA Experiment 108687 PARAMETER Experiment Name: Zm_Embryos-Flowers__P Parameter: Tissue Value: Embryo vs. Aerial+
  misc_feature: MA Experiment ID: 20000108 Result: Up-regulated in Transcription
  misc_feature: MA Experiment 20000108 PARAMETER Experiment Name: Zm_Root-Tips_P Parameter: Age (day) Value: 12
  misc_feature: MA Experiment 20000108 PARAMETER Experiment Name: Zm_Root-Tips_P Parameter: Organism Value: Zea mays
  misc_feature: MA Experiment 20000108 PARAMETER Experiment Name: Zm_Root-Tips_P Parameter: Tissue Value: Root tips vs. Root mid region    35
  misc_feature: MA Experiment 20000108 PARAMETER Experiment Name: Zm_Root-Tips_P Parameter: Tissue Value: Root tips vs. Root mid region   Sequence Listing-Misc Features (4)
  misc_feature: MA Experiment ID: 20000477 Result: Down-regulated in Transcription
  misc_feature: MA Experiment 20000477 PARAMETER Experiment Name: Zm_5mM_SA_P Parameter: Age (day) Value: 10
  misc_feature: MA Experiment 20000477 PARAMETER Experiment Name: Zm_5mM_SA_P Parameter: Organism Value: Zea mays
  misc_feature: MA Experiment 20000477 PARAMETER Experiment Name: Zm_5mM_SA_P Parameter: Plant Line Value: 35A19
  misc_feature: MA Experiment 20000477 PARAMETER Experiment Name: Zm_5mM_SA_P Parameter: Timepoint (hr) Value: 48
  misc_feature: MA Experiment 20000477 PARAMETER Experiment Name: Zm_5mM_SA_P Parameter: Tissue Value: Aerial
  misc_feature: MA Experiment 20000477 PARAMETER Experiment Name: Zm_5mM_SA_P Parameter: Treatment Value: 5mM SA vs. No Treatment
  misc_feature: MA Experiment ID: 20000492 Result: Down-regulated in Transcription
  misc_feature: MA Experiment 20000492 PARAMETER Experiment Name: Zm_Hybrid_Seed_Dev_P Parameter: DAP Value: 12
  misc_feature: MA Experiment 20000492 PARAMETER Experiment Name: Zm_Hybrid_Seed_Dev_P Parameter: Organism Value: Zea mays
  misc_feature: MA Experiment 20000492 PARAMETER Experiment Name: Zm_Hybrid_Seed_Dev_P Parameter: Plant Line Value: 35A19
  misc_feature: MA Experiment 20000492 PARAMETER Experiment Name: Zm_Hybrid_Seed_Dev_P Parameter: Tissue Value: Fert Kernel vs. Unfert Floret
ataccggatgtgcagcgcagggtcaacttcgtcaggtttcttggctccaacaaccttcctgggtcactctaaattgtaaagagatggggtgtggcccatcgatccccgacaagtacacgataggtgggaaggggcgcaagcgccggagcgtcatacaggaggttgccgtgttcgtgcccaccatccgcatcccagtggcctctgacatagctcatccactcaggggaatagtttccaaggatcttgtcgaccgactctccacactccgtgcccatgtcgcctcgctggctgaagaaatctatcacgcggacgtatcagctgttcaggaactgcagcatgcgttagaggagtacttgccagttgttcttggtttaacaacgaaatagagccgtcttgaatcgtcagtacagttcagatggaagaccttagacgacgaccaggagtgttgtctggcgagcgcgtggtatgaggtgctctcggtggtccacatgatggccatgcttgcgttgtttcaggctaacctattgctcatcccaaagagcagccaaggtggtggtgaaaggaaggtagcagaagacgcaaagaaggatgtcgtcgattcgttgctccgggcgtcgggatgcttagactactccgtgcatcgcatacttgttcagatacctgcgcaagtcaagaagagttttcccagttacttgcaggagggcatgcttgaggccatctcaattcaggcattggctcagtgtgtggaaatacagcttggcttggcttctgaatgtgagaaggcaacgctgtcagtaaagaggaggctagcttgtgagcaagtcagctatttttctcaggctcactattgtctgtcgggatgcgatacaagtgactcgtacgggaagaagcttctgctgttcctcaagtggaagtggatggaggccaaggctgtagcgtattactaccatggtctggtgctcgacaagggcggcgaaccggcaaaccatatcagtgcagtctgctgcctctctgcagctgatgacctgctctcagacagcaaaagggcttgcttgagtttttgcttggcaaatcctgtcacgagggtgcctcctccttggggtgtcatgaaaaacatgcacaaaaagatcccagatgtcgcttacaagaagttccaagcgcacgggcatctgtttgagcaaaacaagaacagcgcactccaatccgttcctgacctaccagagtttgcgctgtcgctgagaccggatggatacgagttgccaatcactgattcgatctgggagaatgttgatggccaacctcagattcagagcctcaaggagcatatgatagatgacgaagatgaagtaggcacaaaatgatagttctcacttccaaatgcttcttttcattgtaccaccaaaagtagcagagttcaaaaacgcttaatccaaaatgttttggattcagcaaatggctcaactgaaaaaggaatcgcgatctctgtattattgcaagtattaccatatggtatagtaaagtcttatgtgtaatagaatc

SEQ ID NO: 16306 - protein, 290 aa, Zea mays subsp. mays
  peptide (1)..(290): Ceres Seq. ID no. 12352769
  misc_feature (1)..(262): Homolog of NCBI NO: 15220908 NR Description: hypothetical protein; protein id: At1g17940.1
  misc_feature (1)..(262): Homolog of NCBI NO: 25372891 NR Description: protein F2H15.16 [imported] - Arabidopsis
  misc_feature (1)..(264): Homolog of NCBI NO: 15219459 NR Description: hypothetical protein
  misc_feature (1)..(270): Homolog of NCBI NO: 38344447 NR Description: OSJNBa0038O10.19 [Oryza sativa (japonica
  misc_feature (1)..(263): Homolog of NCBI NO: 30684716 NR Description: expressed protein [Arabidopsis thaliana]
MMAMLALFQANLLLIPKSSQGGGERKVAEDAKKDVVDSLLRASGCLDYSVHRILVQIPAQVKKSFPSYLQEGMLEAISIQALAQCVEIQLGLASECEKATLSVKRRLACEQVSYFSQAHYCLSGCDTSDSYGKKLLLFLKWKWMEAKAVAYYYHGLVLDKGGEPANHISAVCCLSAADDLLSDSKRACLSFCLANPVTRVPPPWGVMKNMHKKIPDVAYKKFQAHGHLFEQNKNSALQSVPDLPEFALSLRPDGYELPITDSIWENVDGQPQIQSLKEHMIDDEDEVGTK

SEQ ID NO: 16307 - protein, 289 aa, Zea mays subsp. mays
  peptide (1)..(289): Ceres Seq. ID no. 12352770
  misc_feature (1)..(261): Homolog of NCBI NO: 15220908 NR Description: hypothetical protein; protein id: At1g17940.1
  misc_feature (1)..(261): Homolog of NCBI NO: 25372891 NR Description: protein F2H15.16 [imported] - Arabidopsis
  misc_feature (1)..(263): Homolog of NCBI NO: 15219459 NR Description: hypothetical protein
  misc_feature (1)..(269): Homolog of NCBI NO: 38344447 NR Description: OSJNBa0038O10.19 [Oryza sativa (japonica
  misc_feature (1)..(262): Homolog of NCBI NO: 30684716 NR Description: expressed protein [Arabidopsis thaliana]
MAMLALFQANLLLIPKSSQGGGERKVAEDAKKDVVDSLLRASGCLDYSVHRILVQIPAQVKKSFPSYLQEGMLEAISIQALAQCVEIQLGLASECEKATLSVKRRLACEQVSYFSQAHYCLSGCDTSDSYGKKLLLFLKWKWMEAKAVAYYYHGLVLDKGGEPANHISAVCCLSAADDLLSDSKRACLSFCLANPVTRVPPPWGVMKNMHKKIPDVAYKKFQAHGHLFEQNKNSALQSVPDLPEFALSLRPDGYELPITDSIWENVDGQPQIQSLKEHMIDDEDEVGTK

SEQ ID NO: 16308 - protein, 287 aa, Zea mays subsp. mays
  peptide (1)..(287): Ceres Seq. ID no. 12352771
  misc_feature (1)..(259): Homolog of NCBI NO: 15220908 NR Description: hypothetical protein; protein id: At1g17940.1
  misc_feature (1)..(259): Homolog of NCBI NO: 25372891 NR Description: protein F2H15.16 [imported] - Arabidopsis
  misc_feature (1)..(261): Homolog of NCBI NO: 15219459 NR Description: hypothetical protein
  misc_feature (1)..(267): Homolog of NCBI NO: 38344447 NR Description: OSJNBa0038O10.19 [Oryza sativa (japonica
  misc_feature (1)..(260): Homolog of NCBI NO: 30684716 NR Description: expressed protein [Arabidopsis thaliana]
MLALFQANLLLIPKSSQGGGERKVAEDAKKDVVDSLLRASGCLDYSVHRILVQIPAQVKKSFPSYLQEGMLEAISIQALAQCVEIQLGLASECEKATLSVKRRLACEQVSYFSQAHYCLSGCDTSDSYGKKLLLFLKWKWMEAKAVAYYYHGLVLDKGGEPANHISAVCCLSAADDLLSDSKRACLSFCLANPVTRVPPPWGVMKNMHKKIPDVAYKKFQAHGHLFEQNKNSALQSVPDLPEFALSLRPDGYELPITDSIWENVDGQPQIQSLKEHMIDDEDEVGTK

SEQ ID NO: 16309 - DNA, 1761 bp, Zea mays subsp. mays
  misc_feature (1)..(1761): Ceres Seq. ID no. 12362401
  misc_feature: MA Experiment ID: 108535 Result: Down-regulated in Transcription
  misc_feature: MA Experiment 108535 PARAMETER Experiment Name: Zm_Meristem_P Parameter: Age (day) Value: 8
  misc_feature: MA Experiment 108535 PARAMETER Experiment Name: Zm_Meristem_P Parameter: Organism Value: Zea mays
  misc_feature: MA Experiment 108535 PARAMETER Experiment Name: Zm_Meristem_P Parameter: Plant Line Value: 35A19
  misc_feature: MA Experiment 108535 PARAMETER Experiment Name: Zm_Meristem_P Parameter: Tissue Value: Root Meristem vs. Above Root Meristem
  misc_feature: MA Experiment ID: 108543 Result: Up-regulated in Transcription
  misc_feature: MA Experiment ID: 108545 Result: Down-regulated in Transcription
  misc_feature: MA Experiment 108545 PARAMETER Experiment Name: Zm_Imbibed_Seeds_P Parameter: Age (day) Value: 3 vs. 2
  misc_feature: MA Experiment 108545 PARAMETER Experiment Name: Zm_Imbibed_Seeds_P Parameter: Organism Value: Zea mays
  misc_feature: MA Experiment 108545 PARAMETER Experiment Name: Zm_Imbibed_Seeds_P Parameter: Plant Line Value: 35A19
  misc_feature: MA Experiment 108545 PARAMETER Experiment Name: Zm_Imbibed_Seeds_P Parameter: Tissue Value: Aerial vs. Embryo
  misc_feature: MA Experiment ID: 108688 Result: Down-regulated in Transcription
  misc_feature: MA Experiment 108688 PARAMETER Experiment Name: Zm_Embryos-Flowers__P Parameter: Tissue Value: Immature Flowers vs. Aerial+
  misc_feature: MA Experiment ID: 108689 Result: Down-regulated in Transcription
  misc_feature: MA Experiment 108689 PARAMETER Experiment Name: Zm_Drought_Roots_P Parameter: Age (day) Value: 9
  misc_feature: MA Experiment 108689 PARAMETER Experiment Name: Zm_Drought_Roots_P Parameter: Organism Value: Zea mays
  misc_feature: MA Experiment 108689 PARAMETER Experiment Name: Zm_Drought_Roots_P Parameter: Plant Line Value: 35A19
  misc_feature: MA Experiment 108689 PARAMETER Experiment Name: Zm_Drought_Roots_P Parameter: Timepoint (hr) Value: 24
  misc_feature: MA Experiment 108689 PARAMETER Experiment Name: Zm_Drought_Roots_P Parameter: Tissue Value: Roots
  misc_feature: MA Experiment 108689 PARAMETER Experiment Name: Zm_Drought_Roots_P Parameter: Treatment Value: Drought vs. No Drought
  misc_feature: MA Experiment ID: 20000480 Result: Down-regulated in Transcription
  misc_feature: MA Experiment 20000480 PARAMETER Experiment Name: Zm_Drought_P Parameter: Age (day) Value: 11
  misc_feature: MA Experiment 20000480 PARAMETER Experiment Name: Zm_Drought_P Parameter: Organism Value: Zea mays
  misc_feature: MA Experiment 20000480 PARAMETER Experiment Name: Zm_Drought_P Parameter: Plant Line Value: 35A19
  misc_feature: MA Experiment 20000480 PARAMETER Experiment Name: Zm_Drought_P Parameter: Timepoint (hr) Value: 72
  misc_feature: MA Experiment 20000480 PARAMETER Experiment Name: Zm_Drought_P Parameter: Tissue Value: Aerial
  misc_feature: MA Experiment 20000480 PARAMETER Experiment Name: Zm_Drought_P Parameter: Treatment Value: Drought vs. No Drought
  misc_feature: MA Experiment ID: 20000492 Result: Down-regulated in Transcription
  misc_feature: MA Experiment 20000492 PARAMETER Experiment Name: Zm_Hybrid_Seed_Dev_P Parameter: DAP Value: 12
  misc_feature: MA Experiment 20000492 PARAMETER Experiment Name: Zm_Hybrid_Seed_Dev_P Parameter: Organism Value: Zea mays
  misc_feature: MA Experiment 20000492 PARAMETER Experiment Name: Zm_Hybrid_Seed_Dev_P Parameter: Plant Line Value: 35A19
  misc_feature: MA Experiment 20000492 PARAMETER Experiment Name: Zm_Hybrid_Seed_Dev_P Parameter: Tissue Value: Fert Kernel vs. Unfert Floret
  misc_feature: MA Experiment ID: 20000535 Result: Down-regulated in Transcription
  misc_feature: MA Experiment 20000535 PARAMETER Experiment Name: Zm_Hybrid_Seed_Dev_P Parameter: DAP Value: 30 vs. 12
  misc_feature: MA Experiment 20000535 PARAMETER Experiment Name: Zm_Hybrid_Seed_Dev_P Parameter: Organism Value: Zea mays
  misc_feature: MA Experiment 20000535 PARAMETER Experiment Name: Zm_Hybrid_Seed_Dev_P Parameter: Plant Line Value: 35A19
  misc_feature: MA Experiment 20000535 PARAMETER Experiment Name: Zm_Hybrid_Seed_Dev_P Parameter: Tissue Value: Embryo vs. Unfert Floret
gcgtcgcttccagatccagcgggcggaggagggggtgcggtgcggccgtgaccatgaagcagccgaggggccggcaggagccgcgccgggtgggcaacgccgccatggtcgtcaccatggtcgtctccctctgcgtcctcacgtacatcaaggcgcgatactgctccaaccctttccccaaggcggtggcggaggtggaggtggacgaggactacgacagcacgcggtacaagctgacgggccccgtgggcgaggaggacttcgacccgtcccgccccacctgctacaacaccagcaagcggtcggagcggtgcgccgccgtgggcgacatccgcgtggacggcaaccactcgcggatctacatcagcccgctgtcccgcgagtggcggaccaagccgtacgcgcggcggcacgacgccgtggccatggacgacgtgcgcgagttcacgctggtccccttcggcggccccaacgacacggccgtgccgccgctctgcacgcgcacccactccgtcccgggcttcctcttctccagcggcgggttcgcgggcaacctgtaccacgactacgccgacgtgctggtgccgctcttcgccagcaccaaccacctgggcggggaggtccagttcctgctggccgacatcaaggactggtgggccgacaagttccgcccggtcttccgccagctctcccgctacgacgtcatcgacgtgaacaacgaccgcgaggtgcactgcttcccgcggaccatcatcggctccaccttccaccgcgccatgggcatcgacccctcgcgctcgcccggcggcgtcacggtggccgacttcaagcgcctgctccgccgcgcgttccggctggagcgcgccgtcgcgtcgcggtcgggggcgccccggcgccgggaccggccccgcctcctcatcatctcgcgcaagagctcgcgccgcttcgtcaacgagcgcgccatggcgcgcgccgcggcggccgcccggttcgacgtgcggatcgccgagcccgacaaccacacggacatgcccaacttcgcgaggctggtgaactcggcggacgtgatgatgggcgtgcacggcgccgggctcaccaacatggtgttcctgcccagccgcgccgtgctggtgcaggtggtgccgttcggcgggctggagtggctcacccgcgtcaccttcaaggaccccgcaagggacatggacgtcacgtacatggagtacaacgtgtcgctggaggagagctcgctcagggacctctacccggaggaccacttctacctgaagcacccctacgacgtgcacaagaaggggtgggacgccatcaagacggtgtacctggacaagcagaacgtcaggctcaacctcactaggttcaccaggacgctggagcaggcgcgagatctcttgccgacgccatgactgatgatgaccccccctctttcctctgctctgctgcaggtttcattcacttcagatcagctgctcacctcacttcacgccgtgtctctcttttttttttctgttgttgttctatacatatacttgtttcctcttctcctttcccctctctctctagtctctccctctccactcttgtggcggcaagattcatttctttcattgttttgtttttttgttgttgttgaggaaggataggaacaaaaacaaggtattgtcgtgtccaaggttaatctacacaaacacacactgtaaatgatcgattgattgctgtcagtagaggcgaacacaaggaataggt

SEQ ID NO: 16310 - protein, 472 aa, Zea mays subsp. mays
  peptide (1)..(472): Ceres Seq. ID no. 12362402
  misc_feature (91)..(471): Homolog of NCBI NO: 34895336 NR Description: P0494A10.22 [Oryza sativa (japonica
  misc_feature (24)..(469): Homolog of NCBI NO: 15229594 NR Description: hypothetical protein; protein id: At3g18180.1
  misc_feature (64)..(469): Homolog of NCBI NO: 34895342 NR Description: P0494A10.25 [Oryza sativa (japonica
  misc_feature (91)..(469): Homolog of NCBI NO: 30684813 NR Description: expressed protein [Arabidopsis thaliana]
  misc_feature (91)..(469): Homolog of NCBI NO: 9294073 NR Description: emb|CAB68144.1~gene_id:MRC8.17~similar to unknown
  misc_feature (90)..(469): Homolog of NCBI NO: 34896984 NR Description: unknown protein [Oryza sativa]
  misc_feature (59)..(465): Homolog of NCBI NO: 31296712 NR Description: HGA1 [Hordeum vulgare]
  misc_feature (60)..(469): Homolog of NCBI NO: 34895346 NR Description: P0494A10.27 [Oryza sativa (japonica
  misc_feature (91)..(465): Homolog of NCBI NO: 34895350 NR Description: P0494A10.29 [Oryza sativa (japonica
  misc_feature (90)..(470): Homolog of NCBI NO: 37535628 NR Description: unknown protein [Oryza sativa (japonica
VASRSSGRRRGCGAAVTMKQPRGRQEPRRVGNAAMVVTMVVSLCVLTYIKARYCSNPFPKAVAEVEVDEDYDSTRYKLTGPVGEEDFDPSRPTCYNTSKRSERCAAVGDIRVDGNHSRIYISPLSREWRTKPYARRHDAVAMDDVREFTLVPFGGPNDTAVPPLCTRTHSVPGFLFSSGGFAGNLYHDYADVLVPLFASTNHLGGEVQFLLADIKDWWADKFRPVFRQLSRYDVIDVNNDREVHCFPRTIIGSTFHRAMGIDPSRSPGGVTVADFKRLLRRAFRLERAVASRSGAPRRRDRPRLLIISRKSSRRFVNERAMARAAAAARFDVRIAEPDNHTDMPNFARLVNSADVMMGVHGAGLTNMVFLPSRAVLVQVVPFGGLEWLTRVTFKDPARDMDVTYMEYNVSLEESSLRDLYPEDHFYLKHPYDVHKKGWDAIKTVYLDKQNVRLNLTRFTRTLEQARDLLPTP

SEQ ID NO: 16311 - protein, 456 aa, Zea mays subsp. mays
  peptide (1)..(456): Ceres Seq. ID no. 12362403
  misc_feature (25)..(456): Homolog of NCBI NO: 34495553 NR Description: conserved hypothetical protein
RRFQIQRAEEGVRCGRDHEAAEGPAGAAPGGQRRHGRHHGRLPLRPHVHQGAILLQPFPQGGGGGGGGRGLRQHAVQADGPRGRGGLRPVPPHLLQHQQAVGAVRRRGRHPRGRQPLADLHQPAVPRVADQAVRAAARRRGHGRRARVHAGPLRRPQRHGRAAALHAHPLRPGLPLLQRRVRGQPVPRLRRRAGAALRQHQPPGRGGPVPAGRHQGLVGRQVPPGLPPALPLRRHRREQRPRGALLPADHHRLHLPPRHGHRPLALARRRHGGRLQAPAPPRVPAGARRRVAVGGAPAPGPAPPPHHLAQELAPLRQRARHGARRGGRPVRRADRRARQPHGHAQLREAGELGGRDDGRARRRAHQHGVPAQPRRAGAGGAVRRAGVAHPRHLQGPRKGHGRHVHGVQRVAGGELAQGPLPGGPLLPEAPLRRAQEGVGRHQDGVPGQAERQAQPH

SEQ ID NO: 16312 - protein, 455 aa, Zea mays subsp. mays
  peptide (1)..(455): Ceres Seq. ID no. 12362404
  misc_feature (74)..(448): Homolog of NCBI NO: 34895350 NR Description: P0494A10.29 [Oryza sativa (japonica
  misc_feature (73)..(453): Homolog of NCBI NO: 37535628 NR Description: unknown protein [Oryza sativa (japonica
  misc_feature (74)..(454): Homolog of NCBI NO: 34895336 NR Description: P0494A10.22 [Oryza sativa (japonica
  misc_feature (7)..(452): Homolog of NCBI NO: 15229594 NR Description: hypothetical protein; protein id: At3g18180.1
  misc_feature (47)..(452): Homolog of NCBI NO: 34895342 NR Description: P0494A10.25 [Oryza sativa (japonica
  misc_feature (74)..(452): Homolog of NCBI NO: 30684813 NR Description: expressed protein [Arabidopsis thaliana]
  misc_feature (74)..(452): Homolog of NCBI NO: 9294073 NR Description: emb|CAB68144.1~gene_id:MRC8.17~similar to unknown
  misc_feature (73)..(452): Homolog of NCBI NO: 34896984 NR Description: unknown protein [Oryza sativa]
  misc_feature (42)..(448): Homolog of NCBI NO: 31296712 NR Description: HGA1 [Hordeum vulgare]
  misc_feature (43)..(452): Homolog of NCBI NO: 34895346 NR Description: P0494A10.27 [Oryza sativa (japonica
MKQPRGRQEPRRVGNAAMVVTMVVSLCVLTYIKARYCSNPFPKAVAEVEVDEDYDSTRYKLTGPVGEEDFDPSRPTCYNTSKRSERCAAVGDIRVDGNHSRIYISPLSREWRTKPYARRHDAVAMDDVREFTLVPFGGPNDTAVPPLCTRTHSVPGFLFSSGGFAGNLYHDYADVLVPLFASTNHLGGEVQFLLADIKDWWADKFRPVFRQLSRYDVIDVNNDREVHCFPRTIIGSTFHRAMGIDPSRSPGGVTVADFKRLLRRAFRLERAVASRSGAPRRRDRPRLLIISRKSSRRFVNERAMARAAAAARFDVRIAEPDNHTDMPNFARLVNSADVMMGVHGAGLTNMVFLPSRAVLVQVVPFGGLEWLTRVTFKDPARDMDVTYMEYNVSLEESSLRDLYPEDHFYLKHPYDVHKKGWDAIKTVYLDKQNVRLNLTRFTRTLEQARDLLPTP

SEQ ID NO: 16313 - DNA, 1314 bp, Zea mays subsp. mays
  misc_feature (1)..(1314): Ceres Seq. ID no. 12358866
  misc_feature: MA Experiment ID: 108687 Result: Up-regulated in Transcription
  misc_feature: MA Experiment 108687 PARAMETER Experiment Name: Zm_Embryos-Flowers__P Parameter: Tissue Value: Embryo vs. Aerial+
  misc_feature: MA Experiment ID: 20000535 Result: Down-regulated in Transcription
  misc_feature: MA Experiment 20000535 PARAMETER Experiment Name: Zm_Hybrid_Seed_Dev_P Parameter: DAP Value: 30 vs. 12
  misc_feature: MA Experiment 20000535 PARAMETER Experiment Name: Zm_Hybrid_Seed_Dev_P Parameter: Organism Value: Zea mays
  misc_feature: MA Experiment 20000535 PARAMETER Experiment Name: Zm_Hybrid_Seed_Dev_P Parameter: Plant Line Value: 35A19
  misc_feature: MA Experiment 20000535 PARAMETER Experiment Name: Zm_Hybrid_Seed_Dev_P Parameter: Tissue Value: Embryo vs. Unfert Floret
acctcacacaaacacataccgaatccagccccgcacccaccgttgcgcccgccgcccgagtcgccgtggccaccgcggcagcgccctcccggcggtgagcgcggcccagcgcgcgcgccgcggccaccgccgcgctcgaggcgcccagatctgggccctagcaccccctccctcctataggcctttccccgctgcatcgccatggcgcggcgactgctgtggtggacagcgctgctcctcccttccctcctcgccggcgttggtcccgccgccgccgccgccgccgcatccccgccccacgatgcgtgcctggtgcctaccatcgcggaatccgtccttaggactcccgacacgtgctcgacgctggatcgccgccttggcgacccggtcggcgtcatcgagggagatgaggtgacgttggcaagggcagttaatcttctacacgcaaacaaggatgactacattgccgtacttttctatgcctcgtggtgcccattctcacaggaatgcaaaccgaattttgagacactggcttacttattcccagctatccggcattttgcatttgaggaatctgcaattaggccaagcataatttcgagatacggcatccatggtttcccaacactctttctcttgaactcgaccatgagagtacgatatcatggaccaaggactgttaaatcacttgcagctttctacactgatgtctcaggtatcaatgcatcggtgaagtcaactgcaggggaggccatggtacatcccttggatgatattgagcataaaaaggacgctgaacaggaaaattgcccattctggtgggctcggtcaccagagaatatacttcagcaggatacttatctagcattggcgaccgtatttgtaattttgaggttgctgtatcgtatttttccaaagatagattcctttaccagatgggcatggaggaggcacaatatgtttgcaaaattgatgggagcacatgaatatttcctcacctaccttgagcaagcaagacagaagtttcataggctatacccttcaagttcaaagcgaggaaatctgcaggagggcgcaatgaacgctaccgcttgggcttccaaatcattagcatcagtttcaattggagaaccaagtgcaattggaaggacaaactctacaagtgagctaagatgaaatctgatcttttttgtccccagggattatatgtacagtacagtagagcgatcaggatatgaacacccagaaactgttgtaacggctatattactctttgtatcctccttagaataaatacatccatgatttggctcc

SEQ ID NO: 16314 - protein, 324 aa, Zea mays subsp. mays
  peptide (1)..(324): Ceres Seq. ID no. 12358867
  misc_feature (62)..(313): Homolog of NCBI NO: 21536613 NR Description: contains similarity to protein disulfide
  misc_feature (62)..(313): Homolog of NCBI NO: 18418521 NR Description: putative protein
  misc_feature (62)..(313): Homolog of NCBI NO: 9758894 NR Description: contains similarity to protein disulfide
  misc_feature (9)..(313): Homolog of NCBI NO: 30103009 NR Description: unknown protein [Oryza sativa (japonica
  misc_feature (62)..(313): Homolog of NCBI NO: 6006856 NR Description: unknown protein [Arabidopsis thaliana]
  misc_feature (62)..(313): Homolog of NCBI NO: 18396691 NR Description: expressed protein
  misc_feature (62)..(171): Homolog of NCBI NO: 15236643 NR Description: putative protein disulfide isomerase; protein id:
  misc_feature (198)..(322): Homolog of NCBI NO: 15236643 NR Description: putative protein disulfide isomerase; protein id:
  misc_feature (36)..(322): Homolog of NCBI NO: 18399435 NR Description: expressed protein
  misc_feature (1)..(324): Homolog of NCBI NO: 29367467 NR Description: disulfide isomerase-like protein
MARRLLWWTALLLPSLLAGVGPAAAAAAASPPHDACLVPTIAESVLRTPDTCSTLDRRLGDPVGVIEGDEVTLARAVNLLHANKDDYIAVLFYASWCPFSQECKPNFETLAYLFPAIRHFAFEESAIRPSIISRYGIHGFPTLFLLNSTMRVRYHGPRTVKSLAAFYTDVSGINASVKSTAGEAMVHPLDDIEHKKDAEQENCPFWWARSPENILQQDTYLALATVFVILRLLYRIFPKIDSFTRWAWRRHNMFAKLMGAHEYFLTYLEQARQKFHRLYPSSSKRGNLQEGAMNATAWASKSLASVSIGEPSAIGRTNSTSELR

SEQ ID NO: 16315 - protein, 175 aa, Zea mays subsp. mays
  peptide (1)..(175): Ceres Seq. ID no. 12358868
  misc_feature (1)..(164): Homolog of NCBI NO: 21536613 NR Description: contains similarity to protein disulfide
  misc_feature (1)..(164): Homolog of NCBI NO: 18418521 NR Description: putative protein
  misc_feature (1)..(164): Homolog of NCBI NO: 9758894 NR Description: contains similarity to protein disulfide
  misc_feature (1)..(164): Homolog of NCBI NO: 30103009 NR Description: unknown protein [Oryza sativa (japonica
  misc_feature (1)..(164): Homolog of NCBI NO: 6006856 NR Description: unknown protein [Arabidopsis thaliana]
  misc_feature (1)..(164): Homolog of NCBI NO: 18396691 NR Description: expressed protein
  misc_feature (1)..(22): Homolog of NCBI NO: 15236643 NR Description: putative protein disulfide isomerase; protein id:
  misc_feature (49)..(173): Homolog of NCBI NO: 15236643 NR Description: putative protein disulfide isomerase; protein id:
  misc_feature (1)..(173): Homolog of NCBI NO: 18399435 NR Description: expressed protein
  misc_feature (1)..(175): Homolog of NCBI NO: 29367467 NR Description: disulfide isomerase-like protein
MRVRYHGPRTVKSLAAFYTDVSGINASVKSTAGEAMVHPLDDIEHKKDAEQENCPFWWARSPENILQQDTYLALATVFVILRLLYRIFPKIDSFTRWAWRRHNMFAKLMGAHEYFLTYLEQARQKFHRLYPSSSKRGNLQEGAMNATAWASKSLASVSIGEPSAIGRTNSTSELR

SEQ ID NO: 16316 - DNA, 1637 bp, Zea mays subsp. mays
  misc_feature (1)..(1637): Ceres Seq. ID no. 12349722
  misc_feature: MA Experiment ID: 20000492 Result: Down-regulated in Transcription
  misc_feature: MA Experiment 20000492 PARAMETER Experiment Name: Zm_Hybrid_Seed_Dev_P Parameter: DAP Value: 12
  misc_feature: MA Experiment 20000492 PARAMETER Experiment Name: Zm_Hybrid_Seed_Dev_P Parameter: Organism Value: Zea mays
  misc_feature: MA Experiment 20000492 PARAMETER Experiment Name: Zm_Hybrid_Seed_Dev_P Parameter: Plant Line Value: 35A19
  misc_feature: MA Experiment 20000492 PARAMETER Experiment Name: Zm_Hybrid_Seed_Dev_P Parameter: Tissue Value: Fert Kernel vs. Unfert Floret
  misc_feature: MA Experiment ID: 20000535 Result: Down-regulated in Transcription
  misc_feature: MA Experiment 20000535 PARAMETER Experiment Name: Zm_Hybrid_Seed_Dev_P Parameter: DAP Value: 30 vs. 12
  misc_feature: MA Experiment 20000535 PARAMETER Experiment Name: Zm_Hybrid_Seed_Dev_P Parameter: Organism Value: Zea mays
  misc_feature: MA Experiment 20000535 PARAMETER Experiment Name: Zm_Hybrid_Seed_Dev_P Parameter: Plant Line Value: 35A19
  misc_feature: MA Experiment 20000535 PARAMETER Experiment Name: Zm_Hybrid_Seed_Dev_P Parameter: Tissue Value: Embryo vs. Unfert Floret
aaggtcaccaaccacgcacccgcctccgcctgcccgctctcccgccatgaagcagctccacaagtcttcccctacccacgcgccatcgccggcgcacgcaccggctcccaaggccgccaagccggcgcgccctgggccgcgctcctggatcggctacgtcctccgcgagcagcgcctcctcttcgtcctgctcggtgcgctcatcgcctccaccttcttcctcctccggccctacctctcgctctccccgtcttcccacctccccgacgcccgcccgctcttctccttcgccacccgctccggtgttcccgccggcttccgcccgccgcagcgccgcgtcgtcgtaacaggcggggcagggttcgtcggcagccatctcgtcgaccggcttctggagcagggggacagcgtgatcgtggtcgacaacttcttcaccggcaggaaggagaacgtcgcgcaccacctccggaaccccaggttcgagctgctccgccacgatgtagtcgagccaatcctcctcgaggtggaccggatctaccacctcgcgtgccccgcgtcgcctgtgcactacaagtacaacccaatcaagacgatcaagacaaatgtcatgggaactttgaatatgttgggtctggcgaagcgaattggtgcaaggtttttgttgactagcacaagtgaagtttatggtgatccgcttgagcatccacagaaggagtcatactgggggcacgttaatcctataggtgttaggagctgttacgatgaggggaagagaacagcagagactttaactatggactatcatcgtggtggtggtgttgaggtgcgtattgcccgtattttcaatacatatggtcctcgtatgtgcctcgacgatggtcgtgtggtcagcaattttgttgcacaggcactgcgaaggcaaccgatgacagtctatggtgacggaaaacaaactcgaagtttccaatatgttgctgatctggttgctggactgatggctctaatggagagtgatcatattggtcctttcaacttgggaaacccaggagagtttaccatgttggagctagcacaggttgtgaaggaaacaattgacccaatggcaaccattgaattcaaacccaacacagctgatgatccccatatgagaaagccagatatcaccaaggctaagcaactgctacattgggagccaaaggtctctctcaaagaaggccttccgctaatggttcaagatttccgtcaaaggatctcggatgagtaatcaaagcaattcttttttccccgaatgtgccatgcacgtgtttgtaatcagagcaatcgtatgatactggtgaccggtttgattctgaacgatgctgcaactacagtcaggagctcttcaccaactggaggcctggagccctgcagtacgatgtactgtgtacacaacagactgtagaatcacgcaggccccatttggagtgtggggattccatagtatttctacgacatagtactatttctgtgaaatagctgaaaagttcatgggttcgtgtcgatgttttatatatatatcttggtgaggcagaacagaagcaatcaattgttttttgtgcatgtgtgaaattcctgaattgtgggtggtgagagatagg

SEQ ID NO: 16317 - protein, 420 aa, Zea mays subsp. mays
  peptide (1)..(420): Ceres Seq. ID no. 12349723
  misc_feature (113)..(417): Pfam Name: NAD dependent epimerase/dehydratase family Pfam Description: NAD dependent epimerase/dehydratase family
  misc_feature (15)..(118): Homolog of NCBI NO: 2129578 NR Description: dTDP-glucose 4-6-dehydratase homolog D18 -
  misc_feature (97)..(417): Homolog of NCBI NO: 15229334 NR Description: dTDP-glucose 4-6-dehydratase homolog D18; protein
  misc_feature (97)..(417): Homolog of NCBI NO: 2129578 NR Description: dTDP-glucose 4-6-dehydratase homolog D18 -
  misc_feature (16)..(120): Homolog of NCBI NO: 11270116 NR Description: dTDP-glucose 4-6-dehydratase-like protein -
  misc_feature (99)..(420): Homolog of NCBI NO: 11270116 NR Description: dTDP-glucose 4-6-dehydratase-like protein -
  misc_feature (16)..(120): Homolog of NCBI NO: 17473549 NR Description: dTDP-glucose 4-6-dehydratase-like protein
  misc_feature (99)..(420): Homolog of NCBI NO: 17473549 NR Description: dTDP-glucose 4-6-dehydratase-like protein
  misc_feature (16)..(158): Homolog of NCBI NO: 34908082 NR Description: P0506B12.30 [Oryza sativa (japonica
  misc_feature (200)..(420): Homolog of NCBI NO: 34908082 NR Description: P0506B12.30 [Oryza sativa (japonica
  misc_feature (16)..(420): Homolog of NCBI NO: 25396402 NR Description: UDP-glucuronic acid decarboxylase
RSPTTHPPPPARSPAMKQLHKSSPTHAPSPAHAPAPKAAKPARPGPRSWIGYVLREQRLLFVLLGALIASTFFLLRPYLSLSPSSHLPDARPLFSFATRSGVPAGFRPPQRRVVVTGGAGFVGSHLVDRLLEQGDSVIVVDNFFTGRKENVAHHLRNPRFELLRHDVVEPILLEVDRIYHLACPASPVHYKYNPIKTIKTNVMGTLNMLGLAKRIGARFLLTSTSEVYGDPLEHPQKESYWGHVNPIGVRSCYDEGKRTAETLTMDYHRGGGVEVRIARIFNTYGPRMCLDDGRVVSNFVAQALRRQPMTVYGDGKQTRSFQYVADLVAGLMALMESDHIGPFNLGNPGEFTMLELAQVVKETIDPMATIEFKPNTADDPHMRKPDITKAKQLLHWEPKVSLKEGLPLMVQDFRQRISDE

SEQ ID NO: 16318 - protein, 405 aa, Zea mays subsp. mays
  peptide (1)..(405): Ceres Seq. ID no. 12349724
  misc_feature (98)..(402): Pfam Name: NAD dependent epimerase/dehydratase family Pfam Description: NAD dependent epimerase/dehydratase family
  misc_feature (1)..(103): Homolog of NCBI NO: 2129578 NR Description: dTDP-glucose 4-6-dehydratase homolog D18 -
  misc_feature (82)..(402): Homolog of NCBI NO: 15229334 NR Description: dTDP-glucose 4-6-dehydratase homolog D18; protein
  misc_feature (82)..(402): Homolog of NCBI NO: 2129578 NR Description: dTDP-glucose 4-6-dehydratase homolog D18 -
  misc_feature (1)..(105): Homolog of NCBI NO: 11270116 NR Description: dTDP-glucose 4-6-dehydratase-like protein -
  misc_feature (84)..(405): Homolog of NCBI NO: 11270116 NR Description: dTDP-glucose 4-6-dehydratase-like protein -
  misc_feature (1)..(105): Homolog of NCBI NO: 17473549 NR Description: dTDP-glucose 4-6-dehydratase-like protein
  misc_feature (84)..(405): Homolog of NCBI NO: 17473549 NR Description: dTDP-glucose 4-6-dehydratase-like protein
  misc_feature (1)..(143): Homolog of NCBI NO: 34908082 NR Description: P0506B12.30 [Oryza sativa (japonica
  misc_feature (185)..(405): Homolog of NCBI NO: 34908082 NR Description: P0506B12.30 [Oryza sativa (japonica
  misc_feature (1)..(405): Homolog of NCBI NO: 25396402 NR Description: UDP-glucuronic acid decarboxylase
MKQLHKSSPTHAPSPAHAPAPKAAKPARPGPRSWIGYVLREQRLLFVLLGALIASTFFLLRPYLSLSPSSHLPDARPLFSFATRSGVPAGFRPPQRRVVVTGGAGFVGSHLVDRLLEQGDSVIVVDNFFTGRKENVAHHLRNPRFELLRHDVVEPILLEVDRIYHLACPASPVHYKYNPIKTIKTNVMGTLNMLGLAKRIGARFLLTSTSEVYGDPLEHPQKESYWGHVNPIGVRSCYDEGKRTAETLTMDYHRGGGVEVRIARIFNTYGPRMCLDDGRVVSNFVAQALRRQPMTVYGDGKQTRSFQYVADLVAGLMALMESDHIGPFNLGNPGEFTMLELAQVVKETIDPMATIEFKPNTADDPHMRKPDITKAKQLLHWEPKVSLKEGLPLMVQDFRQRISDE

SEQ ID NO: 16319 - protein, 222 aa, Zea mays subsp. mays
  peptide (1)..(222): Ceres Seq. ID no. 12349725
  misc_feature (7)..(190): Homolog of NCBI NO: 29788822 NR Description: hypothetical protein [Oryza sativa (japonica
KVTNHAPASACPLSRHEAAPQVFPYPRAIAGARTGSQGRQAGAPWAALLDRLRPPRAAPPLRPARCAHRLHLLPPPALPLALPVFPPPRRPPALLLRHPLRCSRRLPPAAAPRRRNRRGRVRRQPSRRPASGAGGQRDRGRQLLHRQEGERRAPPPEPQVRAAPPRCSRANPPRGGPDLPPRVPRVACALQVQPNQDDQDKCHGNFEYVGSGEANWCKVFVD

SEQ ID NO: 16320 - DNA, 1614 bp, Zea mays subsp. mays
  misc_feature (1)..(1614): Ceres Seq. ID no. 12354523
  misc_feature: MA Experiment ID: 108687 Result: Up-regulated in Transcription
  misc_feature: MA Experiment 108687 PARAMETER Experiment Name: Zm_Embryos-Flowers__P Parameter: Tissue Value: Embryo vs. Aerial+
  misc_feature: MA Experiment ID: 20000477 Result: Down-regulated in Transcription
  misc_feature: MA Experiment 20000477 PARAMETER Experiment Name: Zm_5mM_SA_P Parameter: Age (day) Value: 10
  misc_feature: MA Experiment 20000477 PARAMETER Experiment Name: Zm_5mM_SA_P Parameter: Organism Value: Zea mays
  misc_feature: MA Experiment 20000477 PARAMETER Experiment Name: Zm_5mM_SA_P Parameter: Plant Line Value: 35A19
  misc_feature: MA Experiment 20000477 PARAMETER Experiment Name: Zm_5mM_SA_P Parameter: Timepoint (hr) Value: 48
  misc_feature: MA Experiment 20000477 PARAMETER Experiment Name: Zm_5mM_SA_P Parameter: Tissue Value: Aerial
  misc_feature: MA Experiment 20000477 PARAMETER Experiment Name: Zm_5mM_SA_P Parameter: Treatment Value: 5mM SA vs. No Treatment
ctcgcaactcgcgattcccaaatcccgatgcgccctcgcgcctagcccctccgccgccgccgccgccaacatcaccttccctgtcacgggacgggccccccccctccaccgcgtcctatgacgtcgccgacctcgcaccacccggactcctccaccccgcacgcggggatcggcaacggcaacggcggcaaccaccacctccacccgccgtctctgaccccggccgctccccccgcgcaggcgcacgggggcccacaggtgcgtctcatgtgcagcttcggcggccgcatcctgccgcgcccgggggaccgccagctgcgctacgtcggcggggagacccgcatcgtgtccttcccgcgcgccgcggcctccttcgccgccctcgtcgccgcgctcgccaaggccgcgcccgcgctcttcgcgcccggaacgcccaggccgtccctcaagtaccagctgccccaggacgacctcgactccctcatctccgtcacctccgacgacgacgtcgaccacctcgtcgacgagctcgaccgcatccacgatctctccgccaacgtcgcccggccgccacgcctccgcgtcttcctcttcgcgcccgcgcccgcgcccgacgccgccttcggctccgtcctctccggcaccgccggcgacgccgcccccagcgaccagtggttcgtcgacgcgctcaacgcccccgcgcctcaccccatcgagcgcgtccgatccgagtcctcctcgatcgtctccgacgtccccgactacctcttcagcctcgacagcccgtccgacgaccccggccccggcccctcgccggctcgcgccaagtccgacgccgcggagactccgcaccaccacggcgacgacgtgccgccttccgctcgacagataccgcacgtcgcaggaggagcgtcatcgtggcccgccccgccgccgccgtacatggcacagcctatgtactacttccccgtgccgccaccggtccactacctcgaccagtctgcgcagagtggctacatgcctcgcccgatctaccacattgtcggtggcggaggaagcgaggcgcctggcggagatcttcacgcggccggcggagtctacggcgtctcgcaccacatgcaggggttcccgccgatgatgtacgcgccgccgcgcgcggtcatctacaactacaagtcggaggggatgccatcgctgcctccggaaggtggggcacactcttcctaggcgcatcggctacttcacatctctgaatcctgattattgttgcagatgcctaagctaaggagttttgcgtggtaatttttttatcgattcgtctaagtcttgttcgttgttttgtatagatggaggggttgatggtgatggatagatattaatgcagctttcgtctagtggaaatatattcgtgaaatgtatatcatactaaatagtatagtatttggtgtgattaattagtattctagttaatgtaatgtgggattcatataatctaggtggttctggtcttatagaaaccatttttgggcattttatatttacataaactggatgttgggtgaatgttctaagcagtatgtgctgtgttgaacctcaatcacttatgagtggttt

SEQ ID NO: 16321 - protein, 416 aa, Zea mays subsp. mays
  peptide (1)..(416): Ceres Seq. ID no. 12354524
  misc_feature (7)..(104): Pfam Name: Extensin-like region Pfam Description: Extensin-like region
  misc_feature (6)..(104): Homolog of NCBI NO: 21322711 NR Description: pherophorin-dz1 protein [Volvox carteri f.
  misc_feature (8)..(330): Homolog of NCBI NO: 23018055 NR Description: hypothetical protein [Thermobifida fusca]
  misc_feature (6)..(104): Homolog of NCBI NO: 21322711 NR Description: pherophorin-dz1 protein [Volvox carteri f.
  misc_feature (6)..(104): Homolog of NCBI NO: 21322711 NR Description: pherophorin-dz1 protein [Volvox carteri f.
  misc_feature (6)..(104): Homolog of NCBI NO: 21322711 NR Description: pherophorin-dz1 protein [Volvox carteri f.
  misc_feature (6)..(104): Homolog of NCBI NO: 21322711 NR Description: pherophorin-dz1 protein [Volvox carteri f.
  misc_feature (6)..(104): Homolog of NCBI NO: 21322711 NR Description: pherophorin-dz1 protein [Volvox carteri f.
  misc_feature (7)..(104): Homolog of NCBI NO: 21322711 NR Description: pherophorin-dz1 protein [Volvox carteri f.
  misc_feature (6)..(104): Homolog of NCBI NO: 21322711 NR Description: pherophorin-dz1 protein [Volvox carteri f.
  misc_feature (6)..(104): Homolog of NCBI NO: 6523547 NR Description: hydroxyproline-rich glycoprotein DZ-HRGP
RNSRFPNPDAPSRLAPPPPPPPTSPSLSRDGPPPSTASYDVADLAPPGLLHPARGDRQRQRRQPPPPPAVSDPGRSPRAGARGPTGASHVQLRRPHPAAPGGPPAALRRRGDPHRVLPARRGLLRRPRRRARQGRARALRARNAQAVPQVPAAPGRPRLPHLRHLRRRRRPPRRRARPHPRSLRQRRPAATPPRLPLRARARARRRLRLRPLRHRRRRRPQRPVVRRRAQRPRASPHRARPIRVLLDRLRRPRLPLQPRQPVRRPRPRPLAGSRQVRRRGDSAPPRRRRAAFRSTDTARRRRSVIVARPAAAVHGTAYVLLPRAATGPLPRPVCAEWLHASPDLPHCRWRRKRGAWRRSSRGRRSLRRLAPHAGVPADDVRAAARGHLQLQVGGDAIAASGRWGTLFLGASATSHL

SEQ ID NO: 16322 - protein, 369 aa, Zea mays subsp. mays
  peptide (1)..(369): Ceres Seq. ID no. 12354525
  misc_feature (62)..(162): Pfam Name: PB1 domain Pfam Description: PB1 domain
  misc_feature (30)..(244): Homolog of NCBI NO: 15237703 NR Description: putative protein
  misc_feature (51)..(193): Homolog of NCBI NO: 25410886 NR Description: hypothetical protein At2g01190 [imported] -
  misc_feature (48)..(164): Homolog of NCBI NO: 15231568 NR Description: unknown protein; protein id: At3g26510.1
  misc_feature (48)..(164): Homolog of NCBI NO: 9293928 NR Description: gb|AAF04880.1~gene_id:MFE16.2~similar to unknown
  misc_feature (1)..(209): Homolog of NCBI NO: 15229599 NR Description: unknown protein; protein id: At3g18230.1
  misc_feature (1)..(193): Homolog of NCBI NO: 18379168 NR Description: expressed protein
  misc_feature (1)..(193): Homolog of NCBI NO: 21553908 NR Description: unknown [Arabidopsis thaliana]
  misc_feature (23)..(311): Homolog of NCBI NO: 34895646 NR Description: P0480E02.2 [Oryza sativa (japonica
  misc_feature (30)..(288): Homolog of NCBI NO: 25407315 NR Description: hypothetical protein AT4g05150 [imported] -
  misc_feature (30)..(288): Homolog of NCBI NO: 18412822 NR Description: putative protein
MTSPTSHHPDSSTPHAGIGNGNGGNHHLHPPSLTPAAPPAQAHGGPQVRLMCSFGGRILPRPGDRQLRYVGGETRIVSFPRAAASFAALVAALAKAAPALFAPGTPRPSLKYQLPQDDLDSLISVTSDDDVDHLVDELDRIHDLSANVARPPRLRVFLFAPAPAPDAAFGSVLSGTAGDAAPSDQWFVDALNAPAPHPIERVRSESSSIVSDVPDYLFSLDSPSDDPGPGPSPARAKSDAAETPHHHGDDVPPSARQIPHVAGGASSWPAPPPPYMAQPMYYFPVPPPVHYLDQSAQSGYMPRPIYHIVGGGGSEAPGGDLHAAGGVYGVSHHMQGFPPMMYAPPRAVIYNYKSEGMPSLPPEGGAHSS

SEQ ID NO: 16323 - protein, 319 aa, Zea mays subsp. mays
  peptide (1)..(319): Ceres Seq. ID no. 12354526
  misc_feature (12)..(112): Pfam Name: PB1 domain Pfam Description: PB1 domain
  misc_feature (1)..(194): Homolog of NCBI NO: 15237703 NR Description: putative protein
  misc_feature (1)..(143): Homolog of NCBI NO: 25410886 NR Description: hypothetical protein At2g01190 [imported] -
  misc_feature (1)..(114): Homolog of NCBI NO: 15231568 NR Description: unknown protein; protein id: At3g26510.1
  misc_feature (1)..(114): Homolog of NCBI NO: 9293928 NR Description: gb|AAF04880.1~gene_id:MFE16.2~similar to unknown
  misc_feature (1)..(159): Homolog of NCBI NO: 15229599 NR Description: unknown protein; protein id: At3g18230.1
  misc_feature (1)..(143): Homolog of NCBI NO: 18379168 NR Description: expressed protein
  misc_feature (1)..(143): Homolog of NCBI NO: 21553908 NR Description: unknown [Arabidopsis thaliana]
  misc_feature (1)..(261): Homolog of NCBI NO: 34895646 NR Description: P0480E02.2 [Oryza sativa (japonica
  misc_feature (1)..(238): Homolog of NCBI NO: 25407315 NR Description: hypothetical protein AT4g05150 [imported] -
  misc_feature (1)..(238): Homolog of NCBI NO: 18412822 NR Description: putative protein
MCSFGGRILPRPGDRQLRYVGGETRIVSFPRAAASFAALVAALAKAAPALFAPGTPRPSLKYQLPQDDLDSLISVTSDDDVDHLVDELDRIHDLSANVARPPRLRVFLFAPAPAPDAAFGSVLSGTAGDAAPSDQWFVDALNAPAPHPIERVRSESSSIVSDVPDYLFSLDSPSDDPGPGPSPARAKSDAAETPHHHGDDVPPSARQIPHVAGGASSWPAPPPPYMAQPMYYFPVPPPVHYLDQSAQSGYMPRPIYHIVGGGGSEAPGGDLHAAGGVYGVSHHMQGFPPMMYAPPRAVIYNYKSEGMPSLPPEGGAHSS

SEQ ID NO: 16324 - DNA, 1602 bp, Zea mays subsp. mays
  misc_feature (1)..(1602): Ceres Seq. ID no. 12381160
  misc_feature: MA Experiment ID: 108529 Result: Up-regulated in Transcription
  misc_feature: MA Experiment 108529 PARAMETER Experiment Name: Zm_Imbibed_Seeds_P Parameter: Age (day) Value: 5 vs. 2
  misc_feature: MA Experiment 108529 PARAMETER Experiment Name: Zm_Imbibed_Seeds_P Parameter: Organism Value: Zea mays
  misc_feature: MA Experiment 108529 PARAMETER Experiment Name: Zm_Imbibed_Seeds_P Parameter: Plant Line Value: 35A19
  misc_feature: MA Experiment 108529 PARAMETER Experiment Name: Zm_Imbibed_Seeds_P Parameter: Tissue Value: Roots vs. Embryo
  misc_feature: MA Experiment ID: 108535 Result: Down-regulated in Transcription
  misc_feature: MA Experiment 108535 PARAMETER Experiment Name: Zm_Meristem_P Parameter: Age (day) Value: 8
  misc_feature: MA Experiment 108535 PARAMETER Experiment Name: Zm_Meristem_P Parameter: Organism Value: Zea mays
  misc_feature: MA Experiment 108535 PARAMETER Experiment Name: Zm_Meristem_P Parameter: Plant Line Value: 35A19
  misc_feature: MA Experiment 108535 PARAMETER Experiment Name: Zm_Meristem_P Parameter: Tissue Value: Root Meristem vs. Above Root Meristem
  misc_feature: MA Experiment ID: 108546 Result: Up-regulated in Transcription
  misc_feature: MA Experiment 108546 PARAMETER Experiment Name: Zm_Imbibed_Seeds_P Parameter: Age (day) Value: 3 vs. 2
  misc_feature: MA Experiment 108546 PARAMETER Experiment Name: Zm_Imbibed_Seeds_P Parameter: Organism Value: Zea mays
  misc_feature: MA Experiment 108546 PARAMETER Experiment Name: Zm_Imbibed_Seeds_P Parameter: Plant Line Value: 35A19
  misc_feature: MA Experiment 108546 PARAMETER Experiment Name: Zm_Imbibed_Seeds_P Parameter: Tissue Value: Roots vs. Embryo
  misc_feature: MA Experiment ID: 108687 Result: Down-regulated in Transcription
  misc_feature: MA Experiment 108687 PARAMETER Experiment Name: Zm_Embryos-Flowers__P Parameter: Tissue Value: Embryo vs. Aerial+
  misc_feature: MA Experiment ID: 20000477 Result: Down-regulated in Transcription
  misc_feature: MA Experiment 20000477 PARAMETER Experiment Name: Zm_5mM_SA_P Parameter: Age (day) Value: 10
  misc_feature: MA Experiment 20000477 PARAMETER Experiment Name: Zm_5mM_SA_P Parameter: Organism Value: Zea mays
  misc_feature: MA Experiment 20000477 PARAMETER Experiment Name: Zm_5mM_SA_P Parameter: Plant Line Value: 35A19
  misc_feature: MA Experiment 20000477 PARAMETER Experiment Name: Zm_5mM_SA_P Parameter: Timepoint (hr) Value: 48
  misc_feature: MA Experiment 20000477 PARAMETER Experiment Name: Zm_5mM_SA_P Parameter: Tissue Value: Aerial
  misc_feature: MA Experiment 20000477 PARAMETER Experiment Name: Zm_5mM_SA_P Parameter: Treatment Value: 5mM SA vs. No Treatment
gcacgagaccattacctagaacatcctaatcgaaaagatactgatacacggctcagtggctcacccaagccaagaccaagaaccccgggcggacgaaaagatggccgccgatgccgcacgcacgccggcgccgcacgcgctgctgctcccttacccagcgcagggccacgtgatcccgttcatggagctggccgaccgcctcctcgacaggggcttcgccgtcaccttcgtcaacaccgagttcaaccaccgccgcgtcgtcgtggccgccgccggcggccgggcgcccgatggccggctncggctcgttggtgtcgctgacgggatgggcgacggcgaggaccgcgacaacttcgtccgcctcaacgcctgcatgaaggaggccatgccgctgcggctcgacgcgctcctcgacgccgacgacgagcgcctcggcagggtcacgtgcgtcgtggtcgacgtcggcatgtcctgggcgctggacgcggtcaagcggcgtgggctcccggccgccgcactctggcccgcgtcggcggccgtgctcgccgtcctgttcggcgccaagaagctcatacgcgatggcgtcatcgatgacgacggagctccagtgaagctggagaaccactcgttccggctggccgagtcgatgccccccatggacgccgtcttcctggcgtggaactacatgggcaaccgcgacgtcgagcgcatggtcttccactacctgaccaccactgcgtgggccgccgtggctaaggcggacgtcgtcctctgcaacaccttcgaggacctcgagccggacatcttcggcgcccactccccggcggccgcctccatcctcccgatcggcccgctgcgcacctggcagcgccggacgagcgaggcgccggccgggcacttttggcgcgccgacgacgaggcctgcgcgtccttcctggacgcgcagccccgtgggtccgtgacgtacgtggcgttcgggagcctgacggtcatgagccccgcgcagctccaggagctcgcgctggccctgctggcctccgcccgccccttcctgtgggtgttccggccagggctggcggccgagctcccgcccgcgttcacggatctcctgccacgccatgcgaggggcaaggtggtggagtgggcgccgcaggagaaagtgctcgcgcaccctgctgtcggctgcttcctgacgcattgcgggtggaactcgacgctggagggcgtccgccatggcgtgcctttgctttgttggccctactttagcgaccagttcacgaaccaggcatacatttgtgatatctggaaggtggggttaagggtggtgcccgacggtggtgatggcattgtcgccaaggaaaggatcatggagaggttgacgagcctaatgggtgacagtggtgtgaaggaaagggtgaaaagattgaaggaattggcagagaggagcatggggcctgagggcaaatctttgaagaacatcaacgccttcatggaatccatgacgaagtgattgttattgtgttattgttttattttcgggaatgactaccactgatgtccaacgcatgttccaacatccaacaagatcatacaagatatctg

SEQ ID NO: 16325 - protein, 469 aa, Zea mays subsp. mays
  peptide (1)..(469): Ceres Seq. ID no. 12381161
  misc_feature (11)..(465): Pfam Name: UDP-glucoronosyl and UDP-glucosyl transferase Pfam Description: UDP-glucoronosyl and UDP-glucosyl transferase
  misc_feature (9)..(465): Homolog of NCBI NO: 21326127 NR Description: putative glucosyl transferase [Sorghum bicolor]
  misc_feature (1)..(464): Homolog of NCBI NO: 13236653 NR Description: putative glucosyltransferase [Oryza sativa]
  misc_feature (12)..(469): Homolog of NCBI NO: 13236656 NR Description: putative glucosyltransferase [Oryza sativa]
  misc_feature (12)..(469): Homolog of NCBI NO: 21326123 NR Description: putative glucosyl transferase [Sorghum bicolor]
  misc_feature (12)..(469): Homolog of NCBI NO: 13236659 NR Description: putative glucosyltransferase [Oryza sativa]
  misc_feature (51)..(467): Homolog of NCBI NO: 37532896 NR Description: putative glucosyltransferase
  misc_feature (12)..(465): Homolog of NCBI NO: 13236658 NR Description: putative glucosyltransferase [Oryza sativa]
  misc_feature (10)..(465): Homolog of NCBI NO: 21326124 NR Description: putative glucosyl transferase [Sorghum bicolor]
  misc_feature (10)..(465): Homolog of NCBI NO: 21326125 NR Description: putative glucosyl transferase [Sorghum bicolor]
  misc_feature (186)..(469): Homolog of NCBI NO: 37532704 NR Description: putative glucosyltransferase
  misc_feature (67)..(67): Xaa is any aa, unknown or other
MAADAARTPAPHALLLPYPAQGHVIPFMELADRLLDRGFAVTFVNTEFNHRRVVVAAAGGRAPDGRXRLVGVADGMGDGEDRDNFVRLNACMKEAMPLRLDALLDADDERLGRVTCVVVDVGMSWALDAVKRRGLPAAALWPASAAVLAVLFGAKKLIRDGVIDDDGAPVKLENHSFRLAESMPPMDAVFLAWNYMGNRDVERMVFHYLTTTAWAAVAKADVVLCNTFEDLEPDIFGAHSPAAASILPIGPLRTWQRRTSEAPAGHFWRADDEACASFLDAQPRGSVTYVAFGSLTVMSPAQLQELALALLASARPFLWVFRPGLAAELPPAFTDLLPRHARGKVVEWAPQEKVLAHPAVGCFLTHCGWNSTLEGVRHGVPLLCWPYFSDQFTNQAYICDIWKVGLRVVPDGGDGIVAKERIMERLTSLMGDSGVKERVKRLKELAERSMGPEGKSLKNINAFMESMTK

SEQ ID NO: 16326 - protein, 442 aa, Zea mays subsp. mays
  peptide (1)..(442): Ceres Seq. ID no. 12381162
  misc_feature (1)..(438): Pfam Name: UDP-glucoronosyl and UDP-glucosyl transferase Pfam Description: UDP-glucoronosyl and UDP-glucosyl transferase
  misc_feature (1)..(438): Homolog of NCBI NO: 21326127 NR Description: putative glucosyl transferase [Sorghum bicolor]
  misc_feature (1)..(437): Homolog of NCBI NO: 13236653 NR Description: putative glucosyltransferase [Oryza sativa]
  misc_feature (1)..(442): Homolog of NCBI NO: 13236656 NR Description: putative glucosyltransferase [Oryza sativa]
  misc_feature (1)..(442): Homolog of NCBI NO: 21326123 NR Description: putative glucosyl transferase [Sorghum bicolor]
  misc_feature (1)..(442): Homolog of NCBI NO: 13236659 NR Description: putative glucosyltransferase [Oryza sativa]
  misc_feature (24)..(440): Homolog of NCBI NO: 37532896 NR Description: putative glucosyltransferase
  misc_feature (1)..(438): Homolog of NCBI NO: 13236658 NR Description: putative glucosyltransferase [Oryza sativa]
  misc_feature (1)..(438): Homolog of NCBI NO: 21326124 NR Description: putative glucosyl transferase [Sorghum bicolor]
  misc_feature (1)..(438): Homolog of NCBI NO: 21326125 NR Description: putative glucosyl transferase [Sorghum bicolor]
  misc_feature (159)..(442): Homolog of NCBI NO: 37532704 NR Description: putative glucosyltransferase
  misc_feature (40)..(40): Xaa is any aa, unknown or other
MELADRLLDRGFAVTFVNTEFNHRRVVVAAAGGRAPDGRXRLVGVADGMGDGEDRDNFVRLNACMKEAMPLRLDALLDADDERLGRVTCVVVDVGMSWALDAVKRRGLPAAALWPASAAVLAVLFGAKKLIRDGVIDDDGAPVKLENHSFRLAESMPPMDAVFLAWNYMGNRDVERMVFHYLTTTAWAAVAKADVVLCNTFEDLEPDIFGAHSPAAASILPIGPLRTWQRRTSEAPAGHFWRADDEACASFLDAQPRGSVTYVAFGSLTVMSPAQLQELALALLASARPFLWVFRPGLAAELPPAFTDLLPRHARGKVVEWAPQEKVLAHPAVGCFLTHCGWNSTLEGVRHGVPLLCWPYFSDQFTNQAYICDIWKVGLRVVPDGGDGIVAKERIMERLTSLMGDSGVKERVKRLKELAERSMGPEGKSLKNINAFMESMTK

SEQ ID NO: 16327 - protein, 394 aa, Zea mays subsp. mays
  peptide (1)..(394): Ceres Seq. ID no. 12381163
  misc_feature (1)..(390): Pfam Name: UDP-glucoronosyl and UDP-glucosyl transferase Pfam Description: UDP-glucoronosyl and UDP-glucosyl transferase
  misc_feature (1)..(390): Homolog of NCBI NO: 21326127 NR Description: putative glucosyl transferase [Sorghum bicolor]
  misc_feature (1)..(389): Homolog of NCBI NO: 13236653 NR Description: putative glucosyltransferase [Oryza sativa]
  misc_feature (1)..(394): Homolog of NCBI NO: 13236656 NR Description: putative glucosyltransferase [Oryza sativa]
  misc_feature (1)..(394): Homolog of NCBI NO: 21326123 NR Description: putative glucosyl transferase [Sorghum bicolor]
  misc_feature (1)..(394): Homolog of NCBI NO: 13236659 NR Description: putative glucosyltransferase [Oryza sativa]
  misc_feature (1)..(392): Homolog of NCBI NO: 37532896 NR Description: putative glucosyltransferase
  misc_feature (1)..(390): Homolog of NCBI NO: 13236658 NR Description: putative glucosyltransferase [Oryza sativa]
  misc_feature (1)..(390): Homolog of NCBI NO: 21326124 NR Description: putative glucosyl transferase [Sorghum bicolor]
  misc_feature (1)..(390): Homolog of NCBI NO: 21326125 NR Description: putative glucosyl transferase [Sorghum bicolor]
  misc_feature (111)..(394): Homolog of NCBI NO: 37532704 NR Description: putative glucosyltransferase
MGDGEDRDNFVRLNACMKEAMPLRLDALLDADDERLGRVTCVVVDVGMSWALDAVKRRGLPAAALWPASAAVLAVLFGAKKLIRDGVIDDDGAPVKLENHSFRLAESMPPMDAVFLAWNYMGNRDVERMVFHYLTTTAWAAVAKADVVLCNTFEDLEPDIFGAHSPAAASILPIGPLRTWQRRTSEAPAGHFWRADDEACASFLDAQPRGSVTYVAFGSLTVMSPAQLQELALALLASARPFLWVFRPGLAAELPPAFTDLLPRHARGKVVEWAPQEKVLAHPAVGCFLTHCGWNSTLEGVRHGVPLLCWPYFSDQFTNQAYICDIWKVGLRVVPDGGDGIVAKERIMERLTSLMGDSGVKERVKRLKELAERSMGPEGKSLKNINAFMESMTK

SEQ ID NO: 16328 - DNA, 1282 bp, Zea mays subsp. mays
  misc_feature (1)..(1282): Ceres Seq. ID no. 12352776
  misc_feature: MA Experiment ID: 108522 Result: Up-regulated in Transcription
  misc_feature: MA Experiment 108522 PARAMETER Experiment Name: Zm_42deg_Heat_P Parameter: Age (day) Value: 8
  misc_feature: MA Experiment 108522 PARAMETER Experiment Name: Zm_42deg_Heat_P Parameter: Organism Value: Zea mays
  misc_feature: MA Experiment 108522 PARAMETER Experiment Name: Zm_42deg_Heat_P Parameter: Plant Line Value: 35A19
  misc_feature: MA Experiment 108522 PARAMETER Experiment Name: Zm_42deg_Heat_P Parameter: Temperature (deg C) Value: 42 vs. 22
  misc_feature: MA Experiment 108522 PARAMETER Experiment Name: Zm_42deg_Heat_P Parameter: Timepoint (hr) Value: 1
  misc_feature: MA Experiment 108522 PARAMETER Experiment Name: Zm_42deg_Heat_P Parameter: Tissue Value: Aerial
  misc_feature: MA Experiment ID: 108523 Result: Up-regulated in Transcription
  misc_feature: MA Experiment 108523 PARAMETER Experiment Name: Zm_42deg_Heat_P Parameter: Age (day) Value: 8
  misc_feature: MA Experiment 108523 PARAMETER Experiment Name: Zm_42deg_Heat_P Parameter: Organism Value: Zea mays
  misc_feature: MA Experiment 108523 PARAMETER Experiment Name: Zm_42deg_Heat_P Parameter: Plant Line Value: 35A19
  misc_feature: MA Experiment 108523 PARAMETER Experiment Name: Zm_42deg_Heat_P Parameter: Temperature (deg C) Value: 42 vs. 22
  misc_feature: MA Experiment 108523 PARAMETER Experiment Name: Zm_42deg_Heat_P Parameter: Timepoint (hr) Value: 6
  misc_feature: MA Experiment 108523 PARAMETER Experiment Name: Zm_42deg_Heat_P Parameter: Tissue Value: Aerial
acccagacgggtcctggttcctccccctccaagccggctctgaaatttgaggcccatagccccgtcggcccccatcgccacgccgccggccacgccccagacgaccccgcccgccgccgccgcctcccgctccctccgcgcgcagccctcgtccggccgcccgggtccgagcccgctcgctcctcctccccacgttggacagtttaagtgtggcttcattgcatgagtagttgcagttagcgtggcttttctccgtgcttgctcctggtcgtgctttgccttgcaaaggaaggaatcatgacatctgttgttcacagtgtttcaggtgaccacagggctgaggatcaaaatcaacagaagaagcaagctgaacctggggaccagcaagaagccccagttactagttcagatagccaaccaacagtaggcacaccatcaacagattatgtggcaccctatgcccctcatgacatgagccatgcaatgggtcaatacgcttatccaaatattgacccatactatggaagcctttatgcagcagcttacggtggacagccattgatgcatccaccgttagttggaatgcatccggctggcttacctttgcctaccgatgcaattgaagagcctgtgtatgtaaatgcaaagcaatacaatgccatattaagacggcgtcaatctcgggctaaagctgaatcagaacgaaagcttatcaaggggcgtaagccctatctccatgagtcacgtcatcagcatgccttgaaaagggccaggggagctggaggtcggtttctcaactcaaagtcagatgacaaggaagagaactccgactcgagtcacaaagagaatcagaacggagttgcgccccacaggagcggccaaccgtcaacccctccgtctcccaacggtgcatcgtcagctaatcagggcaggcagtcgtgaatgatgattcaaaactcacagctgaagagatttcagcccctgagctagatatggcagcagttttgtacagaaaacgctagtgggcagcagcaacatggtgtcgatcggtcggtgggtcggttgttgtaggacatgttccatagaaaaagcatagacgagtctacaggttttggagccttggtttggtcctctgtgtattcacctttctgtacaatcttagtagcgttgtgtaccttcccctggaaggatagcttcagttagcgcttcagaaagtcaagtgtgtagcatattggcttattgtttgctttgcttggacaatggagatttgggagtggagttc

SEQ ID NO: 16329 - protein, 214 aa, Zea mays subsp. mays
  peptide (1)..(214): Ceres Seq. ID no. 12352777
  misc_feature (109)..(165): Pfam Name: CCAAT-binding transcription factor (CBF-B/NF-YA) Pfam Description: CCAAT-binding transcription factor
  misc_feature (1)..(214): Homolog of NCBI NO: 1586551 NR Description: CCAAT-binding factor:SUBUNIT=B
  misc_feature (1)..(214): Homolog of NCBI NO: 1173618 NR Description: CCAAT-binding factor B subunit homolog
  misc_feature (2)..(188): Homolog of NCBI NO: 7489565 NR Description: probable transcription factor - rice
  misc_feature (10)..(200): Homolog of NCBI NO: 27552556 NR Description: putative CCAAT-binding transcription factor
  misc_feature (1)..(206): Homolog of NCBI NO: 30686189 NR Description: CCAAT-binding transcription factor subunit
  misc_feature (42)..(207): Homolog of NCBI NO: 38640734 NR Description: transcription factor WAPB [Triticum aestivum]
  misc_feature (21)..(186): Homolog of NCBI NO: 25511727 NR Description: F26G16.12 protein - Arabidopsis thaliana
  misc_feature (1)..(186): Homolog of NCBI NO: 30691791 NR Description: transcription factor -related [Arabidopsis
  misc_feature (27)..(190): Homolog of NCBI NO: 38637163 NR Description: putative CCAAT box binding factor/transcription
  misc_feature (1)..(186): Homolog of NCBI NO: 30691872 NR Description: transcription factor -related [Arabidopsis
MTSVVHSVSGDHRAEDQNQQKKQAEPGDQQEAPVTSSDSQPTVGTPSTDYVAPYAPHDMSHAMGQYAYPNIDPYYGSLYAAAYGGQPLMHPPLVGMHPAGLPLPTDAIEEPVYVNAKQYNAILRRRQSRAKAESERKLIKGRKPYLHESRHQHALKRARGAGGRFLNSKSDDKEENSDSSHKENQNGVAPHRSGQPSTPPSPNGASSANQGRQS

SEQ ID NO: 16330 - protein, 156 aa, Zea mays subsp. mays
  peptide (1)..(156): Ceres Seq. ID no. 12352778
  misc_feature (51)..(107): Pfam Name: CCAAT-binding transcription factor (CBF-B/NF-YA) Pfam Description: CCAAT-binding transcription factor
  misc_feature (1)..(156): Homolog of NCBI NO: 7488444 NR Description: CCAAT-binding factor B chain homolog (clone
  misc_feature (1)..(156): Homolog of NCBI NO: 1173618 NR Description: CCAAT-binding factor B subunit homolog
  misc_feature (1)..(130): Homolog of NCBI NO: 7489565 NR Description: probable transcription factor - rice
  misc_feature (1)..(142): Homolog of NCBI NO: 27552556 NR Description: putative CCAAT-binding transcription factor
  misc_feature (1)..(148): Homolog of NCBI NO: 30686189 NR Description: CCAAT-binding transcription factor subunit
  misc_feature (1)..(149): Homolog of NCBI NO: 38640734 NR Description: transcription factor WAPB [Triticum aestivum]
  misc_feature (1)..(128): Homolog of NCBI NO: 25511727 NR Description: F26G16.12 protein - Arabidopsis thaliana
  misc_feature (1)..(128): Homolog of NCBI NO: 30691791 NR Description: transcription factor -related [Arabidopsis
  misc_feature (1)..(132): Homolog of NCBI NO: 38637163 NR Description: putative CCAAT box binding factor/transcription
  misc_feature (1)..(128): Homolog of NCBI NO: 30691872 NR Description: transcription factor -related [Arabidopsis
MSHAMGQYAYPNIDPYYGSLYAAAYGGQPLMHPPLVGMHPAGLPLPTDAIEEPVYVNAKQYNAILRRRQSRAKAESERKLIKGRKPYLHESRHQHALKRARGAGGRFLNSKSDDKEENSDSSHKENQNGVAPHRSGQPSTPPSPNGASSANQGRQS

SEQ ID NO: 16331 - protein, 152 aa, Zea mays subsp. mays
  peptide (1)..(152): Ceres Seq. ID no. 12352779
  misc_feature (47)..(103): Pfam Name: CCAAT-binding transcription factor (CBF-B/NF-YA) Pfam Description: CCAAT-binding transcription factor
  misc_feature (1)..(152): Homolog of NCBI NO: 1586551 NR Description: CCAAT-binding factor:SUBUNIT=B
  misc_feature (1)..(152): Homolog of NCBI NO: 1173618 NR Description: CCAAT-binding factor B subunit homolog
  misc_feature (1)..(126): Homolog of NCBI NO: 7489565 NR Description: probable transcription factor - rice
  misc_feature (1)..(138): Homolog of NCBI NO: 27552556 NR Description: putative CCAAT-binding transcription factor
  misc_feature (1)..(144): Homolog of NCBI NO: 30686189 NR Description: CCAAT-binding transcription factor subunit
  misc_feature (1)..(145): Homolog of NCBI NO: 38640734 NR Description: transcription factor WAPB [Triticum aestivum]
  misc_feature (1)..(124): Homolog of NCBI NO: 25511727 NR Description: F26G16.12 protein - Arabidopsis thaliana
  misc_feature (1)..(124): Homolog of NCBI NO: 30691791 NR Description: transcription factor -related [Arabidopsis
  misc_feature (1)..(128): Homolog of NCBI NO: 38637163 NR Description: putative CCAAT box binding factor/transcription
  misc_feature (1)..(124): Homolog of NCBI NO: 30691872 NR Description: transcription factor -related [Arabidopsis
MGQYAYPNIDPYYGSLYAAAYGGQPLMHPPLVGMHPAGLPLPTDAIEEPVYVNAKQYNAILRRRQSRAKAESERKLIKGRKPYLHESRHQHALKRARGAGGRFLNSKSDDKEENSDSSHKENQNGVAPHRSGQPSTPPSPNGASSANQGRQS

SEQ ID NO: 16332 - DNA, 1680 bp, Zea mays subsp. mays
  misc_feature (1)..(1680): Ceres Seq. ID no. 12360613
  misc_feature: MA Experiment ID: 108528 Result: Up-regulated in Transcription
  misc_feature: MA Experiment 108528 PARAMETER Experiment Name: Zm_Imbibed_Seeds_P Parameter: Age (day) Value: 5 vs. 2
  misc_feature: MA Experiment 108528 PARAMETER Experiment Name: Zm_Imbibed_Seeds_P Parameter: Organism Value: Zea mays
  misc_feature: MA Experiment 108528 PARAMETER Experiment Name: Zm_Imbibed_Seeds_P Parameter: Plant Line Value: 35A19
  misc_feature: MA Experiment 108528 PARAMETER Experiment Name: Zm_Imbibed_Seeds_P Parameter: Tissue Value: Aerial vs. Embryo
  misc_feature: MA Experiment ID: 108544 Result: Down-regulated in Transcription
  misc_feature: MA Experiment ID: 108547 Result: Up-regulated in Transcription
  misc_feature: MA Experiment 108547 PARAMETER Experiment Name: Zm_Imbibed_Seeds_P Parameter: Age (day) Value: 4 vs. 2
  misc_feature: MA Experiment 108547 PARAMETER Experiment Name: Zm_Imbibed_Seeds_P Parameter: Organism Value: Zea mays
  misc_feature: MA Experiment 108547 PARAMETER Experiment Name: Zm_Imbibed_Seeds_P Parameter: Plant Line Value: 35A19
  misc_feature: MA Experiment 108547 PARAMETER Experiment Name: Zm_Imbibed_Seeds_P Parameter: Tissue Value: Aerial vs. Embryo
  misc_feature: MA Experiment ID: 108556 Result: Down-regulated in Transcription
  misc_feature: MA Experiment 108556 PARAMETER Experiment Name: Zm_Drought_P Parameter: Age (day) Value: 9
  misc_feature: MA Experiment 108556 PARAMETER Experiment Name: Zm_Drought_P Parameter: Organism Value: Zea mays
  misc_feature: MA Experiment 108556 PARAMETER Experiment Name: Zm_Drought_P Parameter: Plant Line Value: 35A19
  misc_feature: MA Experiment 108556 PARAMETER Experiment Name: Zm_Drought_P Parameter: Timepoint (hr) Value: 24
  misc_feature: MA Experiment 108556 PARAMETER Experiment Name: Zm_Drought_P Parameter: Tissue Value: Aerial
  misc_feature: MA Experiment 108556 PARAMETER Experiment Name: Zm_Drought_P Parameter: Treatment Value: Drought vs. No Drought
  misc_feature: MA Experiment ID: 108689 Result: Down-regulated in Transcription
  misc_feature: MA Experiment 108689 PARAMETER Experiment Name: Zm_Drought_Roots_P Parameter: Age (day) Value: 9
  misc_feature: MA Experiment 108689 PARAMETER Experiment Name: Zm_Drought_Roots_P Parameter: Organism Value: Zea mays
  misc_feature: MA Experiment 108689 PARAMETER Experiment Name: Zm_Drought_Roots_P Parameter: Plant Line Value: 35A19
  misc_feature: MA Experiment 108689 PARAMETER Experiment Name: Zm_Drought_Roots_P Parameter: Timepoint (hr) Value: 24
  misc_feature: MA Experiment 108689 PARAMETER Experiment Name: Zm_Drought_Roots_P Parameter: Tissue Value: Roots
  misc_feature: MA Experiment 108689 PARAMETER Experiment Name: Zm_Drought_Roots_P Parameter: Treatment Value: Drought vs. No Drought
  misc_feature: MA Experiment ID: 20000477 Result: Down-regulated in Transcription
  misc_feature: MA Experiment 20000477 PARAMETER Experiment Name: Zm_5mM_SA_P Parameter: Age (day) Value: 10
  misc_feature: MA Experiment 20000477 PARAMETER Experiment Name: Zm_5mM_SA_P Parameter: Organism Value: Zea mays
  misc_feature: MA Experiment 20000477 PARAMETER Experiment Name: Zm_5mM_SA_P Parameter: Plant Line Value: 35A19
  misc_feature: MA Experiment 20000477 PARAMETER Experiment Name: Zm_5mM_SA_P Parameter: Timepoint (hr) Value: 48
  misc_feature: MA Experiment 20000477 PARAMETER Experiment Name: Zm_5mM_SA_P Parameter: Tissue Value: Aerial
  misc_feature: MA Experiment 20000477 PARAMETER Experiment Name: Zm_5mM_SA_P Parameter: Treatment Value: 5mM SA vs. No Treatment
  misc_feature: MA Experiment ID: 20000478 Result: Down-regulated in Transcription
  misc_feature: MA Experiment 20000478 PARAMETER Experiment Name: Zm_5mM_SA_P Parameter: Age (day) Value: 11
  misc_feature: MA Experiment 20000478 PARAMETER Experiment Name: Zm_5mM_SA_P Parameter: Organism Value: Zea mays
  misc_feature: MA Experiment 20000478 PARAMETER Experiment Name: Zm_5mM_SA_P Parameter: Plant Line Value: 35A19
  misc_feature: MA Experiment 20000478 PARAMETER Experiment Name: Zm_5mM_SA_P Parameter: Timepoint (hr) Value: 72
  misc_feature: MA Experiment 20000478 PARAMETER Experiment Name: Zm_5mM_SA_P Parameter: Tissue Value: Aerial
  misc_feature: MA Experiment 20000478 PARAMETER Experiment Name: Zm_5mM_SA_P Parameter: Treatment Value: 5mM SA vs. No Treatment
  misc_feature: MA Experiment ID: 20000479 Result: Down-regulated in Transcription
  misc_feature: MA Experiment 20000479 PARAMETER Experiment Name: Zm_Drought_P Parameter: Age (day) Value: 10
  misc_feature: MA Experiment 20000479 PARAMETER Experiment Name: Zm_Drought_P Parameter: Organism Value: Zea mays
  misc_feature: MA Experiment 20000479 PARAMETER Experiment Name: Zm_Drought_P Parameter: Plant Line Value: 35A19
  misc_feature: MA Experiment 20000479 PARAMETER Experiment Name: Zm_Drought_P Parameter: Timepoint (hr) Value: 48
  misc_feature: MA Experiment 20000479 PARAMETER Experiment Name: Zm_Drought_P Parameter: Tissue Value: Aerial
  misc_feature: MA Experiment 20000479 PARAMETER Experiment Name: Zm_Drought_P Parameter: Treatment Value: Drought vs. No Drought
  misc_feature: MA Experiment ID: 20000480 Result: Down-regulated in Transcription
  misc_feature: MA Experiment 20000480 PARAMETER Experiment Name: Zm_Drought_P Parameter: Age (day) Value: 11
  misc_feature: MA Experiment 20000480 PARAMETER Experiment Name: Zm_Drought_P Parameter: Organism Value: Zea mays
  misc_feature: MA Experiment 20000480 PARAMETER Experiment Name: Zm_Drought_P Parameter: Plant Line Value: 35A19
  misc_feature: MA Experiment 20000480 PARAMETER Experiment Name: Zm_Drought_P Parameter: Timepoint (hr) Value: 72
  misc_feature: MA Experiment 20000480 PARAMETER Experiment Name: Zm_Drought_P Parameter: Tissue Value: Aerial
  misc_feature: MA Experiment 20000480 PARAMETER Experiment Name: Zm_Drought_P Parameter: Treatment Value: Drought vs. No Drought
aaggcctccactcattcctgcccccgacactcccactgccaccagtcctctcaccgccaggcgccagccacagcggcacaatgcagccgcctactacccttctcccgctaggcgccgtcgtggtcgccatcctcctgctcgccaccgccccgagccccgccgtctcccgccaccgccactcgtccgccgcggacacggagacgctcgatgtagccgcctcgctctcccgcgcccgcgccgcgctctccaccgacgccgtctcgctgcaccagtccgcggccgccgccgccgccggggcgaagcgctccccgcgagcgcgggagggcggcctcacgttgcggctccactcccgggacttcctgcccgaggagcaggggcggcacgagacgtaccgctcgctcctgctctcccgcctccgccgcgactcggcgcgcgccgcggcggtgtcggcccgcgcgacgctggcggcggacgccgtgacccggctggacctgcgccccgcgaacgggtcggcggtgttcgcggcgtccgcggcgatccagggccccgtggtgtccggcgtcgggcagggcagcggcgagtacttctcccgcgtgggcatcggcagccccgcgcggcagctgtacatggtgctggacaccggcagcgacgtcacctgggtgcagtgccagccctgcgccgactgctaccagcagtccgacccggtgttcgacccgtccctctccgcctcctacgccgccgtctcctgcgactcccagcgctgccgggacctggacaccgcggcgtgccgcaacgccacgggcgcctgcctctacgaggtggcctacggcgacggctcctacaccgttgggcgacttcgccaccgagacgctcacgctgggggactccaccccggtcggcaacgtcgccatcgggtgcggccacgacaacgagggccttttcgtcggcgccgcggggctgctggcgctgggcggcgggccgctctccttcccgtcccagatctccgcgtccaccttctnctactgcctcgtggaccgcgactccccggccgcgtccacgctccagttcggcgacggcgccgccgaggcgggcaccgtgacggcgcctctcgtgcgcagcccgcgcacgagcaccttctactacgtggcgctgtcgggcatctcggtgggcgggcagccgctgtccatcccggcatccgccttcgccatggacgccacgtcgggctcgggcggcgtcatcgtggactccggcaccaccgtgacgcggctccagtccgccgcctacgcggcgctccgcgacgccttcgtccagggcgcgccgtcgctgccccggacctccggggtgtcgctgttcgacacgtgctacgacctgtcggaccggacgagcgtggaggtgcccgcggtgtcgctgcggttcgagggcggcggcgcgctgcggctgccggcgaagaactacctgatccccgtggacggagccggcacctactgcctggccttcgcgccgacgaacgcggccgtgtccatcatcgggaacgtgcagcagcagggcacccgcgtcagcttcgacaccgccaggggcgccgtcggcttcacccccaacaagtgctagcctagcctagcctaagcctgccttctggccctgttagccacggttgtcagtagtaatgacaagccggtgttt

SEQ ID NO: 16333 - protein, 536 aa, Zea mays subsp. mays
  peptide (1)..(536): Ceres Seq. ID no. 12360614
  misc_feature (142)..(283): Pfam Name: Eukaryotic aspartyl protease Pfam Description: Eukaryotic aspartyl protease
  misc_feature (137)..(283): Homolog of NCBI NO: 15228618 NR Description: putative protein
  misc_feature (138)..(285): Homolog of NCBI NO: 15231010 NR Description: hypothetical protein, 5' partial
  misc_feature (110)..(283): Homolog of NCBI NO: 21594980 NR Description: chloroplast nucleoid DNA binding protein,
  misc_feature (110)..(283): Homolog of NCBI NO: 15223368 NR Description: chloroplast nucleoid DNA binding protein, putative
  misc_feature (111)..(285): Homolog of NCBI NO: 28392860 NR Description: unknown protein [Arabidopsis thaliana]
  misc_feature (35)..(283): Homolog of NCBI NO: 15290061 NR Description: nucleoid DNA-binding protein cnd41-like protein
  misc_feature (34)..(285): Homolog of NCBI NO: 19424106 NR Description: putative chloroplast nucleoid DNA-binding protein
  misc_feature (34)..(285): Homolog of NCBI NO: 15229656 NR Description: putative chloroplast nucleoid DNA-binding protein
  misc_feature (44)..(283): Homolog of NCBI NO: 15222611 NR Description: hypothetical protein
  misc_feature (27)..(283): Homolog of NCBI NO: 34895664 NR Description: nucleoid DNA-binding protein cnd41-like protein
  misc_feature (339)..(339): Xaa is any aa, unknown or other
GLHSFLPPTLPLPPVLSPPGASHSGTMQPPTTLLPLGAVVVAILLLATAPSPAVSRHRHSSAADTETLDVAASLSRARAALSTDAVSLHQSAAAAAAGAKRSPRAREGGLTLRLHSRDFLPEEQGRHETYRSLLLSRLRRDSARAAAVSARATLAADAVTRLDLRPANGSAVFAASAAIQGPVVSGVGQGSGEYFSRVGIGSPARQLYMVLDTGSDVTWVQCQPCADCYQQSDPVFDPSLSASYAAVSCDSQRCRDLDTAACRNATGACLYEVAYGDGSYTVGRLRHRDAHAGGLHPGRQRRHRVRPRQRGPFRRRRGAAGAGRRAALLPVPDLRVHLXLLPRGPRLPGRVHAPVRRRRRRGGHRDGASRAQPAHEHLLLRGAVGHLGGRAAAVHPGIRLRHGRHVGLGRRHRGLRHHRDAAPVRRLRGAPRRLRPGRAVAAPDLRGVAVRHVLRPVGPDERGGARGVAAVRGRRRAAAAGEELPDPRGRSRHLLPGLRADERGRVHHRERAAAGHPRQLRHRQGRRRLHPQQVLA

SEQ ID NO: 16334 - protein, 510 aa, Zea mays subsp. mays
  peptide (1)..(510): Ceres Seq. ID no. 12360615
  misc_feature (116)..(257): Pfam Name: Eukaryotic aspartyl protease Pfam Description: Eukaryotic aspartyl protease
  misc_feature (111)..(257): Homolog of NCBI NO: 15228618 NR Description: putative protein
  misc_feature (112)..(259): Homolog of NCBI NO: 15231010 NR Description: hypothetical protein, 5' partial
  misc_feature (84)..(257): Homolog of NCBI NO: 21594980 NR Description: chloroplast nucleoid DNA binding protein,
  misc_feature (84)..(257): Homolog of NCBI NO: 15223368 NR Description: chloroplast nucleoid DNA binding protein, putative
  misc_feature (85)..(259): Homolog of NCBI NO: 28392860 NR Description: unknown protein [Arabidopsis thaliana]
  misc_feature (9)..(257): Homolog of NCBI NO: 15290061 NR Description: nucleoid DNA-binding protein cnd41-like protein
  misc_feature (8)..(259): Homolog of NCBI NO: 19424106 NR Description: putative chloroplast nucleoid DNA-binding protein
  misc_feature (8)..(259): Homolog of NCBI NO: 15229656 NR Description: putative chloroplast nucleoid DNA-binding protein
  misc_feature (18)..(257): Homolog of NCBI NO: 15222611 NR Description: hypothetical protein
  misc_feature (1)..(257): Homolog of NCBI NO: 34895664 NR Description: nucleoid DNA-binding protein cnd41-like protein
  misc_feature (313)..(313): Xaa is any aa, unknown or other
MQPPTTLLPLGAVVVAILLLATAPSPAVSRHRHSSAADTETLDVAASLSRARAALSTDAVSLHQSAAAAAAGAKRSPRAREGGLTLRLHSRDFLPEEQGRHETYRSLLLSRLRRDSARAAAVSARATLAADAVTRLDLRPANGSAVFAASAAIQGPVVSGVGQGSGEYFSRVGIGSPARQLYMVLDTGSDVTWVQCQPCADCYQQSDPVFDPSLSASYAAVSCDSQRCRDLDTAACRNATGACLYEVAYGDGSYTVGRLRHRDAHAGGLHPGRQRRHRVRPRQRGPFRRRRGAAGAGRRAALLPVPDLRVHLXLLPRGPRLPGRVHAPVRRRRRRGGHRDGASRAQPAHEHLLLRGAVGHLGGRAAAVHPGIRLRHGRHVGLGRRHRGLRHHRDAAPVRRLRGAPRRLRPGRAVAAPDLRGVAVRHVLRPVGPDERGGARGVAAVRGRRRAAAAGEELPDPRGRSRHLLPGLRADERGRVHHRERAAAGHPRQLRHRQGRRRLHPQQVLA

SEQ ID NO: 16335 - protein, 365 aa, Zea mays subsp. mays
  peptide (1)..(365): Ceres Seq. ID no. 12360616
  misc_feature (3)..(365): Homolog of NCBI NO: 5821143 NR Description: RNA binding protein [Homo sapiens]
  misc_feature (8)..(365): Homolog of NCBI NO: 6649242 NR Description: splicing coactivator subunit SRm300 [Homo sapiens]
  misc_feature (3)..(365): Homolog of NCBI NO: 5821145 NR Description: RNA binding protein [Homo sapiens]
  misc_feature (5)..(365): Homolog of NCBI NO: 25989119 NR Description: unknown [Streptomyces aureofaciens]
  misc_feature (310)..(365): Homolog of NCBI NO: 23274133 NR Description: Similar to serine/arginine repetitive matrix 1
  misc_feature (35)..(365): Homolog of NCBI NO: 29247944 NR Description: GLP_26_54603_52153 [Giardia lamblia ATCC 50803]
  misc_feature (286)..(365): Homolog of NCBI NO: 20138131 NR Description: Vegetative cell wall protein gp1 precursor
  misc_feature (290)..(365): Homolog of NCBI NO: 28574875 NR Description: CG13731-PA [Drosophila melanogaster]
  misc_feature (284)..(365): Homolog of NCBI NO: 11360494 NR Description: antifreeze glycopeptide AFGP polyprotein
  misc_feature (3)..(365): Homolog of NCBI NO: 19923466 NR Description: splicing coactivator subunit SRm300
  misc_feature (340)..(340): Xaa is any aa, unknown or other
RPPLIPAPDTPTATSPLTARRQPQRHNAAAYYPSPARRRRGRHPPARHRPEPRRLPPPPLVRRGHGDARCSRLALPRPRRALHRRRLAAPVRGRRRRRGEALPASAGGRPHVAAPLPGLPARGAGAARDVPLAPALPPPPRLGARRGGVGPRDAGGGRRDPAGPAPRERVGGVRGVRGDPGPRGVRRRAGQRRVLLPRGHRQPRAAAVHGAGHRQRRHLGAVPALRRLLPAVRPGVRPVPLRLLRRRLLRLPALPGPGHRGVPQRHGRLPLRGGLRRRLLHRWATSPPRRSRWGTPPRSATSPSGAATTTRAFSSAPRGCWRWAAGRSPSRPRSPRPPSXTASWTATPRPRPRSSSATAPPRRAP

SEQ ID NO: 16336 - DNA, 1590 bp, Zea mays subsp. mays
  misc_feature (1)..(1590): Ceres Seq. ID no. 12367781
  misc_feature: MA Experiment ID: 108527 Result: Up-regulated in Transcription
  misc_feature: MA Experiment 108527 PARAMETER Experiment Name: Zm_5mM_NO_P Parameter: Age (day) Value: 8
  misc_feature: MA Experiment 108527 PARAMETER Experiment Name: Zm_5mM_NO_P Parameter: Organism Value: Zea mays
  misc_feature: MA Experiment 108527 PARAMETER Experiment Name: Zm_5mM_NO_P Parameter: Plant Line Value: 35A19
  misc_feature: MA Experiment 108527 PARAMETER Experiment Name: Zm_5mM_NO_P Parameter: Timepoint (hr) Value: 6
  misc_feature: MA Experiment 108527 PARAMETER Experiment Name: Zm_5mM_NO_P Parameter: Tissue Value: Aerial
  misc_feature: MA Experiment 108527 PARAMETER Experiment Name: Zm_5mM_NO_P Parameter: Treatment Value: 5mM NO vs. No Treatment
  misc_feature: MA Experiment ID: 108544 Result: Up-regulated in Transcription
  misc_feature: MA Experiment ID: 108559 Result: Up-regulated in Transcription
  misc_feature: MA Experiment 108559 PARAMETER Experiment Name: Zm_5mM_NO_P Parameter: Age (day) Value: 8
  misc_feature: MA Experiment 108559 PARAMETER Experiment Name: Zm_5mM_NO_P Parameter: Organism Value: Zea mays
  misc_feature: MA Experiment 108559 PARAMETER Experiment Name: Zm_5mM_NO_P Parameter: Plant Line Value: 35A19
  misc_feature: MA Experiment 108559 PARAMETER Experiment Name: Zm_5mM_NO_P Parameter: Timepoint (hr) Value: 12
  misc_feature: MA Experiment 108559 PARAMETER Experiment Name: Zm_5mM_NO_P Parameter: Tissue Value: Aerial
  misc_feature: MA Experiment 108559 PARAMETER Experiment Name: Zm_5mM_NO_P Parameter: Treatment Value: 5mM NO vs. No Treatment
  misc_feature: MA Experiment ID: 20000534 Result: Up-regulated in Transcription
  misc_feature: MA Experiment 20000534 PARAMETER Experiment Name: Zm_Hybrid_Pollen_P Parameter: Age (day) Value: 8
  misc_feature: MA Experiment 20000534 PARAMETER Experiment Name: Zm_Hybrid_Pollen_P Parameter: Organism Value: Zea mays
  misc_feature: MA Experiment 20000534 PARAMETER Experiment Name: Zm_Hybrid_Pollen_P Parameter: Plant Line Value: 35A19
  misc_feature: MA Experiment 20000534 PARAMETER Experiment Name: Zm_Hybrid_Pollen_P Parameter: Tissue Value: Pollen vs. Aerial
  misc_feature: MA Experiment ID: 20000535 Result: Down-regulated in Transcription
  misc_feature: MA Experiment 20000535 PARAMETER Experiment Name: Zm_Hybrid_Seed_Dev_P Parameter: DAP Value: 30 vs. 12
  misc_feature: MA Experiment 20000535 PARAMETER Experiment Name: Zm_Hybrid_Seed_Dev_P Parameter: Organism Value: Zea mays
  misc_feature: MA Experiment 20000535 PARAMETER Experiment Name: Zm_Hybrid_Seed_Dev_P Parameter: Plant Line Value: 35A19
  misc_feature: MA Experiment 20000535 PARAMETER Experiment Name: Zm_Hybrid_Seed_Dev_P Parameter: Tissue Value: Embryo vs. Unfert Floret
  misc_feature: MA Experiment ID: 20000627 Result: Down-regulated in Transcription
  misc_feature: MA Experiment 20000627 PARAMETER Experiment Name: Zm_Herbicide-Treatments_P Parameter: Timepoint (hr) Value: 12
  misc_feature: MA Experiment 20000627 PARAMETER Experiment Name: Zm_Herbicide-Treatments_P Parameter: Tissue Value: Aerial
  misc_feature: MA Experiment 20000627 PARAMETER Experiment Name: Zm_Herbicide-Treatments_P Parameter: Treatment Value: Finale vs. No Treatment
  misc_feature: MA Experiment ID: 20000629 Result: Down-regulated in Transcription
  misc_feature: MA Experiment 20000629 PARAMETER Experiment Name: Zm_Herbicide-Treatments_P Parameter: Timepoint (hr) Value: 12
  misc_feature: MA Experiment 20000629 PARAMETER Experiment Name: Zm_Herbicide-Treatments_P Parameter: Tissue Value: Aerial
  misc_feature: MA Experiment 20000629 PARAMETER Experiment Name: Zm_Herbicide-Treatments_P Parameter: Treatment Value: Trimec vs. No Treatment
agctttctaagtccagtctcccgggcagaagaggcacgagaggaaggtgggaaaggaaaccacagccgcttctggcgggcgctcaccgtgccccttccgcctcgcctcgcaatggaggtttccaggtggaccccggcggccggcctcctgctcctgttgctcctcccgctcgcggccaccccgtcacgcgccgccacgatggcgagatcgccgtcgtcgtccaccgccgtgttccagctccagggagacgtataccccaccggccactactatgtcacgatgaacattgggaacccagcgaagccctacttcctggacgtggacactggcagcgatctcacctggctgcagtgcgacgcaccctgtcggagttgcaacaaggtgccacatcccttgtatcgaccaacggcaaaccgccttgtaccgtgtgcaaacgcactctgcactgcacttcacagcggacagggctctaataacaagtgcccttcaccaaaacaatgcgactatcagataaagtacaccgacagtgcatcttctcagggtgtgctgatcaacgacagcttctcactgcccatgagatcctccaacattcgtcctggcctcacatttggctgtggatatgaccagcaagtggggaaaaatggcgctgtgcaggcagcgattgacggcatgcttgggctcgggaggggatcagttagccttgtttcacagctcaagcagcaagggatcaccaaaaatgtcgtcggccattgcctaagcacgaatggaggggggttcctcttctttggggatgatgttgtgccttcatcacgtgtaacttgggtgccgatggctcagaggacatctgggaactactactcacctggctcaggaacactgtacttcgatagacgttcactaggcgtgaagccaatggaggtggtatttgacagtggtagcacgtatacttattttactgctcaaccataccaagctgttgtttctgcgctcaaaggtggtctcagcaaatcacttaaacaggtgtcagatcccactctgcctctgtgctggaaagggcagaaagcattcaaatctgtgtttgacgtcaagaatgaattcaagtcaatgtttctgagcttttccagtgccaagaatgccgccatggagatcccacctgaaaactacctcattgtcacaaaaaatggaaatgtgtgcctgggcattcttgatggaacggctgccaagctgagtttcaacgtaattggagacatcacgatgcaggatcagatggtgatctatgacaacgagaaatcgcagctgggatgggcgcgtggggcatgcactaggagcgccaagtctattctgtcttcctttccctgagctcagttctatgtacttctgatagagtttaagaaaatcactatatcaaacctcctcgcaatgcatgaatttcctaactgaagagggagggagggagggagggagagagagagagagaatgttcctgtttatgtagagatggagtccaaaatttgtgtgcctgatgagttcttccccatatgatattaactgaaatagtatatcaattgagtgtattccattttaagtttc

SEQ ID NO: 16337 - protein, 452 aa, Zea mays subsp. mays
  peptide (1)..(452): Ceres Seq. ID no. 12367782
  misc_feature (96)..(438): Pfam Name: Eukaryotic aspartyl protease Pfam Description: Eukaryotic aspartyl protease
  misc_feature (43)..(450): Homolog of NCBI NO: 7489412 NR Description: probable aspartic proteinase (EC 3.4.23.-) -
  misc_feature (74)..(392): Homolog of NCBI NO: 7484812 NR Description: aspartic proteinase homolog F17M5.250 -
  misc_feature (73)..(442): Homolog of NCBI NO: 30699261 NR Description: nucellin protein, putative [Arabidopsis thaliana]
  misc_feature (73)..(451): Homolog of NCBI NO: 25350204 NR Description: nucellin-like protein, 27671-25467
  misc_feature (73)..(451): Homolog of NCBI NO: 30699263 NR Description: nucellin protein, putative [Arabidopsis thaliana]
  misc_feature (50)..(446): Homolog of NCBI NO: 15219354 NR Description: nucellin, putative; protein id: At1g44130.1
  misc_feature (74)..(444): Homolog of NCBI NO: 26452545 NR Description: putative nucellin [Arabidopsis thaliana]
  misc_feature (74)..(444): Homolog of NCBI NO: 18418224 NR Description: nucellin -like protein
  misc_feature (57)..(446): Homolog of NCBI NO: 33340111 NR Description: nucellin-like protein [Oryza sativa]
  misc_feature (96)..(452): Homolog of NCBI NO: 21805926 NR Description: nucellin-like aspartic protease [Zea mays]
SFLSPVSRAEEAREEGGKGNHSRFWRALTVPLPPRLAMEVSRWTPAAGLLLLLLLPLAATPSRAATMARSPSSSTAVFQLQGDVYPTGHYYVTMNIGNPAKPYFLDVDTGSDLTWLQCDAPCRSCNKVPHPLYRPTANRLVPCANALCTALHSGQGSNNKCPSPKQCDYQIKYTDSASSQGVLINDSFSLPMRSSNIRPGLTFGCGYDQQVGKNGAVQAAIDGMLGLGRGSVSLVSQLKQQGITKNVVGHCLSTNGGGFLFFGDDVVPSSRVTWVPMAQRTSGNYYSPGSGTLYFDRRSLGVKPMEVVFDSGSTYTYFTAQPYQAVVSALKGGLSKSLKQVSDPTLPLCWKGQKAFKSVFDVKNEFKSMFLSFSSAKNAAMEIPPENYLIVTKNGNVCLGILDGTAAKLSFNVIGDITMQDQMVIYDNEKSQLGWARGACTRSAKSILSSFP

SEQ ID NO: 16338 - protein, 415 aa, Zea mays subsp. mays
  peptide (1)..(415): Ceres Seq. ID no. 12367783
  misc_feature (59)..(401): Pfam Name: Eukaryotic aspartyl protease Pfam Description: Eukaryotic aspartyl protease
  misc_feature (6)..(413): Homolog of NCBI NO: 7489412 NR Description: probable aspartic proteinase (EC 3.4.23.-) -
  misc_feature (37)..(355): Homolog of NCBI NO: 7484812 NR Description: aspartic proteinase homolog F17M5.250 -
  misc_feature (36)..(405): Homolog of NCBI NO: 30699261 NR Description: nucellin protein, putative [Arabidopsis thaliana]
  misc_feature (36)..(414): Homolog of NCBI NO: 25350204 NR Description: nucellin-like protein, 27671-25467
  misc_feature (36)..(414): Homolog of NCBI NO: 30699263 NR Description: nucellin protein, putative [Arabidopsis thaliana]
  misc_feature (13)..(409): Homolog of NCBI NO: 15219354 NR Description: nucellin, putative; protein id: At1g44130.1
  misc_feature (37)..(407): Homolog of NCBI NO: 26452545 NR Description: putative nucellin [Arabidopsis thaliana]
  misc_feature (37)..(407): Homolog of NCBI NO: 18418224 NR Description: nucellin -like protein
  misc_feature (20)..(409): Homolog of NCBI NO: 33340111 NR Description: nucellin-like protein [Oryza sativa]
  misc_feature (59)..(415): Homolog of NCBI NO: 21805926 NR Description: nucellin-like aspartic protease [Zea mays]
MEVSRWTPAAGLLLLLLLPLAATPSRAATMARSPSSSTAVFQLQGDVYPTGHYYVTMNIGNPAKPYFLDVDTGSDLTWLQCDAPCRSCNKVPHPLYRPTANRLVPCANALCTALHSGQGSNNKCPSPKQCDYQIKYTDSASSQGVLINDSFSLPMRSSNIRPGLTFGCGYDQQVGKNGAVQAAIDGMLGLGRGSVSLVSQLKQQGITKNVVGHCLSTNGGGFLFFGDDVVPSSRVTWVPMAQRTSGNYYSPGSGTLYFDRRSLGVKPMEVVFDSGSTYTYFTAQPYQAVVSALKGGLSKSLKQVSDPTLPLCWKGQKAFKSVFDVKNEFKSMFLSFSSAKNAAMEIPPENYLIVTKNGNVCLGILDGTAAKLSFNVIGDITMQDQMVIYDNEKSQLGWARGACTRSAKSILSSFP

SEQ ID NO: 16339 - protein, 386 aa, Zea mays subsp. mays
  peptide (1)..(386): Ceres Seq. ID no. 12367784
  misc_feature (30)..(372): Pfam Name: Eukaryotic aspartyl protease Pfam Description: Eukaryotic aspartyl protease
  misc_feature (1)..(384): Homolog of NCBI NO: 7489412 NR Description: probable aspartic proteinase (EC 3.4.23.-) -
  misc_feature (8)..(326): Homolog of NCBI NO: 7484812 NR Description: aspartic proteinase homolog F17M5.250 -
  misc_feature (7)..(376): Homolog of NCBI NO: 30699261 NR Description: nucellin protein, putative [Arabidopsis thaliana]
  misc_feature (7)..(385): Homolog of NCBI NO: 25350204 NR Description: nucellin-like protein, 27671-25467
  misc_feature (7)..(385): Homolog of NCBI NO: 30699263 NR Description: nucellin protein, putative [Arabidopsis thaliana]
  misc_feature (1)..(380): Homolog of NCBI NO: 15219354 NR Description: nucellin, putative; protein id: At1g44130.1
  misc_feature (8)..(378): Homolog of NCBI NO: 26452545 NR Description: putative nucellin [Arabidopsis thaliana]
  misc_feature (8)..(378): Homolog of NCBI NO: 18418224 NR Description: nucellin -like protein
  misc_feature (1)..(380): Homolog of NCBI NO: 33340111 NR Description: nucellin-like protein [Oryza sativa]
  misc_feature (30)..(386): Homolog of NCBI NO: 21805926 NR Description: nucellin-like aspartic protease [Zea mays]
MARSPSSSTAVFQLQGDVYPTGHYYVTMNIGNPAKPYFLDVDTGSDLTWLQCDAPCRSCNKVPHPLYRPTANRLVPCANALCTALHSGQGSNNKCPSPKQCDYQIKYTDSASSQGVLINDSFSLPMRSSNIRPGLTFGCGYDQQVGKNGAVQAAIDGMLGLGRGSVSLVSQLKQQGITKNVVGHCLSTNGGGFLFFGDDVVPSSRVTWVPMAQRTSGNYYSPGSGTLYFDRRSLGVKPMEVVFDSGSTYTYFTAQPYQAVVSALKGGLSKSLKQVSDPTLPLCWKGQKAFKSVFDVKNEFKSMFLSFSSAKNAAMEIPPENYLIVTKNGNVCLGILDGTAAKLSFNVIGDITMQDQMVIYDNEKSQLGWARGACTRSAKSILSSFP

SEQ ID NO: 16340 - DNA, 1050 bp, Zea mays subsp. mays
  misc_feature (1)..(1050): Ceres Seq. ID no. 12361897
  misc_feature: MA Experiment ID: 108556 Result: Down-regulated in Transcription
  misc_feature: MA Experiment 108556 PARAMETER Experiment Name: Zm_Drought_P Parameter: Age (day) Value: 9
  misc_feature: MA Experiment 108556 PARAMETER Experiment Name: Zm_Drought_P Parameter: Organism Value: Zea mays
  misc_feature: MA Experiment 108556 PARAMETER Experiment Name: Zm_Drought_P Parameter: Plant Line Value: 35A19
  misc_feature: MA Experiment 108556 PARAMETER Experiment Name: Zm_Drought_P Parameter: Timepoint (hr) Value: 24
  misc_feature: MA Experiment 108556 PARAMETER Experiment Name: Zm_Drought_P Parameter: Tissue Value: Aerial
  misc_feature: MA Experiment 108556 PARAMETER Experiment Name: Zm_Drought_P Parameter: Treatment Value: Drought vs. No Drought
  misc_feature: MA Experiment ID: 20000478 Result: Down-regulated in Transcription
  misc_feature: MA Experiment 20000478 PARAMETER Experiment Name: Zm_5mM_SA_P Parameter: Age (day) Value: 11
  misc_feature: MA Experiment 20000478 PARAMETER Experiment Name: Zm_5mM_SA_P Parameter: Organism Value: Zea mays
  misc_feature: MA Experiment 20000478 PARAMETER Experiment Name: Zm_5mM_SA_P Parameter: Plant Line Value: 35A19
  misc_feature: MA Experiment 20000478 PARAMETER Experiment Name: Zm_5mM_SA_P Parameter: Timepoint (hr) Value: 72
  misc_feature: MA Experiment 20000478 PARAMETER Experiment Name: Zm_5mM_SA_P Parameter: Tissue Value: Aerial
  misc_feature: MA Experiment 20000478 PARAMETER Experiment Name: Zm_5mM_SA_P Parameter: Treatment Value: 5mM SA vs. No Treatment
  misc_feature: MA Experiment ID: 20000479 Result: Down-regulated in Transcription
  misc_feature: MA Experiment 20000479 PARAMETER Experiment Name: Zm_Drought_P Parameter: Age (day) Value: 10
  misc_feature: MA Experiment 20000479 PARAMETER Experiment Name: Zm_Drought_P Parameter: Organism Value: Zea mays
  misc_feature: MA Experiment 20000479 PARAMETER Experiment Name: Zm_Drought_P Parameter: Plant Line Value: 35A19
  misc_feature: MA Experiment 20000479 PARAMETER Experiment Name: Zm_Drought_P Parameter: Timepoint (hr) Value: 48
  misc_feature: MA Experiment 20000479 PARAMETER Experiment Name: Zm_Drought_P Parameter: Tissue Value: Aerial
  misc_feature: MA Experiment 20000479 PARAMETER Experiment Name: Zm_Drought_P Parameter: Treatment Value: Drought vs. No Drought
  misc_feature: MA Experiment ID: 20000480 Result: Down-regulated in Transcription
  misc_feature: MA Experiment 20000480 PARAMETER Experiment Name: Zm_Drought_P Parameter: Age (day) Value: 11
  misc_feature: MA Experiment 20000480 PARAMETER Experiment Name: Zm_Drought_P Parameter: Organism Value: Zea mays
  misc_feature: MA Experiment 20000480 PARAMETER Experiment Name: Zm_Drought_P Parameter: Plant Line Value: 35A19
  misc_feature: MA Experiment 20000480 PARAMETER Experiment Name: Zm_Drought_P Parameter: Timepoint (hr) Value: 72
  misc_feature: MA Experiment 20000480 PARAMETER Experiment Name: Zm_Drought_P Parameter: Tissue Value: Aerial
  misc_feature: MA Experiment 20000480 PARAMETER Experiment Name: Zm_Drought_P Parameter: Treatment Value: Drought vs. No Drought
gacatttatggcaaaagagaggtcatacagaagctaagacagcacctcaagaaacgtgatgagatgatcatggagatgcaaactcagattgctgatcttaagaactctcttaacattcaggtgacacagtccagcaatctgcagtctcaattggatgctgccaatcgtgatctgtttgaatctgaacgagagattcagcatctaaggaagattattgcagatcattgtgtcacagaagcactctctcatgataaacctttgcaagctgcgcattggcagccagatgccgcaaatgggcattctaatggctatggtgatggttgtgttgatgatgctgacctgcattgtattagcatcgagaagaggaaggtagaagtagagagggtggagatgctcaagaaagaggtggttgaactgaaggaagtcattgagggaaaggactttgtgcttcagagctacaaggaacagaaggtggaactcttctcaaagatcagggagttgcaggaaaagctctcagcacaagtgccaatcatcttgtaggatctatctgtgatactttttagaagattgaatctaagcataatgttgccatgtcccatgagcagcagagggggtcccgcttcagtgaagattgcagaaggtcttggcatttggcaatcgtcacgcatgccaaacaccatgctaggatctttgtggaatgcttctcttttcctttgaggggagctttgcataatgttaggttgatttgtttctttcttggttgtcataatgttaggttggtttgctttcttccttcttcaatatctagcccttggttgctcaaagtttacaaagggattctttttttcagttgctaggcctcaggtaactcaattgaacttcatactcaagttgctgtacaggttctcagatttcaggagacacagaagtctgtactgtgcctctgcctcctgtttcatgcttttttttttgttaagtgatctttggaatgttaggtccatgacatttctactatgagatttgaagactatggcattgcccttttttgtg

SEQ ID NO: 16341 - protein, 179 aa, Zea mays subsp. mays
  peptide (1)..(179): Ceres Seq. ID no. 12361898
  misc_feature (95)..(179): Homolog of NCBI NO: 21536672 NR Description: unknown [Arabidopsis thaliana]
  misc_feature (95)..(179): Homolog of NCBI NO: 18417030 NR Description: expressed protein
  misc_feature (95)..(179): Homolog of NCBI NO: 7487506 NR Description: hypothetical protein T29A15.110 - Arabidopsis
  misc_feature (1)..(164): Homolog of NCBI NO: 21536672 NR Description: unknown [Arabidopsis thaliana]
  misc_feature (1)..(164): Homolog of NCBI NO: 18417030 NR Description: expressed protein
  misc_feature (1)..(164): Homolog of NCBI NO: 7487506 NR Description: hypothetical protein T29A15.110 - Arabidopsis
  misc_feature (1)..(179): Homolog of NCBI NO: 30687652 NR Description: expressed protein [Arabidopsis thaliana]
  misc_feature (1)..(179): Homolog of NCBI NO: 7487505 NR Description: hypothetical protein T29A15.100 - Arabidopsis
DIYGKREVIQKLRQHLKKRDEMIMEMQTQIADLKNSLNIQVTQSSNLQSQLDAANRDLFESEREIQHLRKIIADHCVTEALSHDKPLQAAHWQPDAANGHSNGYGDGCVDDADLHCISIEKRKVEVERVEMLKKEVVELKEVIEGKDFVLQSYKEQKVELFSKIRELQEKLSAQVPIIL

SEQ ID NO: 16342 - protein, 158 aa, Zea mays subsp. mays
  peptide (1)..(158): Ceres Seq. ID no. 12361899
  misc_feature (74)..(158): Homolog of NCBI NO: 21536672 NR Description: unknown [Arabidopsis thaliana]
  misc_feature (74)..(158): Homolog of NCBI NO: 18417030 NR Description: expressed protein
  misc_feature (74)..(158): Homolog of NCBI NO: 7487506 NR Description: hypothetical protein T29A15.110 - Arabidopsis
  misc_feature (1)..(143): Homolog of NCBI NO: 18417030 NR Description: expressed protein
  misc_feature (1)..(143): Homolog of NCBI NO: 21536672 NR Description: unknown [Arabidopsis thaliana]
  misc_feature (1)..(143): Homolog of NCBI NO: 7487506 NR Description: hypothetical protein T29A15.110 - Arabidopsis
  misc_feature (1)..(158): Homolog of NCBI NO: 30687652 NR Description: expressed protein [Arabidopsis thaliana]
  misc_feature (1)..(158): Homolog of NCBI NO: 7487505 NR Description: hypothetical protein T29A15.100 - Arabidopsis
MIMEMQTQIADLKNSLNIQVTQSSNLQSQLDAANRDLFESEREIQHLRKIIADHCVTEALSHDKPLQAAHWQPDAANGHSNGYGDGCVDDADLHCISIEKRKVEVERVEMLKKEVVELKEVIEGKDFVLQSYKEQKVELFSKIRELQEKLSAQVPIIL

SEQ ID NO: 16343 - protein, 156 aa, Zea mays subsp. mays
  peptide (1)..(156): Ceres Seq. ID no. 12361900
  misc_feature (72)..(156): Homolog of NCBI NO: 21536672 NR Description: unknown [Arabidopsis thaliana]
  misc_feature (72)..(156): Homolog of NCBI NO: 18417030 NR Description: expressed protein
  misc_feature (72)..(156): Homolog of NCBI NO: 7487506 NR Description: hypothetical protein T29A15.110 - Arabidopsis
  misc_feature (1)..(141): Homolog of NCBI NO: 18417030 NR Description: expressed protein
  misc_feature (1)..(141): Homolog of NCBI NO: 21536672 NR Description: unknown [Arabidopsis thaliana]
  misc_feature (1)..(141): Homolog of NCBI NO: 7487506 NR Description: hypothetical protein T29A15.110 - Arabidopsis
  misc_feature (1)..(156): Homolog of NCBI NO: 30687652 NR Description: expressed protein [Arabidopsis thaliana]
  misc_feature (1)..(156): Homolog of NCBI NO: 7487505 NR Description: hypothetical protein T29A15.100 - Arabidopsis
MEMQTQIADLKNSLNIQVTQSSNLQSQLDAANRDLFESEREIQHLRKIIADHCVTEALSHDKPLQAAHWQPDAANGHSNGYGDGCVDDADLHCISIEKRKVEVERVEMLKKEVVELKEVIEGKDFVLQSYKEQKVELFSKIRELQEKLSAQVPIIL

SEQ ID NO: 16344 - DNA, 916 bp, Zea mays subsp. mays
  misc_feature (1)..(916): Ceres Seq. ID no. 12382210
  misc_feature: MA Experiment ID: 108504 Result: Up-regulated in Transcription
  misc_feature: MA Experiment 108504 PARAMETER Experiment Name: Zm_Drought_P Parameter: Age (day) Value: 8
  misc_feature: MA Experiment 108504 PARAMETER Experiment Name: Zm_Drought_P Parameter: Organism Value: Zea mays
  misc_feature: MA Experiment 108504 PARAMETER Experiment Name: Zm_Drought_P Parameter: Plant Line Value: 35A19
  misc_feature: MA Experiment 108504 PARAMETER Experiment Name: Zm_Drought_P Parameter: Timepoint (hr) Value: 12
  misc_feature: MA Experiment 108504 PARAMETER Experiment Name: Zm_Drought_P Parameter: Tissue Value: Aerial
  misc_feature: MA Experiment 108504 PARAMETER Experiment Name: Zm_Drought_P Parameter: Treatment Value: Drought vs. No Drought
  misc_feature: MA Experiment ID: 108515 Result: Up-regulated in Transcription
  misc_feature: MA Experiment 108515 PARAMETER Experiment Name: Zm_2mM_SA_P Parameter: Age (day) Value: 8
  misc_feature: MA Experiment 108515 PARAMETER Experiment Name: Zm_2mM_SA_P Parameter: Organism Value: Zea mays
  misc_feature: MA Experiment 108515 PARAMETER Experiment Name: Zm_2mM_SA_P Parameter: Plant Line Value: 35A19
  misc_feature: MA Experiment 108515 PARAMETER Experiment Name: Zm_2mM_SA_P Parameter: Timepoint (hr) Value: 12
  misc_feature: MA Experiment 108515 PARAMETER Experiment Name: Zm_2mM_SA_P Parameter: Tissue Value: Aerial
  misc_feature: MA Experiment 108515 PARAMETER Experiment Name: Zm_2mM_SA_P Parameter: Treatment Value: 2mM SA vs. No Treatment
  misc_feature: MA Experiment ID: 108523 Result: Up-regulated in Transcription
  misc_feature: MA Experiment 108523 PARAMETER Experiment Name: Zm_42deg_Heat_P Parameter: Age (day) Value: 8
  misc_feature: MA Experiment 108523 PARAMETER Experiment Name: Zm_42deg_Heat_P Parameter: Organism Value: Zea mays
  misc_feature: MA Experiment 108523 PARAMETER Experiment Name: Zm_42deg_Heat_P Parameter: Plant Line Value: 35A19
  misc_feature: MA Experiment 108523 PARAMETER Experiment Name: Zm_42deg_Heat_P Parameter: Temperature (deg C) Value: 42 vs. 22
  misc_feature: MA Experiment 108523 PARAMETER Experiment Name: Zm_42deg_Heat_P Parameter: Timepoint (hr) Value: 6
  misc_feature: MA Experiment 108523 PARAMETER Experiment Name: Zm_42deg_Heat_P Parameter: Tissue Value: Aerial
  misc_feature: MA Experiment ID: 108528 Result: Down-regulated in Transcription
  misc_feature: MA Experiment 108528 PARAMETER Experiment Name: Zm_Imbibed_Seeds_P Parameter: Age (day) Value: 5 vs. 2
  misc_feature: MA Experiment 108528 PARAMETER Experiment Name: Zm_Imbibed_Seeds_P Parameter: Organism Value: Zea mays
  misc_feature: MA Experiment 108528 PARAMETER Experiment Name: Zm_Imbibed_Seeds_P Parameter: Plant Line Value: 35A19
  misc_feature: MA Experiment 108528 PARAMETER Experiment Name: Zm_Imbibed_Seeds_P Parameter: Tissue Value: Aerial vs. Embryo
  misc_feature: MA Experiment ID: 108529 Result: Down-regulated in Transcription
  misc_feature: MA Experiment 108529 PARAMETER Experiment Name: Zm_Imbibed_Seeds_P Parameter: Age (day) Value: 5 vs. 2
  misc_feature: MA Experiment 108529 PARAMETER Experiment Name: Zm_Imbibed_Seeds_P Parameter: Organism Value: Zea mays
  misc_feature: MA Experiment 108529 PARAMETER Experiment Name: Zm_Imbibed_Seeds_P Parameter: Plant Line Value: 35A19
  misc_feature: MA Experiment 108529 PARAMETER Experiment Name: Zm_Imbibed_Seeds_P Parameter: Tissue Value: Roots vs. Embryo
  misc_feature: MA Experiment ID: 108530 Result: Down-regulated in Transcription
  misc_feature: MA Experiment 108530 PARAMETER Experiment Name: Zm_Imbibed_Seeds_P Parameter: Age (day) Value: 6 vs. 2
  misc_feature: MA Experiment 108530 PARAMETER Experiment Name: Zm_Imbibed_Seeds_P Parameter: Organism Value: Zea mays
  misc_feature: MA Experiment 108530 PARAMETER Experiment Name: Zm_Imbibed_Seeds_P Parameter: Plant Line Value: 35A19
  misc_feature: MA Experiment 108530 PARAMETER Experiment Name: Zm_Imbibed_Seeds_P Parameter: Tissue Value: Aerial vs. Embryo
  misc_feature: MA Experiment ID: 108545 Result: Down-regulated in Transcription
  misc_feature: MA Experiment 108545 PARAMETER Experiment Name: Zm_Imbibed_Seeds_P Parameter: Age (day) Value: 3 vs. 2
  misc_feature: MA Experiment 108545 PARAMETER Experiment Name: Zm_Imbibed_Seeds_P Parameter: Organism Value: Zea mays
  misc_feature: MA Experiment 108545 PARAMETER Experiment Name: Zm_Imbibed_Seeds_P Parameter: Plant Line Value: 35A19
  misc_feature: MA Experiment 108545 PARAMETER Experiment Name: Zm_Imbibed_Seeds_P Parameter: Tissue Value: Aerial vs. Embryo
  misc_feature: MA Experiment ID: 108547 Result: Down-regulated in Transcription
  misc_feature: MA Experiment 108547 PARAMETER Experiment Name: Zm_Imbibed_Seeds_P Parameter: Age (day) Value: 4 vs. 2
  misc_feature: MA Experiment 108547 PARAMETER Experiment Name: Zm_Imbibed_Seeds_P Parameter: Organism Value: Zea mays
  misc_feature: MA Experiment 108547 PARAMETER Experiment Name: Zm_Imbibed_Seeds_P Parameter: Plant Line Value: 35A19
  misc_feature: MA Experiment 108547 PARAMETER Experiment Name: Zm_Imbibed_Seeds_P Parameter: Tissue Value: Aerial vs. Embryo
  misc_feature: MA Experiment ID: 108556 Result: Up-regulated in Transcription
  misc_feature: MA Experiment 108556 PARAMETER Experiment Name: Zm_Drought_P Parameter: Age (day) Value: 9
  misc_feature: MA Experiment 108556 PARAMETER Experiment Name: Zm_Drought_P Parameter: Organism Value: Zea mays
  misc_feature: MA Experiment 108556 PARAMETER Experiment Name: Zm_Drought_P Parameter: Plant Line Value: 35A19
  misc_feature: MA Experiment 108556 PARAMETER Experiment Name: Zm_Drought_P Parameter: Timepoint (hr) Value: 24
  misc_feature: MA Experiment 108556 PARAMETER Experiment Name: Zm_Drought_P Parameter: Tissue Value: Aerial
  misc_feature: MA Experiment 108556 PARAMETER Experiment Name: Zm_Drought_P Parameter: Treatment Value: Drought vs. No Drought
  misc_feature: MA Experiment ID: 108597 Result: Up-regulated in Transcription
  misc_feature: MA Experiment 108597 PARAMETER Experiment Name: Zm_100uM_ABA_P Parameter: Age (day) Value: 9
  misc_feature: MA Experiment 108597 PARAMETER Experiment Name: Zm_100uM_ABA_P Parameter: Organism Value: Zea mays
  misc_feature: MA Experiment 108597 PARAMETER Experiment Name: Zm_100uM_ABA_P Parameter: Plant Line Value: 35A19
  misc_feature: MA Experiment 108597 PARAMETER Experiment Name: Zm_100uM_ABA_P Parameter: Timepoint (hr) Value: 24
  misc_feature: MA Experiment 108597 PARAMETER Experiment Name: Zm_100uM_ABA_P Parameter: Tissue Value: Aerial
  misc_feature: MA Experiment 108597 PARAMETER Experiment Name: Zm_100uM_ABA_P Parameter: Treatment Value: 100uM ABA vs. No Treatment
  misc_feature: MA Experiment ID: 108689 Result: Down-regulated in Transcription
  misc_feature: MA Experiment 108689 PARAMETER Experiment Name: Zm_Drought_Roots_P Parameter: Age (day) Value: 9
  misc_feature: MA Experiment 108689 PARAMETER Experiment Name: Zm_Drought_Roots_P Parameter: Organism Value: Zea mays
  misc_feature: MA Experiment 108689 PARAMETER Experiment Name: Zm_Drought_Roots_P Parameter: Plant Line Value: 35A19
  misc_feature: MA Experiment 108689 PARAMETER Experiment Name: Zm_Drought_Roots_P Parameter: Timepoint (hr) Value: 24
  misc_feature: MA Experiment 108689 PARAMETER Experiment Name: Zm_Drought_Roots_P Parameter: Tissue Value: Roots
  misc_feature: MA Experiment 108689 PARAMETER Experiment Name: Zm_Drought_Roots_P Parameter: Treatment Value: Drought vs. No Drought
  misc_feature: MA Experiment ID: 20000477 Result: Up-regulated in Transcription
  misc_feature: MA Experiment 20000477 PARAMETER Experiment Name: Zm_5mM_SA_P Parameter: Age (day) Value: 10
  misc_feature: MA Experiment 20000477 PARAMETER Experiment Name: Zm_5mM_SA_P Parameter: Organism Value: Zea mays
  misc_feature: MA Experiment 20000477 PARAMETER Experiment Name: Zm_5mM_SA_P Parameter: Plant Line Value: 35A19
  misc_feature: MA Experiment 20000477 PARAMETER Experiment Name: Zm_5mM_SA_P Parameter: Timepoint (hr) Value: 48
  misc_feature: MA Experiment 20000477 PARAMETER Experiment Name: Zm_5mM_SA_P Parameter: Tissue Value: Aerial
  misc_feature: MA Experiment 20000477 PARAMETER Experiment Name: Zm_5mM_SA_P Parameter: Treatment Value: 5mM SA vs. No Treatment
  misc_feature: MA Experiment ID: 20000478 Result: Up-regulated in Transcription
  misc_feature: MA Experiment 20000478 PARAMETER Experiment Name: Zm_5mM_SA_P Parameter: Age (day) Value: 11
  misc_feature: MA Experiment 20000478 PARAMETER Experiment Name: Zm_5mM_SA_P Parameter: Organism Value: Zea mays
  misc_feature: MA Experiment 20000478 PARAMETER Experiment Name: Zm_5mM_SA_P Parameter: Plant Line Value: 35A19
  misc_feature: MA Experiment 20000478 PARAMETER Experiment Name: Zm_5mM_SA_P Parameter: Timepoint (hr) Value: 72
  misc_feature: MA Experiment 20000478 PARAMETER Experiment Name: Zm_5mM_SA_P Parameter: Tissue Value: Aerial
  misc_feature: MA Experiment 20000478 PARAMETER Experiment Name: Zm_5mM_SA_P Parameter: Treatment Value: 5mM SA vs. No Treatment
  misc_feature: MA Experiment ID: 20000479 Result: Up-regulated in Transcription
  misc_feature: MA Experiment 20000479 PARAMETER Experiment Name: Zm_Drought_P Parameter: Age (day) Value: 10
  misc_feature: MA Experiment 20000479 PARAMETER Experiment Name: Zm_Drought_P Parameter: Organism Value: Zea mays
  misc_feature: MA Experiment 20000479 PARAMETER Experiment Name: Zm_Drought_P Parameter: Plant Line Value: 35A19
  misc_feature: MA Experiment 20000479 PARAMETER Experiment Name: Zm_Drought_P Parameter: Timepoint (hr) Value: 48
  misc_feature: MA Experiment 20000479 PARAMETER Experiment Name: Zm_Drought_P Parameter: Tissue Value: Aerial
  misc_feature: MA Experiment 20000479 PARAMETER Experiment Name: Zm_Drought_P Parameter: Treatment Value: Drought vs. No Drought
  misc_feature: MA Experiment ID: 20000492 Result: Down-regulated in Transcription
  misc_feature: MA Experiment 20000492 PARAMETER Experiment Name: Zm_Hybrid_Seed_Dev_P Parameter: DAP Value: 12
  misc_feature: MA Experiment 20000492 PARAMETER Experiment Name: Zm_Hybrid_Seed_Dev_P Parameter: Organism Value: Zea mays
  misc_feature: MA Experiment 20000492 PARAMETER Experiment Name: Zm_Hybrid_Seed_Dev_P Parameter: Plant Line Value: 35A19
  misc_feature: MA Experiment 20000492 PARAMETER Experiment Name: Zm_Hybrid_Seed_Dev_P Parameter: Tissue Value: Fert Kernel vs. Unfert Floret
  misc_feature: MA Experiment ID: 20000532 Result: Up-regulated in Transcription
  misc_feature: MA Experiment 20000532 PARAMETER Experiment Name: Zm_0.001percent_MeJA_P Parameter: Age (day) Value: 10
  misc_feature: MA Experiment 20000532 PARAMETER Experiment Name: Zm_0.001percent_MeJA_P Parameter: Organism Value: Zea mays
  misc_feature: MA Experiment 20000532 PARAMETER Experiment Name: Zm_0.001percent_MeJA_P Parameter: Plant Line Value: 35A19
  misc_feature: MA Experiment 20000532 PARAMETER Experiment Name: Zm_0.001percent_MeJA_P Parameter: Timepoint (hr) Value: 48
  misc_feature: MA Experiment 20000532 PARAMETER Experiment Name: Zm_0.001percent_MeJA_P Parameter: Tissue Value: Aerial
  misc_feature: MA Experiment 20000532 PARAMETER Experiment Name: Zm_0.001percent_MeJA_P Parameter: Treatment Value: 0.001percent MeJA vs. No Treatment
  misc_feature: MA Experiment ID: 20000533 Result: Up-regulated in Transcription
  misc_feature: MA Experiment 20000533 PARAMETER Experiment Name: Zm_0.001percent_MeJA_P Parameter: Age (day) Value: 11
  misc_feature: MA Experiment 20000533 PARAMETER Experiment Name: Zm_0.001percent_MeJA_P Parameter: Organism Value: Zea mays
  misc_feature: MA Experiment 20000533 PARAMETER Experiment Name: Zm_0.001percent_MeJA_P Parameter: Plant Line Value: 35A19
  misc_feature: MA Experiment 20000533 PARAMETER Experiment Name: Zm_0.001percent_MeJA_P Parameter: Timepoint (hr) Value: 72
  misc_feature: MA Experiment 20000533 PARAMETER Experiment Name: Zm_0.001percent_MeJA_P Parameter: Tissue Value: Aerial
  misc_feature: MA Experiment 20000533 PARAMETER Experiment Name: Zm_0.001percent_MeJA_P Parameter: Treatment Value: 0.001percent MeJA vs. No Treatment
  misc_feature: MA Experiment ID: 20000535 Result: Down-regulated in Transcription
  misc_feature: MA Experiment 20000535 PARAMETER Experiment Name: Zm_Hybrid_Seed_Dev_P Parameter: DAP Value: 30 vs. 12
  misc_feature: MA Experiment 20000535 PARAMETER Experiment Name: Zm_Hybrid_Seed_Dev_P Parameter: Organism Value: Zea mays
  misc_feature: MA Experiment 20000535 PARAMETER Experiment Name: Zm_Hybrid_Seed_Dev_P Parameter: Plant Line Value: 35A19
  misc_feature: MA Experiment 20000535 PARAMETER Experiment Name: Zm_Hybrid_Seed_Dev_P Parameter: Tissue Value: Embryo vs. Unfert Floret
aacacagcacgcaagcacacacaacaaccacacttgcaccgagctagcagccaagatggcgaccaaacacttggctctttgcctccttgttctccttagcataggcatgggcatggccaccgctgctgcaaaccgcaaactgggttatggccccgggggaggaggtggcggtggtggtagcggtggaggcggtggttacggaggaccaggctatgggtccggatcagggtatggtgagggcggtggcagcggaggtgctgctggagggtatggacatggtggcggcggcggtggcggtggtggtgagggcgcgggagctggtggctctgggtacgggtccgggcaaggatctggctacggagctggcagcggtgctgccggtggatatgggagtggcggaggtggtggaggtggaggtggcggtggccagggtggtggttccggatatggccatggaggtggtgaaggatacggctctgggtctggctttggtggtggtgctgctggcggcggcggtgnacatggtgncggtggtggcgncggccaaggtgggtctggctatggctctggctctggctctggctcgggatatggatcaggtgaaggatacggacaaggtggtgctcatggaggaggctatgnaagcggtggtgncggtgnaggtgncggtggtcaaggtggtggtggctctggctatgggtctggatccggctccggttatggaggtggcaacgacaacggacattactaggctctttttcagagctaggaacatgttatacaaatatgtcaccagacatgagtaggtcttgctgcatgggatgctagttgtgtccatcgtgtgtgtaacaccgcaaggcttgtaatttgtcctgtaaactgcttgctgctttacattactggcaacaactaagtg

SEQ ID NO: 16345 - protein, 249 aa, Zea mays subsp. mays
  peptide (1)..(249): Ceres Seq. ID no. 12382211
  misc_feature (48)..(248): Pfam Name: Dehydrin Pfam Description: Dehydrin
  misc_feature (37)..(247): Homolog of NCBI NO: 121627 NR Description: GLYCINE-RICH CELL WALL STRUCTURAL PROTEIN 1
  misc_feature (47)..(243): Homolog of NCBI NO: 30679122 NR Description: expressed protein [Arabidopsis thaliana]
  misc_feature (47)..(243): Homolog of NCBI NO: 30679122 NR Description: expressed protein [Arabidopsis thaliana]
  misc_feature (47)..(247): Homolog of NCBI NO: 30679126 NR Description: expressed protein [Arabidopsis thaliana]
  misc_feature (48)..(247): Homolog of NCBI NO: 322647 NR Description: glycine-rich protein GRP22 - rape
  misc_feature (21)..(248): Homolog of NCBI NO: 37534920 NR Description: putative glycine-rich protein
  misc_feature (19)..(249): Homolog of NCBI NO: 121628 NR Description: GLYCINE-RICH CELL WALL STRUCTURAL PROTEIN 1.0
  misc_feature (21)..(206): Homolog of NCBI NO: 37534902 NR Description: putative glycine-rich protein
  misc_feature (21)..(203): Homolog of NCBI NO: 232183 NR Description: Glycine-rich cell wall structural protein 2
  misc_feature (21)..(249): Homolog of NCBI NO: 37534900 NR Description: putative glycine-rich protein
  misc_feature (173)..(173): Xaa is any aa, unknown or other
  misc_feature (176)..(176): Xaa is any aa, unknown or other
  misc_feature (180)..(180): Xaa is any aa, unknown or other
  misc_feature (214)..(214): Xaa is any aa, unknown or other
  misc_feature (218)..(218): Xaa is any aa, unknown or other
  misc_feature (220)..(220): Xaa is any aa, unknown or other
  misc_feature (222)..(222): Xaa is any aa, unknown or other
TQHASTHNNHTCTELAAKMATKHLALCLLVLLSIGMGMATAAANRKLGYGPGGGGGGGGSGGGGGYGGPGYGSGSGYGEGGGSGGAAGGYGHGGGGGGGGGEGAGAGGSGYGSGQGSGYGAGSGAAGGYGSGGGGGGGGGGGQGGGSGYGHGGGEGYGSGSGFGGGAAGGGGXHGXGGGXGQGGSGYGSGSGSGSGYGSGEGYGQGGAHGGGYXSGGXGXGXGGQGGGGSGYGSGSGSGYGGGNDNGHY

SEQ ID NO: 16346 - protein, 231 aa, Zea mays subsp. mays
  peptide (1)..(231): Ceres Seq. ID no. 12382212
  misc_feature (30)..(230): Pfam Name: Dehydrin Pfam Description: Dehydrin
  misc_feature (19)..(229): Homolog of NCBI NO: 121627 NR Description: GLYCINE-RICH CELL WALL STRUCTURAL PROTEIN 1
  misc_feature (29)..(225): Homolog of NCBI NO: 30679122 NR Description: expressed protein [Arabidopsis thaliana]
  misc_feature (29)..(225): Homolog of NCBI NO: 30679122 NR Description: expressed protein [Arabidopsis thaliana]
  misc_feature (29)..(229): Homolog of NCBI NO: 30679126 NR Description: expressed protein [Arabidopsis thaliana]
  misc_feature (30)..(229): Homolog of NCBI NO: 322647 NR Description: glycine-rich protein GRP22 - rape
  misc_feature (3)..(230): Homolog of NCBI NO: 37534920 NR Description: putative glycine-rich protein
  misc_feature (1)..(231): Homolog of NCBI NO: 121628 NR Description: GLYCINE-RICH CELL WALL STRUCTURAL PROTEIN 1.0
  misc_feature (3)..(188): Homolog of NCBI NO: 37534902 NR Description: putative glycine-rich protein
  misc_feature (3)..(185): Homolog of NCBI NO: 232183 NR Description: Glycine-rich cell wall structural protein 2
  misc_feature (3)..(231): Homolog of NCBI NO: 37534900 NR Description: putative glycine-rich protein
  misc_feature (155)..(155): Xaa is any aa, unknown or other
  misc_feature (158)..(158): Xaa is any aa, unknown or other
  misc_feature (162)..(162): Xaa is any aa, unknown or other
  misc_feature (196)..(196): Xaa is any aa, unknown or other
  misc_feature (200)..(200): Xaa is any aa, unknown or other
  misc_feature (202)..(202): Xaa is any aa, unknown or other
  misc_feature (204)..(204): Xaa is any aa, unknown or other
MATKHLALCLLVLLSIGMGMATAAANRKLGYGPGGGGGGGGSGGGGGYGGPGYGSGSGYGEGGGSGGAAGGYGHGGGGGGGGGEGAGAGGSGYGSGQGSGYGAGSGAAGGYGSGGGGGGGGGGGQGGGSGYGHGGGEGYGSGSGFGGGAAGGGGXHGXGGGXGQGGSGYGSGSGSGSGYGSGEGYGQGGAHGGGYXSGGXGXGXGGQGGGGSGYGSGSGSGYGGGNDNGHY

SEQ ID NO: 16347 - protein, 219 aa, Zea mays subsp. mays
  peptide (1)..(219): Ceres Seq. ID no. 12382213
  misc_feature (125)..(125): Xaa is any aa, unknown or other
  misc_feature (128)..(128): Xaa is any aa, unknown or other
  misc_feature (132)..(132): Xaa is any aa, unknown or other
  misc_feature (166)..(166): Xaa is any aa, unknown or other
  misc_feature (170)..(170): Xaa is any aa, unknown or other
  misc_feature (172)..(172): Xaa is any aa, unknown or other
  misc_feature (174)..(174): Xaa is any aa, unknown or other
MAPGEEVAVVVAVEAVVTEDQAMGPDQGMVRAVAAEVLLEGMDMVAAAVAVVVRARELVALGTGPGKDLATELAAVLPVDMGVAEVVEVEVAVARVVVPDMAMEVVKDTALGLALVVVLLAAAVXMVXVVAXAKVGLAMALALALARDMDQVKDTDKVVLMEEAMXAVVXVXVXVVKVVVALAMGLDPAPVMEVATTTDITRLFFRARNMLYKYVTRHE

SEQ ID NO: 16348 - DNA, 1622 bp, Zea mays subsp. mays
  misc_feature (1)..(1622): Ceres Seq. ID no. 12381158
  misc_feature: MA Experiment ID: 108522 Result: Up-regulated in Transcription
  misc_feature: MA Experiment 108522 PARAMETER Experiment Name: Zm_42deg_Heat_P Parameter: Age (day) Value: 8
  misc_feature: MA Experiment 108522 PARAMETER Experiment Name: Zm_42deg_Heat_P Parameter: Organism Value: Zea mays
  misc_feature: MA Experiment 108522 PARAMETER Experiment Name: Zm_42deg_Heat_P Parameter: Plant Line Value: 35A19
  misc_feature: MA Experiment 108522 PARAMETER Experiment Name: Zm_42deg_Heat_P Parameter: Temperature (deg C) Value: 42 vs. 22
  misc_feature: MA Experiment 108522 PARAMETER Experiment Name: Zm_42deg_Heat_P Parameter: Timepoint (hr) Value: 1
  misc_feature: MA Experiment 108522 PARAMETER Experiment Name: Zm_42deg_Heat_P Parameter: Tissue Value: Aerial
  misc_feature: MA Experiment ID: 108523 Result: Up-regulated in Transcription
  misc_feature: MA Experiment 108523 PARAMETER Experiment Name: Zm_42deg_Heat_P Parameter: Age (day) Value: 8
  misc_feature: MA Experiment 108523 PARAMETER Experiment Name: Zm_42deg_Heat_P Parameter: Organism Value: Zea mays
  misc_feature: MA Experiment 108523 PARAMETER Experiment Name: Zm_42deg_Heat_P Parameter: Plant Line Value: 35A19
  misc_feature: MA Experiment 108523 PARAMETER Experiment Name: Zm_42deg_Heat_P Parameter: Temperature (deg C) Value: 42 vs. 22
  misc_feature: MA Experiment 108523 PARAMETER Experiment Name: Zm_42deg_Heat_P Parameter: Timepoint (hr) Value: 6
  misc_feature: MA Experiment 108523 PARAMETER Experiment Name: Zm_42deg_Heat_P Parameter: Tissue Value: Aerial
  misc_feature: MA Experiment ID: 108527 Result: Up-regulated in Transcription
  misc_feature: MA Experiment 108527 PARAMETER Experiment Name: Zm_5mM_NO_P Parameter: Age (day) Value: 8
  misc_feature: MA Experiment 108527 PARAMETER Experiment Name: Zm_5mM_NO_P Parameter: Organism Value: Zea mays
  misc_feature: MA Experiment 108527 PARAMETER Experiment Name: Zm_5mM_NO_P Parameter: Plant Line Value: 35A19
  misc_feature: MA Experiment 108527 PARAMETER Experiment Name: Zm_5mM_NO_P Parameter: Timepoint (hr) Value: 6
  misc_feature: MA Experiment 108527 PARAMETER Experiment Name: Zm_5mM_NO_P Parameter: Tissue Value: Aerial
  misc_feature: MA Experiment 108527 PARAMETER Experiment Name: Zm_5mM_NO_P Parameter: Treatment Value: 5mM NO vs. No Treatment
  misc_feature: MA Experiment ID: 108529 Result: Up-regulated in Transcription
  misc_feature: MA Experiment 108529 PARAMETER Experiment Name: Zm_Imbibed_Seeds_P Parameter: Age (day) Value: 5 vs. 2
  misc_feature: MA Experiment 108529 PARAMETER Experiment Name: Zm_Imbibed_Seeds_P Parameter: Organism Value: Zea mays
  misc_feature: MA Experiment 108529 PARAMETER Experiment Name: Zm_Imbibed_Seeds_P Parameter: Plant Line Value: 35A19
  misc_feature: MA Experiment 108529 PARAMETER Experiment Name: Zm_Imbibed_Seeds_P Parameter: Tissue Value: Roots vs. Embryo
  misc_feature: MA Experiment ID: 108534 Result: Up-regulated in Transcription
  misc_feature: MA Experiment 108534 PARAMETER Experiment Name: Zm_4deg_Cold_P Parameter: Age (hr) Value: 8
  misc_feature: MA Experiment 108534 PARAMETER Experiment Name: Zm_4deg_Cold_P Parameter: Organism Value: Zea mays
  misc_feature: MA Experiment 108534 PARAMETER Experiment Name: Zm_4deg_Cold_P Parameter: Plant Line Value: 35A19
  misc_feature: MA Experiment 108534 PARAMETER Experiment Name: Zm_4deg_Cold_P Parameter: Temperature (deg C) Value: 4 vs. 22
  misc_feature: MA Experiment 108534 PARAMETER Experiment Name: Zm_4deg_Cold_P Parameter: Timepoint (hr) Value: 6
  misc_feature: MA Experiment 108534 PARAMETER Experiment Name: Zm_4deg_Cold_P Parameter: Tissue Value: Aerial
  misc_feature: MA Experiment ID: 108535 Result: Down-regulated in Transcription
  misc_feature: MA Experiment 108535 PARAMETER Experiment Name: Zm_Meristem_P Parameter: Age (day) Value: 8
  misc_feature: MA Experiment 108535 PARAMETER Experiment Name: Zm_Meristem_P Parameter: Organism Value: Zea mays
  misc_feature: MA Experiment 108535 PARAMETER Experiment Name: Zm_Meristem_P Parameter: Plant Line Value: 35A19
  misc_feature: MA Experiment 108535 PARAMETER Experiment Name: Zm_Meristem_P Parameter: Tissue Value: Root Meristem vs. Above Root Meristem
  misc_feature: MA Experiment ID: 108545 Result: Down-regulated in Transcription
  misc_feature: MA Experiment 108545 PARAMETER Experiment Name: Zm_Imbibed_Seeds_P Parameter: Age (day) Value: 3 vs. 2
  misc_feature: MA Experiment 108545 PARAMETER Experiment Name: Zm_Imbibed_Seeds_P Parameter: Organism Value: Zea mays
  misc_feature: MA Experiment 108545 PARAMETER Experiment Name: Zm_Imbibed_Seeds_P Parameter: Plant Line Value: 35A19
  misc_feature: MA Experiment 108545 PARAMETER Experiment Name: Zm_Imbibed_Seeds_P Parameter: Tissue Value: Aerial vs. Embryo
  misc_feature: MA Experiment ID: 108546 Result: Up-regulated in Transcription
  misc_feature: MA Experiment 108546 PARAMETER Experiment Name: Zm_Imbibed_Seeds_P Parameter: Age (day) Value: 3 vs. 2
  misc_feature: MA Experiment 108546 PARAMETER Experiment Name: Zm_Imbibed_Seeds_P Parameter: Organism Value: Zea mays
  misc_feature: MA Experiment 108546 PARAMETER Experiment Name: Zm_Imbibed_Seeds_P Parameter: Plant Line Value: 35A19
  misc_feature: MA Experiment 108546 PARAMETER Experiment Name: Zm_Imbibed_Seeds_P Parameter: Tissue Value: Roots vs. Embryo
  misc_feature: MA Experiment ID: 108559 Result: Up-regulated in Transcription
  misc_feature: MA Experiment 108559 PARAMETER Experiment Name: Zm_5mM_NO_P Parameter: Age (day) Value: 8
  misc_feature: MA Experiment 108559 PARAMETER Experiment Name: Zm_5mM_NO_P Parameter: Organism Value: Zea mays
  misc_feature: MA Experiment 108559 PARAMETER Experiment Name: Zm_5mM_NO_P Parameter: Plant Line Value: 35A19
  misc_feature: MA Experiment 108559 PARAMETER Experiment Name: Zm_5mM_NO_P Parameter: Timepoint (hr) Value: 12
  misc_feature: MA Experiment 108559 PARAMETER Experiment Name: Zm_5mM_NO_P Parameter: Tissue Value: Aerial
  misc_feature: MA Experiment 108559 PARAMETER Experiment Name: Zm_5mM_NO_P Parameter: Treatment Value: 5mM NO vs. No Treatment
  misc_feature: MA Experiment ID: 108688 Result: Down-regulated in Transcription
  misc_feature: MA Experiment 108688 PARAMETER Experiment Name: Zm_Embryos-Flowers__P Parameter: Tissue Value: Immature Flowers vs. Aerial+
  misc_feature: MA Experiment ID: 108689 Result: Down-regulated in Transcription
  misc_feature: MA Experiment 108689 PARAMETER Experiment Name: Zm_Drought_Roots_P Parameter: Age (day) Value: 9
  misc_feature: MA Experiment 108689 PARAMETER Experiment Name: Zm_Drought_Roots_P Parameter: Organism Value: Zea mays
  misc_feature: MA Experiment 108689 PARAMETER Experiment Name: Zm_Drought_Roots_P Parameter: Plant Line Value: 35A19
  misc_feature: MA Experiment 108689 PARAMETER Experiment Name: Zm_Drought_Roots_P Parameter: Timepoint (hr) Value: 24
  misc_feature: MA Experiment 108689 PARAMETER Experiment Name: Zm_Drought_Roots_P Parameter: Tissue Value: Roots
  misc_feature: MA Experiment 108689 PARAMETER Experiment Name: Zm_Drought_Roots_P Parameter: Treatment Value: Drought vs. No Drought
  misc_feature: MA Experiment ID: 20000477 Result: Down-regulated in Transcription
  misc_feature: MA Experiment 20000477 PARAMETER Experiment Name: Zm_5mM_SA_P Parameter: Age (day) Value: 10
  misc_feature: MA Experiment 20000477 PARAMETER Experiment Name: Zm_5mM_SA_P Parameter: Organism Value: Zea mays
  misc_feature: MA Experiment 20000477 PARAMETER Experiment Name: Zm_5mM_SA_P Parameter: Plant Line Value: 35A19
  misc_feature: MA Experiment 20000477 PARAMETER Experiment Name: Zm_5mM_SA_P Parameter: Timepoint (hr) Value: 48
  misc_feature: MA Experiment 20000477 PARAMETER Experiment Name: Zm_5mM_SA_P Parameter: Tissue Value: Aerial
  misc_feature: MA Experiment 20000477 PARAMETER Experiment Name: Zm_5mM_SA_P Parameter: Treatment Value: 5mM SA vs. No Treatment
  misc_feature: MA Experiment ID: 20000478 Result: Down-regulated in Transcription
  misc_feature: MA Experiment 20000478 PARAMETER Experiment Name: Zm_5mM_SA_P Parameter: Age (day) Value: 11
  misc_feature: MA Experiment 20000478 PARAMETER Experiment Name: Zm_5mM_SA_P Parameter: Organism Value: Zea mays
  misc_feature: MA Experiment 20000478 PARAMETER Experiment Name: Zm_5mM_SA_P Parameter: Plant Line Value: 35A19
  misc_feature: MA Experiment 20000478 PARAMETER Experiment Name: Zm_5mM_SA_P Parameter: Timepoint (hr) Value: 72
  misc_feature: MA Experiment 20000478 PARAMETER Experiment Name: Zm_5mM_SA_P Parameter: Tissue Value: Aerial
  misc_feature: MA Experiment 20000478 PARAMETER Experiment Name: Zm_5mM_SA_P Parameter: Treatment Value: 5mM SA vs. No Treatment
  misc_feature: MA Experiment ID: 20000488 Result: Down-regulated in Transcription
  misc_feature: MA Experiment 20000488 PARAMETER Experiment Name: Zm_50mM_NH4NO3_L_to_H_P Parameter: Organism Value: Zea mays
  misc_feature: MA Experiment 20000488 PARAMETER Experiment Name: Zm_50mM_NH4NO3_L_to_H_P Parameter: Timepoint (hr) Value: 8
  misc_feature: MA Experiment 20000488 PARAMETER Experiment Name: Zm_50mM_NH4NO3_L_to_H_P Parameter: Tissue Value: Leaves
  misc_feature: MA Experiment 20000488 PARAMETER Experiment Name: Zm_50mM_NH4NO3_L_to_H_P Parameter: Treatment Value: 50mM NH4NO3 vs. 100mM Mannitol
  misc_feature: MA Experiment ID: 20000535 Result: Down-regulated in Transcription
  misc_feature: MA Experiment 20000535 PARAMETER Experiment Name: Zm_Hybrid_Seed_Dev_P Parameter: DAP Value: 30 vs. 12
  misc_feature: MA Experiment 20000535 PARAMETER Experiment Name: Zm_Hybrid_Seed_Dev_P Parameter: Organism Value: Zea mays
  misc_feature: MA Experiment 20000535 PARAMETER Experiment Name: Zm_Hybrid_Seed_Dev_P Parameter: Plant Line Value: 35A19
  misc_feature: MA Experiment 20000535 PARAMETER Experiment Name: Zm_Hybrid_Seed_Dev_P Parameter: Tissue Value: Embryo vs. Unfert Floret
  misc_feature: MA Experiment ID: 20000630 Result: Up-regulated in Transcription
  misc_feature: MA Experiment 20000630 PARAMETER Experiment Name: Zm_Herbicide-Treatments_P Parameter: Timepoint (hr) Value: 4
  misc_feature: MA Experiment 20000630 PARAMETER Experiment Name: Zm_Herbicide-Treatments_P Parameter: Tissue Value: Aerial
  misc_feature: MA Experiment 20000630 PARAMETER Experiment Name: Zm_Herbicide-Treatments_P Parameter: Treatment Value: Roundup vs. No Treatment
  misc_feature: MA Experiment ID: 20001608 Result: Down-regulated in Transcription
  misc_feature: MA Experiment 20001608 PARAMETER Experiment Name: Zm_50ppm_KNO3_L-to-H_P Parameter: Age (day) Value: 21
  misc_feature: MA Experiment 20001608 PARAMETER Experiment Name: Zm_50ppm_KNO3_L-to-H_P Parameter: Organism Value: Zea mays
  misc_feature: MA Experiment 20001608 PARAMETER Experiment Name: Zm_50ppm_KNO3_L-to-H_P Parameter: Plant Line Value: 35A19
  misc_feature: MA Experiment 20001608 PARAMETER Experiment Name: Zm_50ppm_KNO3_L-to-H_P Parameter: Timepoint (hr) Value: 48
  misc_feature: MA Experiment 20001608 PARAMETER Experiment Name: Zm_50ppm_KNO3_L-to-H_P Parameter: Tissue Value: Shoots
  misc_feature: MA Experiment 20001608 PARAMETER Experiment Name: Zm_50ppm_KNO3_L-to-H_P Parameter: Treatment Value: 50ppm KNO3 vs. 50ppm KCl
gcacgagaccattacctagaacatcctaatcgaaaaaaaacccaccaccacaaggaagggaagcgtatcagtatcaccagttcaccatcctcggatccttcgccttaatcgcccgcgtcagccatctcacgtaccggtcctccagtttcctcccatctttcacacacaccacgccacgacccggccccggggtataaaagcactagggcgaagccgcgcaacgactcgatcggctgcagccagggctcgcctcgggggaccgcgtgttgctagcgagctcggtgtcggtgctaccggctgccgccccagtgcgaggcgatggggaggaggctggacgtgctgctggggcggacgacgaagcagacggcgcggctcaagtcgctgctggggctggcggcgacgcgcctcggcgtggtgcggggccaccgccaggtgcggtgcgggcaggcgcgcggggacgtcgagcagctgctccgcctcggccacgcggaccgcgcgctggcccgcgccgagcacgtcgtgcgggagcagaacgcgctcgacgtcctcgccgagctcgaggcctgctgcaacctcatcgccgagcgggccgcgctcgtcgaccacgcgcacaggggggagtgccccgaggagctgcgggaggcggcggcggggctggtatacgccgcggccaggtgcggggaccttccggagctgcaagaggtccgggccatcctcgccgccaagttcggcagggagttcgtctccgccgcgtccaacctccgcagcgggtgcggggtcaaccccaagatcgtgcagaagctgtcgaccaagcagccgagcctggagagccgacagctggtgctacaggagatcgccgccgacaaagggatcgccgtgcgcatctacgagccgcctcctccctacgaggactcggggagctccaaccacagccataggaagacggagcacgatggcgagaggatcagtaggacgccaccagttgatggccgcgacgaagacatctccggccactcggcgcagaggtacaaggacgtggaagcggcagctcaggccgcgttcgagtcggccgcctcggcagccgccgccgcgaaggcggccatggagctctcgcgtggggagcccagggggcccggtgacaggaggagggcagggaggacgcaaatggatgatcctgagatcgagaaacaagatgaggtgcttcatggaaacaaacccgagaagattgggcatggccggaattacagttcagatgttgagatcacgccggaggacgacgaggcaaaccacggcaacgttgcagtggacgaaccgaaacagcgggagcctgccaggggaaagccggcatcggtcagaacaaagtggggattttagcggcatccagatcgcaacggaggagatggtttcttcgtcttgtcaatatattggcatggaagttgttttttttcactgtagtagtatgtaattaacgacggttaccaaaaaaacacatgagcgatttgatttattgccaacagtttgcacactagtacactatgcctgtactaatgctatgttctgttaatgtgtagcgttaattgtagtacatgttctttggaggaaaaatattgatgttgcaatcc

SEQ ID NO: 16349 - protein, 351 aa, Zea mays subsp. mays
  peptide (1)..(351): Ceres Seq. ID no. 12381159
  misc_feature (25)..(148): Pfam Name: Eukaryotic protein of unknown function, DUF292 Pfam Description: Eukaryotic protein of unknown function, DUF292
  misc_feature (5)..(182): Homolog of NCBI NO: 15218545 NR Description: hypothetical protein; protein id: At1g34220.1
  misc_feature (17)..(269): Homolog of NCBI NO: 40253290 NR Description: unknown protein [Oryza sativa (japonica
  misc_feature (25)..(265): Homolog of NCBI NO: 15237108 NR Description: putative protein; protein id: At4g35730.1
  misc_feature (5)..(176): Homolog of NCBI NO: 33589706 NR Description: At1g34220 [Arabidopsis thaliana]
  misc_feature (17)..(261): Homolog of NCBI NO: 21595428 NR Description: unknown [Arabidopsis thaliana]
  misc_feature (65)..(274): Homolog of NCBI NO: 34911298 NR Description: P0519D04.18 [Oryza sativa (japonica
  misc_feature (17)..(242): Homolog of NCBI NO: 18395668 NR Description: expressed protein
  misc_feature (18)..(272): Homolog of NCBI NO: 34910388 NR Description: P0692C11.15 [Oryza sativa (japonica
  misc_feature (1)..(321): Homolog of NCBI NO: 15222251 NR Description: hypothetical protein; protein id: At1g13340.1
  misc_feature (1)..(348): Homolog of NCBI NO: 13702817 NR Description: unknown protein [Oryza sativa]
MGRRLDVLLGRTTKQTARLKSLLGLAATRLGVVRGHRQVRCGQARGDVEQLLRLGHADRALARAEHVVREQNALDVLAELEACCNLIAERAALVDHAHRGECPEELREAAAGLVYAAARCGDLPELQEVRAILAAKFGREFVSAASNLRSGCGVNPKIVQKLSTKQPSLESRQLVLQEIAADKGIAVRIYEPPPPYEDSGSSNHSHRKTEHDGERISRTPPVDGRDEDISGHSAQRYKDVEAAAQAAFESAASAAAAAKAAMELSRGEPRGPGDRRRAGRTQMDDPEIEKQDEVLHGNKPEKIGHGRNYSSDVEITPEDDEANHGNVAVDEPKQREPARGKPASVRTKWGF

SEQ ID NO: 16350 - DNA, 1224 bp, Zea mays subsp. mays
  misc_feature (1)..(1224): Ceres Seq. ID no. 12406219
  misc_feature: MA Experiment ID: 108527 Result: Up-regulated in Transcription
  misc_feature: MA Experiment 108527 PARAMETER Experiment Name: Zm_5mM_NO_P Parameter: Age (day) Value: 8
  misc_feature: MA Experiment 108527 PARAMETER Experiment Name: Zm_5mM_NO_P Parameter: Organism Value: Zea mays
  misc_feature: MA Experiment 108527 PARAMETER Experiment Name: Zm_5mM_NO_P Parameter: Plant Line Value: 35A19
  misc_feature: MA Experiment 108527 PARAMETER Experiment Name: Zm_5mM_NO_P Parameter: Timepoint (hr) Value: 6
  misc_feature: MA Experiment 108527 PARAMETER Experiment Name: Zm_5mM_NO_P Parameter: Tissue Value: Aerial
  misc_feature: MA Experiment 108527 PARAMETER Experiment Name: Zm_5mM_NO_P Parameter: Treatment Value: 5mM NO vs. No Treatment
  misc_feature: MA Experiment ID: 108536 Result: Down-regulated in Transcription
  misc_feature: MA Experiment 108536 PARAMETER Experiment Name: Zm_Meristem_P Parameter: Age (day) Value: 8
  misc_feature: MA Experiment 108536 PARAMETER Experiment Name: Zm_Meristem_P Parameter: Organism Value: Zea mays
  misc_feature: MA Experiment 108536 PARAMETER Experiment Name: Zm_Meristem_P Parameter: Plant Line Value: 35A19
  misc_feature: MA Experiment 108536 PARAMETER Experiment Name: Zm_Meristem_P Parameter: Tissue Value: Shoot Meristem vs. Above Shoot Meristem
  misc_feature: MA Experiment ID: 20000477 Result: Down-regulated in Transcription
  misc_feature: MA Experiment 20000477 PARAMETER Experiment Name: Zm_5mM_SA_P Parameter: Age (day) Value: 10
  misc_feature: MA Experiment 20000477 PARAMETER Experiment Name: Zm_5mM_SA_P Parameter: Organism Value: Zea mays
  misc_feature: MA Experiment 20000477 PARAMETER Experiment Name: Zm_5mM_SA_P Parameter: Plant Line Value: 35A19
  misc_feature: MA Experiment 20000477 PARAMETER Experiment Name: Zm_5mM_SA_P Parameter: Timepoint (hr) Value: 48
  misc_feature: MA Experiment 20000477 PARAMETER Experiment Name: Zm_5mM_SA_P Parameter: Tissue Value: Aerial
  misc_feature: MA Experiment 20000477 PARAMETER Experiment Name: Zm_5mM_SA_P Parameter: Treatment Value: 5mM SA vs. No Treatment
  misc_feature: MA Experiment ID: 20000534 Result: Up-regulated in Transcription
  misc_feature: MA Experiment 20000534 PARAMETER Experiment Name: Zm_Hybrid_Pollen_P Parameter: Age (day) Value: 8
  misc_feature: MA Experiment 20000534 PARAMETER Experiment Name: Zm_Hybrid_Pollen_P Parameter: Organism Value: Zea mays
  misc_feature: MA Experiment 20000534 PARAMETER Experiment Name: Zm_Hybrid_Pollen_P Parameter: Plant Line Value: 35A19
  misc_feature: MA Experiment 20000534 PARAMETER Experiment Name: Zm_Hybrid_Pollen_P Parameter: Tissue Value: Pollen vs. Aerial
gttcgcgttgcccgcgactctctccgtcctcctactctcacacgcttggcgcgcgcgtgcttccacacgtccgtcgcctcgcctggctgattggtttgggacctggctccagcaatggcggtgcaggcgcattatcaccaccaccaccaccaccaccaccgcgagtcccctttcctcgtcagcggcggcgcgccggagggcagccggttggcggcggcgatggagctgcatcaggcgcagaaggaggctactacggcgcagcagcacgctccgcccgacttctcgcatggaggttgcggcggcgggaagaagcggcagcgcgaggcggaccccgtgtcccggcagctcttgtcgttgcagcagcagcaaccacaggcgcagggggcccaagttcatcaacctggcgcaactgcacaagcggccggcgaacgggcctccggctcgacttggacgagggctcggagcacgtgccgtgcacgtcctcggcctcggcgtcgtgtctcctcctctccgaagagctcgccgcgcagcgcgaccagcacaaggacgagatggaacggctgatccaggagcacgcggagaggctccggcgcgcgctggccgacacccggcggcggcactaccgttcgctcgtcggcgcggccgaggcggctgctgctcggcggataagggagaaggagtcggaggcctgggaggccgcgcggcgccgcgccgacctggaggatcgggtcgcgcggctgagggcggaggcggcggcgtggcaggcaaaggagctcgcggaccagtccacggccgcggcgctccacgcgcagctgcagcaggcgaggggcaaggccaccgacgccgaggaagggggcaacgcggcggacgacgccgggtcgtgcttcgtcgacccggacagggtggtggagatcgccccgccgccggccaggccgtgccgggcgtgcaggcggcggtcggcctccgtcgtgctgctcccttgccgccacctctgcgtctgcgccgagtgcgagcccgccgtccccgccgccccctttgccgccgcagctgtcgccgctgcctgccccgtgtgccgtggcgcggtcaccggcacggtgcaagtgttcgtctcgtagcgggagggaaaggttaaaaaaaatggtgctcctgccaaaaggaatggcaggtgaaaatggggaatgaacgatggcaaattgtgtagtggagtggagcgcattacttttt

SEQ ID NO: 16351 - protein, 376 aa, Zea mays subsp. mays
  peptide (1)..(376): Ceres Seq. ID no. 12406220
  misc_feature (99)..(329): Homolog of NCBI NO: 13562004 NR Description: major ampullate spidroin 2-like protein [Nephila
  misc_feature (99)..(318): Homolog of NCBI NO: 13562004 NR Description: major ampullate spidroin 2-like protein [Nephila
  misc_feature (99)..(318): Homolog of NCBI NO: 13562004 NR Description: major ampullate spidroin 2-like protein [Nephila
  misc_feature (99)..(329): Homolog of NCBI NO: 13562004 NR Description: major ampullate spidroin 2-like protein [Nephila
  misc_feature (141)..(320): Homolog of NCBI NO: 465445 NR Description: PROBABLE NUCLEAR ANTIGEN
  misc_feature (126)..(318): Homolog of NCBI NO: 13562004 NR Description: major ampullate spidroin 2-like protein [Nephila
  misc_feature (150)..(363): Homolog of NCBI NO: 9625624 NR Description: nuclear antigen EBNA1 [Human herpesvirus 4]
  misc_feature (126)..(318): Homolog of NCBI NO: 13562004 NR Description: major ampullate spidroin 2-like protein [Nephila
  misc_feature (126)..(376): Homolog of NCBI NO: 23105035 NR Description: hypothetical protein [Azotobacter vinelandii]
  misc_feature (141)..(277): Homolog of NCBI NO: 17538706 NR Description: Predicted CDS, cuticle collagen family member
FALPATLSVLLLSHAWRARASTRPSPRLADWFGTWLQQWRCRRIITTTTTTTTASPLSSSAAARRRAAGWRRRWSCIRRRRRLLRRSSTLRPTSRMEVAAAGRSGSARRTPCPGSSCRCSSSNHRRRGPKFINLAQLHKRPANGPPARLGRGLGARAVHVLGLGVVSPPLRRARRAARPAQGRDGTADPGARGEAPARAGRHPAAALPFARRRGRGGCCSADKGEGVGGLGGRAAPRRPGGSGRAAEGGGGGVAGKGARGPVHGRGAPRAAAAGEGQGHRRRGRGQRGGRRRVVLRRPGQGGGDRPAAGQAVPGVQAAVGLRRAAPLPPPLRLRRVRARRPRRPLCRRSCRRCLPRVPWRGHRHGASVRLVAGGKG

SEQ ID NO: 16352 - protein, 370 aa, Zea mays subsp. mays
  peptide (1)..(370): Ceres Seq. ID no. 12406221
  misc_feature (312)..(344): Pfam Name: Zinc finger, C3HC4 type (RING finger) Pfam Description: Zinc finger, C3HC4 type (RING finger)
  misc_feature (143)..(349): Homolog of NCBI NO: 15220096 NR Description: S-ribonuclease binding protein SBP1, putative
  misc_feature (143)..(370): Homolog of NCBI NO: 21536706 NR Description: S-ribonuclease binding protein SBP1, putative
  misc_feature (47)..(367): Homolog of NCBI NO: 31126717 NR Description: unknown protein [Oryza sativa (japonica
  misc_feature (169)..(344): Homolog of NCBI NO: 6714275 NR Description: F6N18.12 [Arabidopsis thaliana]
  misc_feature (169)..(356): Homolog of NCBI NO: 21740631 NR Description: OSJNBb0012E08.13 [Oryza sativa (japonica
  misc_feature (169)..(344): Homolog of NCBI NO: 18398566 NR Description: expressed protein
  misc_feature (169)..(370): Homolog of NCBI NO: 15238000 NR Description: putative protein
  misc_feature (143)..(367): Homolog of NCBI NO: 30684141 NR Description: conserved hypothetical protein [Arabidopsis
  misc_feature (143)..(367): Homolog of NCBI NO: 7485189 NR Description: hypothetical protein - Arabidopsis thaliana
  misc_feature (97)..(303): Homolog of NCBI NO: 37536932 NR Description: hypothetical protein [Oryza sativa (japonica
SRCPRLSPSSYSHTLGARVLPHVRRLAWLIGLGPGSSNGGAGALSPPPPPPPPRVPFPRQRRRAGGQPVGGGDGAASGAEGGYYGAAARSARLLAWRLRRREEAAARGGPRVPAALVVAAAATTGAGGPSSSTWRNCTSGRRTGLRLDLDEGSEHVPCTSSASASCLLLSEELAAQRDQHKDEMERLIQEHAERLRRALADTRRRHYRSLVGAAEAAAARRIREKESEAWEAARRRADLEDRVARLRAEAAAWQAKELADQSTAAALHAQLQQARGKATDAEEGGNAADDAGSCFVDPDRVVEIAPPPARPCRACRRRSASVVLLPCRHLCVCAECEPAVPAAPFAAAAVAAACPVCRGAVTGTVQVFVS

SEQ ID NO: 16353 - protein, 281 aa, Zea mays subsp. mays
  peptide (1)..(281): Ceres Seq. ID no. 12406222
  misc_feature (4)..(234): Homolog of NCBI NO: 13562004 NR Description: major ampullate spidroin 2-like protein [Nephila
  misc_feature (4)..(223): Homolog of NCBI NO: 13562004 NR Description: major ampullate spidroin 2-like protein [Nephila
  misc_feature (4)..(223): Homolog of NCBI NO: 13562004 NR Description: major ampullate spidroin 2-like protein [Nephila
  misc_feature (4)..(234): Homolog of NCBI NO: 13562004 NR Description: major ampullate spidroin 2-like protein [Nephila
  misc_feature (46)..(225): Homolog of NCBI NO: 465445 NR Description: PROBABLE NUCLEAR ANTIGEN
  misc_feature (31)..(223): Homolog of NCBI NO: 13562004 NR Description: major ampullate spidroin 2-like protein [Nephila
  misc_feature (55)..(268): Homolog of NCBI NO: 9625624 NR Description: nuclear antigen EBNA1 [Human herpesvirus 4]
  misc_feature (31)..(223): Homolog of NCBI NO: 13562004 NR Description: major ampullate spidroin 2-like protein [Nephila
  misc_feature (31)..(281): Homolog of NCBI NO: 23105035 NR Description: hypothetical protein [Azotobacter vinelandii]
  misc_feature (46)..(182): Homolog of NCBI NO: 17538706 NR Description: Predicted CDS, cuticle collagen family member
MEVAAAGRSGSARRTPCPGSSCRCSSSNHRRRGPKFINLAQLHKRPANGPPARLGRGLGARAVHVLGLGVVSPPLRRARRAARPAQGRDGTADPGARGEAPARAGRHPAAALPFARRRGRGGCCSADKGEGVGGLGGRAAPRRPGGSGRAAEGGGGGVAGKGARGPVHGRGAPRAAAAGEGQGHRRRGRGQRGGRRRVVLRRPGQGGGDRPAAGQAVPGVQAAVGLRRAAPLPPPLRLRRVRARRPRRPLCRRSCRRCLPRVPWRGHRHGASVRLVAGGKG

SEQ ID NO: 16354 - DNA, 1242 bp, Zea mays subsp. mays
  misc_feature (1)..(1242): Ceres Seq. ID no. 12405303
  misc_feature: MA Experiment ID: 108527 Result: Up-regulated in Transcription
  misc_feature: MA Experiment 108527 PARAMETER Experiment Name: Zm_5mM_NO_P Parameter: Age (day) Value: 8
  misc_feature: MA Experiment 108527 PARAMETER Experiment Name: Zm_5mM_NO_P Parameter: Organism Value: Zea mays
  misc_feature: MA Experiment 108527 PARAMETER Experiment Name: Zm_5mM_NO_P Parameter: Plant Line Value: 35A19
  misc_feature: MA Experiment 108527 PARAMETER Experiment Name: Zm_5mM_NO_P Parameter: Timepoint (hr) Value: 6
  misc_feature: MA Experiment 108527 PARAMETER Experiment Name: Zm_5mM_NO_P Parameter: Tissue Value: Aerial
  misc_feature: MA Experiment 108527 PARAMETER Experiment Name: Zm_5mM_NO_P Parameter: Treatment Value: 5mM NO vs. No Treatment
  misc_feature: MA Experiment ID: 108528 Result: Down-regulated in Transcription
  misc_feature: MA Experiment 108528 PARAMETER Experiment Name: Zm_Imbibed_Seeds_P Parameter: Age (day) Value: 5 vs. 2
  misc_feature: MA Experiment 108528 PARAMETER Experiment Name: Zm_Imbibed_Seeds_P Parameter: Organism Value: Zea mays
  misc_feature: MA Experiment 108528 PARAMETER Experiment Name: Zm_Imbibed_Seeds_P Parameter: Plant Line Value: 35A19
  misc_feature: MA Experiment 108528 PARAMETER Experiment Name: Zm_Imbibed_Seeds_P Parameter: Tissue Value: Aerial vs. Embryo
  misc_feature: MA Experiment ID: 108530 Result: Down-regulated in Transcription
  misc_feature: MA Experiment 108530 PARAMETER Experiment Name: Zm_Imbibed_Seeds_P Parameter: Age (day) Value: 6 vs. 2
  misc_feature: MA Experiment 108530 PARAMETER Experiment Name: Zm_Imbibed_Seeds_P Parameter: Organism Value: Zea mays
  misc_feature: MA Experiment 108530 PARAMETER Experiment Name: Zm_Imbibed_Seeds_P Parameter: Plant Line Value: 35A19
  misc_feature: MA Experiment 108530 PARAMETER Experiment Name: Zm_Imbibed_Seeds_P Parameter: Tissue Value: Aerial vs. Embryo
  misc_feature: MA Experiment ID: 108535 Result: Down-regulated in Transcription
  misc_feature: MA Experiment 108535 PARAMETER Experiment Name: Zm_Meristem_P Parameter: Age (day) Value: 8
  misc_feature: MA Experiment 108535 PARAMETER Experiment Name: Zm_Meristem_P Parameter: Organism Value: Zea mays
  misc_feature: MA Experiment 108535 PARAMETER Experiment Name: Zm_Meristem_P Parameter: Plant Line Value: 35A19
  misc_feature: MA Experiment 108535 PARAMETER Experiment Name: Zm_Meristem_P Parameter: Tissue Value: Root Meristem vs. Above Root Meristem
  misc_feature: MA Experiment ID: 108536 Result: Up-regulated in Transcription
  misc_feature: MA Experiment 108536 PARAMETER Experiment Name: Zm_Meristem_P Parameter: Age (day) Value: 8
  misc_feature: MA Experiment 108536 PARAMETER Experiment Name: Zm_Meristem_P Parameter: Organism Value: Zea mays
  misc_feature: MA Experiment 108536 PARAMETER Experiment Name: Zm_Meristem_P Parameter: Plant Line Value: 35A19
  misc_feature: MA Experiment 108536 PARAMETER Experiment Name: Zm_Meristem_P Parameter: Tissue Value: Shoot Meristem vs. Above Shoot Meristem
  misc_feature: MA Experiment ID: 108543 Result: Down-regulated in Transcription
  misc_feature: MA Experiment ID: 108545 Result: Down-regulated in Transcription
  misc_feature: MA Experiment 108545 PARAMETER Experiment Name: Zm_Imbibed_Seeds_P Parameter: Age (day) Value: 3 vs. 2
  misc_feature: MA Experiment 108545 PARAMETER Experiment Name: Zm_Imbibed_Seeds_P Parameter: Organism Value: Zea mays
  misc_feature: MA Experiment 108545 PARAMETER Experiment Name: Zm_Imbibed_Seeds_P Parameter: Plant Line Value: 35A19
  misc_feature: MA Experiment 108545 PARAMETER Experiment Name: Zm_Imbibed_Seeds_P Parameter: Tissue Value: Aerial vs. Embryo
  misc_feature: MA Experiment ID: 108546 Result: Up-regulated in Transcription
  misc_feature: MA Experiment 108546 PARAMETER Experiment Name: Zm_Imbibed_Seeds_P Parameter: Age (day) Value: 3 vs. 2
  misc_feature: MA Experiment 108546 PARAMETER Experiment Name: Zm_Imbibed_Seeds_P Parameter: Organism Value: Zea mays
  misc_feature: MA Experiment 108546 PARAMETER Experiment Name: Zm_Imbibed_Seeds_P Parameter: Plant Line Value: 35A19
  misc_feature: MA Experiment 108546 PARAMETER Experiment Name: Zm_Imbibed_Seeds_P Parameter: Tissue Value: Roots vs. Embryo
  misc_feature: MA Experiment ID: 108547 Result: Down-regulated in Transcription
  misc_feature: MA Experiment 108547 PARAMETER Experiment Name: Zm_Imbibed_Seeds_P Parameter: Age (day) Value: 4 vs. 2
  misc_feature: MA Experiment 108547 PARAMETER Experiment Name: Zm_Imbibed_Seeds_P Parameter: Organism Value: Zea mays
  misc_feature: MA Experiment 108547 PARAMETER Experiment Name: Zm_Imbibed_Seeds_P Parameter: Plant Line Value: 35A19
  misc_feature: MA Experiment 108547 PARAMETER Experiment Name: Zm_Imbibed_Seeds_P Parameter: Tissue Value: Aerial vs. Embryo
  misc_feature: MA Experiment ID: 108689 Result: Down-regulated in Transcription
  misc_feature: MA Experiment 108689 PARAMETER Experiment Name: Zm_Drought_Roots_P Parameter: Age (day) Value: 9
  misc_feature: MA Experiment 108689 PARAMETER Experiment Name: Zm_Drought_Roots_P Parameter: Organism Value: Zea mays
  misc_feature: MA Experiment 108689 PARAMETER Experiment Name: Zm_Drought_Roots_P Parameter: Plant Line Value: 35A19
  misc_feature: MA Experiment 108689 PARAMETER Experiment Name: Zm_Drought_Roots_P Parameter: Timepoint (hr) Value: 24
  misc_feature: MA Experiment 108689 PARAMETER Experiment Name: Zm_Drought_Roots_P Parameter: Tissue Value: Roots
  misc_feature: MA Experiment 108689 PARAMETER Experiment Name: Zm_Drought_Roots_P Parameter: Treatment Value: Drought vs. No Drought
  misc_feature: MA Experiment ID: 20000626 Result: Up-regulated in Transcription
  misc_feature: MA Experiment 20000626 PARAMETER Experiment Name: Zm_Herbicide-Treatments_P Parameter: Timepoint (hr) Value: 12
  misc_feature: MA Experiment 20000626 PARAMETER Experiment Name: Zm_Herbicide-Treatments_P Parameter: Tissue Value: Aerial
  misc_feature: MA Experiment 20000626 PARAMETER Experiment Name: Zm_Herbicide-Treatments_P Parameter: Treatment Value: Roundup vs. No Treatment
  misc_feature: MA Experiment ID: 20000630 Result: Up-regulated in Transcription
  misc_feature: MA Experiment 20000630 PARAMETER Experiment Name: Zm_Herbicide-Treatments_P Parameter: Timepoint (hr) Value: 4
  misc_feature: MA Experiment 20000630 PARAMETER Experiment Name: Zm_Herbicide-Treatments_P Parameter: Tissue Value: Aerial
  misc_feature: MA Experiment 20000630 PARAMETER Experiment Name: Zm_Herbicide-Treatments_P Parameter: Treatment Value: Roundup vs. No Treatment
aactcccatatggacgccaagccgcgcaacctgggcggctcgctgccggtgcccaacgtgcaggacctggccgcgcgccccggcgacgaactcacgccgcccgtgctaagccgctacctccgcgacgacgtcgacggcgcagacgccaacggcgacgcggcctcctcggtgccggtagttgacctcgcgaggctcctggacccgtcgtcgcacggagacgaggagtccgccaaactgaaggcggcctgcgaggagtggggcttcttccaggtgatcaaccacggggtgcccgacgcggtggtcgcggacgtgaagcagacctgcaggccttcttccgcctcccgctcgccgacaagcgcgcggtggcgcaggagcccggcgggatcgaggggtacgggcaggccttcgtggtctccgaggaccagaagctggactgggccgacatgcttttcctgtccacgcagccgcccgagtaccgggccccgcgcttcttgccggcgcgcccggccacgttcggggactcgctggcgcgctactctgccgaggtgcagcgcgtggccgcccgcctgctggcgtccatggccgcgaacctgggcgtggcggacgccgcgaggctggccagggtcgccgacgcgcaggccgtgcgcgtcaactactacccggcgtgcccgcacggcaggggcagggtgctgggcctgtcgccgcactcggacgccgccggcctcacgctgctgctccaggtcagcgccgtcccggggctgcagatcaggaggcncggcgcgtggatcagcgtcgaccccatccccggagcgctggtggccaacgtcggcgacgtcgtcgaggtgctcaccaacggcaggtacaagagcatcgagcaccgggcgctggttagccccacccaccaccgggtgtccgtcgcagccttccactccgccaggttcggcgacacttacgcgccgcttgaggagacgatggtcgatggtgatgagccagcgaggtacaggagcattggcgtcgaggactacgtccgcctggtgctgtctagtaagctccaaggaaagaacataatggacgccatgaagatcaatccggtcactgaatgaatgagtgaatcagaggatttgggaacaaaagttctgatttgtgtgtgtcgttttgaatcgtctttacatttacaataagagcagcgggcggattgctcttggtcaaacttgaagtaaaccatgaacatgttccgaattg

SEQ ID NO: 16355 - protein, 355 aa, Zea mays subsp. mays
  peptide (1)..(355): Ceres Seq. ID no. 12405304
  misc_feature (20)..(109): Homolog of NCBI NO: 34898470 NR Description: ESTs D47168(S12332),D46350(S10967) correspond to region of the predicted gene.~Similar to Prunus armeniaca
  misc_feature (24)..(107): Homolog of NCBI NO: 40736992 NR Description: putative oxidoreductase [Oryza sativa (japonica
  misc_feature (4)..(105): Homolog of NCBI NO: 15219988 NR Description: SRG1-like protein
  misc_feature (14)..(105): Homolog of NCBI NO: 15235014 NR Description: SRG1-like protein; protein id: At4g25300.1
  misc_feature (14)..(105): Homolog of NCBI NO: 15235017 NR Description: SRG1-like protein; protein id: At4g25310.1
  misc_feature (13)..(134): Homolog of NCBI NO: 37536802 NR Description: putative ethylene-forming enzyme
  misc_feature (14)..(109): Homolog of NCBI NO: 34895204 NR Description: P0463A02.24 [Oryza sativa (japonica
  misc_feature (38)..(105): Homolog of NCBI NO: 37536820 NR Description: putative ethylene-forming enzyme
  misc_feature (14)..(106): Homolog of NCBI NO: 37536792 NR Description: putative dioxygenase [Oryza sativa (japonica
  misc_feature (13)..(134): Homolog of NCBI NO: 37536796 NR Description: putative dioxygenase [Oryza sativa (japonica
  misc_feature (259)..(259): Xaa is any aa, unknown or other
NSHMDAKPRNLGGSLPVPNVQDLAARPGDELTPPVLSRYLRDDVDGADANGDAASSVPVVDLARLLDPSSHGDEESAKLKAACEEWGFFQVINHGVPDAVVADVKQTCRPSSASRSPTSARWRRSPAGSRGTGRPSWSPRTRSWTGPTCFSCPRSRPSTGPRASCRRARPRSGTRWRATLPRCSAWPPACWRPWPRTWAWRTPRGWPGSPTRRPCASTTTRRARTAGAGCWACRRTRTPPASRCCSRSAPSRGCRSGGXARGSASTPSPERWWPTSATSSRCSPTAGTRASSTGRWLAPPTTGCPSQPSTPPGSATLTRRLRRRWSMVMSQRGTGALASRTTSAWCCLVSSKERT

SEQ ID NO: 16356 - protein, 352 aa, Zea mays subsp. mays
  peptide (1)..(352): Ceres Seq. ID no. 12405305
  misc_feature (17)..(106): Homolog of NCBI NO: 34898470 NR Description: ESTs D47168(S12332),D46350(S10967) correspond to region of the predicted gene.~Similar to Prunus armeniaca
  misc_feature (21)..(104): Homolog of NCBI NO: 40736992 NR Description: putative oxidoreductase [Oryza sativa (japonica
  misc_feature (1)..(102): Homolog of NCBI NO: 15219988 NR Description: SRG1-like protein
  misc_feature (11)..(102): Homolog of NCBI NO: 15235014 NR Description: SRG1-like protein; protein id: At4g25300.1
  misc_feature (11)..(102): Homolog of NCBI NO: 15235017 NR Description: SRG1-like protein; protein id: At4g25310.1
  misc_feature (10)..(131): Homolog of NCBI NO: 37536802 NR Description: putative ethylene-forming enzyme
  misc_feature (11)..(106): Homolog of NCBI NO: 34895204 NR Description: P0463A02.24 [Oryza sativa (japonica
  misc_feature (35)..(102): Homolog of NCBI NO: 37536820 NR Description: putative ethylene-forming enzyme
  misc_feature (11)..(103): Homolog of NCBI NO: 37536792 NR Description: putative dioxygenase [Oryza sativa (japonica
  misc_feature (10)..(131): Homolog of NCBI NO: 37536796 NR Description: putative dioxygenase [Oryza sativa (japonica
  misc_feature (256)..(256): Xaa is any aa, unknown or other
MDAKPRNLGGSLPVPNVQDLAARPGDELTPPVLSRYLRDDVDGADANGDAASSVPVVDLARLLDPSSHGDEESAKLKAACEEWGFFQVINHGVPDAVVADVKQTCRPSSASRSPTSARWRRSPAGSRGTGRPSWSPRTRSWTGPTCFSCPRSRPSTGPRASCRRARPRSGTRWRATLPRCSAWPPACWRPWPRTWAWRTPRGWPGSPTRRPCASTTTRRARTAGAGCWACRRTRTPPASRCCSRSAPSRGCRSGGXARGSASTPSPERWWPTSATSSRCSPTAGTRASSTGRWLAPPTTGCPSQPSTPPGSATLTRRLRRRWSMVMSQRGTGALASRTTSAWCCLVSSKERT

SEQ ID NO: 16357 - protein, 219 aa, Zea mays subsp. mays
  peptide (1)..(219): Ceres Seq. ID no. 12405306
  misc_feature (65)..(163): Pfam Name: 2OG-Fe(II) oxygenase superfamily Pfam Description: 2OG-Fe(II) oxygenase superfamily
  misc_feature (1)..(187): Homolog of NCBI NO: 34898470 NR Description: ESTs D47168(S12332),D46350(S10967) correspond to region of the predicted gene.~Similar to Prunus armeniaca
  misc_feature (1)..(214): Homolog of NCBI NO: 40736992 NR Description: putative oxidoreductase [Oryza sativa (japonica
  misc_feature (1)..(214): Homolog of NCBI NO: 15219988 NR Description: SRG1-like protein
  misc_feature (1)..(214): Homolog of NCBI NO: 15235014 NR Description: SRG1-like protein; protein id: At4g25300.1
  misc_feature (1)..(214): Homolog of NCBI NO: 15235017 NR Description: SRG1-like protein; protein id: At4g25310.1
  misc_feature (1)..(215): Homolog of NCBI NO: 37536802 NR Description: putative ethylene-forming enzyme
  misc_feature (1)..(213): Homolog of NCBI NO: 34895204 NR Description: P0463A02.24 [Oryza sativa (japonica
  misc_feature (1)..(214): Homolog of NCBI NO: 37536820 NR Description: putative ethylene-forming enzyme
  misc_feature (1)..(214): Homolog of NCBI NO: 37536792 NR Description: putative dioxygenase [Oryza sativa (japonica
  misc_feature (1)..(214): Homolog of NCBI NO: 37536796 NR Description: putative dioxygenase [Oryza sativa (japonica
  misc_feature (111)..(111): Xaa is any aa, unknown or other
MLFLSTQPPEYRAPRFLPARPATFGDSLARYSAEVQRVAARLLASMAANLGVADAARLARVADAQAVRVNYYPACPHGRGRVLGLSPHSDAAGLTLLLQVSAVPGLQIRRXGAWISVDPIPGALVANVGDVVEVLTNGRYKSIEHRALVSPTHHRVSVAAFHSARFGDTYAPLEETMVDGDEPARYRSIGVEDYVRLVLSSKLQGKNIMDAMKINPVTE

SEQ ID NO: 16358 - DNA, 1228 bp, Zea mays subsp. mays
  misc_feature (1)..(1228): Ceres Seq. ID no. 12386860
  misc_feature: MA Experiment ID: 108528 Result: Down-regulated in Transcription
  misc_feature: MA Experiment 108528 PARAMETER Experiment Name: Zm_Imbibed_Seeds_P Parameter: Age (day) Value: 5 vs. 2
  misc_feature: MA Experiment 108528 PARAMETER Experiment Name: Zm_Imbibed_Seeds_P Parameter: Organism Value: Zea mays
  misc_feature: MA Experiment 108528 PARAMETER Experiment Name: Zm_Imbibed_Seeds_P Parameter: Plant Line Value: 35A19
  misc_feature: MA Experiment 108528 PARAMETER Experiment Name: Zm_Imbibed_Seeds_P Parameter: Tissue Value: Aerial vs. Embryo
  misc_feature: MA Experiment ID: 108529 Result: Up-regulated in Transcription
  misc_feature: MA Experiment 108529 PARAMETER Experiment Name: Zm_Imbibed_Seeds_P Parameter: Age (day) Value: 5 vs. 2
  misc_feature: MA Experiment 108529 PARAMETER Experiment Name: Zm_Imbibed_Seeds_P Parameter: Organism Value: Zea mays
  misc_feature: MA Experiment 108529 PARAMETER Experiment Name: Zm_Imbibed_Seeds_P Parameter: Plant Line Value: 35A19
  misc_feature: MA Experiment 108529 PARAMETER Experiment Name: Zm_Imbibed_Seeds_P Parameter: Tissue Value: Roots vs. Embryo
  misc_feature: MA Experiment ID: 108530 Result: Down-regulated in Transcription
  misc_feature: MA Experiment 108530 PARAMETER Experiment Name: Zm_Imbibed_Seeds_P Parameter: Age (day) Value: 6 vs. 2
  misc_feature: MA Experiment 108530 PARAMETER Experiment Name: Zm_Imbibed_Seeds_P Parameter: Organism Value: Zea mays
  misc_feature: MA Experiment 108530 PARAMETER Experiment Name: Zm_Imbibed_Seeds_P Parameter: Plant Line Value: 35A19
  misc_feature: MA Experiment 108530 PARAMETER Experiment Name: Zm_Imbibed_Seeds_P Parameter: Tissue Value: Aerial vs. Embryo
  misc_feature: MA Experiment ID: 108535 Result: Down-regulated in Transcription
  misc_feature: MA Experiment 108535 PARAMETER Experiment Name: Zm_Meristem_P Parameter: Age (day) Value: 8
  misc_feature: MA Experiment 108535 PARAMETER Experiment Name: Zm_Meristem_P Parameter: Organism Value: Zea mays
  misc_feature: MA Experiment 108535 PARAMETER Experiment Name: Zm_Meristem_P Parameter: Plant Line Value: 35A19
  misc_feature: MA Experiment 108535 PARAMETER Experiment Name: Zm_Meristem_P Parameter: Tissue Value: Root Meristem vs. Above Root Meristem
  misc_feature: MA Experiment ID: 108543 Result: Up-regulated in Transcription
  misc_feature: MA Experiment ID: 108545 Result: Down-regulated in Transcription
  misc_feature: MA Experiment 108545 PARAMETER Experiment Name: Zm_Imbibed_Seeds_P Parameter: Age (day) Value: 3 vs. 2
  misc_feature: MA Experiment 108545 PARAMETER Experiment Name: Zm_Imbibed_Seeds_P Parameter: Organism Value: Zea mays
  misc_feature: MA Experiment 108545 PARAMETER Experiment Name: Zm_Imbibed_Seeds_P Parameter: Plant Line Value: 35A19
  misc_feature: MA Experiment 108545 PARAMETER Experiment Name: Zm_Imbibed_Seeds_P Parameter: Tissue Value: Aerial vs. Embryo
  misc_feature: MA Experiment ID: 108546 Result: Up-regulated in Transcription
  misc_feature: MA Experiment 108546 PARAMETER Experiment Name: Zm_Imbibed_Seeds_P Parameter: Age (day) Value: 3 vs. 2
  misc_feature: MA Experiment 108546 PARAMETER Experiment Name: Zm_Imbibed_Seeds_P Parameter: Organism Value: Zea mays
  misc_feature: MA Experiment 108546 PARAMETER Experiment Name: Zm_Imbibed_Seeds_P Parameter: Plant Line Value: 35A19
  misc_feature: MA Experiment 108546 PARAMETER Experiment Name: Zm_Imbibed_Seeds_P Parameter: Tissue Value: Roots vs. Embryo
  misc_feature: MA Experiment ID: 108547 Result: Down-regulated in Transcription
  misc_feature: MA Experiment 108547 PARAMETER Experiment Name: Zm_Imbibed_Seeds_P Parameter: Age (day) Value: 4 vs. 2
  misc_feature: MA Experiment 108547 PARAMETER Experiment Name: Zm_Imbibed_Seeds_P Parameter: Organism Value: Zea mays
  misc_feature: MA Experiment 108547 PARAMETER Experiment Name: Zm_Imbibed_Seeds_P Parameter: Plant Line Value: 35A19
  misc_feature: MA Experiment 108547 PARAMETER Experiment Name: Zm_Imbibed_Seeds_P Parameter: Tissue Value: Aerial vs. Embryo
  misc_feature: MA Experiment ID: 20000478 Result: Up-regulated in Transcription
  misc_feature: MA Experiment 20000478 PARAMETER Experiment Name: Zm_5mM_SA_P Parameter: Age (day) Value: 11
  misc_feature: MA Experiment 20000478 PARAMETER Experiment Name: Zm_5mM_SA_P Parameter: Organism Value: Zea mays
  misc_feature: MA Experiment 20000478 PARAMETER Experiment Name: Zm_5mM_SA_P Parameter: Plant Line Value: 35A19
  misc_feature: MA Experiment 20000478 PARAMETER Experiment Name: Zm_5mM_SA_P Parameter: Timepoint (hr) Value: 72
  misc_feature: MA Experiment 20000478 PARAMETER Experiment Name: Zm_5mM_SA_P Parameter: Tissue Value: Aerial
  misc_feature: MA Experiment 20000478 PARAMETER Experiment Name: Zm_5mM_SA_P Parameter: Treatment Value: 5mM SA vs. No Treatment
  misc_feature: MA Experiment ID: 20000535 Result: Down-regulated in Transcription
  misc_feature: MA Experiment 20000535 PARAMETER Experiment Name: Zm_Hybrid_Seed_Dev_P Parameter: DAP Value: 30 vs. 12
  misc_feature: MA Experiment 20000535 PARAMETER Experiment Name: Zm_Hybrid_Seed_Dev_P Parameter: Organism Value: Zea mays
  misc_feature: MA Experiment 20000535 PARAMETER Experiment Name: Zm_Hybrid_Seed_Dev_P Parameter: Plant Line Value: 35A19
  misc_feature: MA Experiment 20000535 PARAMETER Experiment Name: Zm_Hybrid_Seed_Dev_P Parameter: Tissue Value: Embryo vs. Unfert Floret
  misc_feature: MA Experiment ID: 20000626 Result: Up-regulated in Transcription
  misc_feature: MA Experiment 20000626 PARAMETER Experiment Name: Zm_Herbicide-Treatments_P Parameter: Timepoint (hr) Value: 12
  misc_feature: MA Experiment 20000626 PARAMETER Experiment Name: Zm_Herbicide-Treatments_P Parameter: Tissue Value: Aerial
  misc_feature: MA Experiment 20000626 PARAMETER Experiment Name: Zm_Herbicide-Treatments_P Parameter: Treatment Value: Roundup vs. No Treatment
aaatctccatcaccatcgccttcaactcaagcgactacagcaaacttgctgagactgcagctgatcatggggtcgacgacatggttggcggccgtgctggcggcactcgtggtcgccgcctcctcaacggtggcatcacacgcctcgctgccggggaaacttgaggtcggtttctacgagcactcgtgcccacaggcggaggacatcgtgcgcaacgccgtccgccgcggcatagcccgcgagcccggcgtcggcgcggggctcatccgcatgcacttccacgactgcttcgtccggggctgcgacggctccatcctcatcaactccacgccgggcaacaaggccgagaaggactccgtggccaacaaccccagcatgcgcggcttcgacgtcatcgacgacgccaaggccgtcctcgaggcgcactgcccgcgcaccgtctcctgcgctgatatcgtcgcgctcgcggcccgtgacagcacctacctcgccggcggcctggactacaaggtcccgtcgggccgccgtgacggccgcgtgtccaaagaggaggaggtgctcgacaacaatgtccccgccccgactgacgaggtcgacgagctcatcgagagcttcaagcgcaaggggctcaacgccgacgacatggtcacgctctctggcgcgcacaccatcggccgctcccactgctcctccttcacgcagcggctctacaacttcagcgggcagctggggcagacagacccgtccctcgaccccgcctacgccgggcacctcaaggcgcggtgcccttggccgtccagcgacgaccagatggatcccacggtggttccgcttgacccagtcacgccggcgaccttcgacaaccagtactacaagaacgtgctggcgcacaaggtcctgttcatctccgacaacacactgctcgacaacccatggacggccggaatggtccacttcaacgccgcagtcgagaaggcatggcaggtcaagttcgccaaggccatggttaagatgggcaaggtccaggtgctcaccggcgaggagggagagatcagggagaagtgcttcgccgtcaacccacactactagtcaagtttaattatctaattaccccgcgcgtgttatgtttgtttatacgttccatacatcaacattatgtagagtgtttttcgttctcttcaaggctgtgaaatcaaacaagtttatcaagtaaaatggtgttatttgc

SEQ ID NO: 16359 - protein, 362 aa, Zea mays subsp. mays
  peptide (1)..(362): Ceres Seq. ID no. 12386861
  misc_feature (70)..(321): Pfam Name: Peroxidase Pfam Description: Peroxidase
  misc_feature (29)..(359): Homolog of NCBI NO: 34902232 NR Description: Putative peroxidase [Oryza sativa (japonica
  misc_feature (48)..(359): Homolog of NCBI NO: 34894766 NR Description: putative peroxidase [Oryza sativa (japonica
  misc_feature (32)..(359): Homolog of NCBI NO: 34894758 NR Description: putative peroxidase [Oryza sativa (japonica
  misc_feature (51)..(362): Homolog of NCBI NO: 12056448 NR Description: peroxidase [Zea mays]
  misc_feature (35)..(360): Homolog of NCBI NO: 34894748 NR Description: putative peroxidase [Oryza sativa (japonica
  misc_feature (23)..(359): Homolog of NCBI NO: 12039355 NR Description: putative peroxidase [Oryza sativa]
  misc_feature (53)..(359): Homolog of NCBI NO: 4760700 NR Description: peroxidase 1 [Scutellaria baicalensis]
  misc_feature (50)..(359): Homolog of NCBI NO: 7453849 NR Description: peroxidase prx12 precursor [Spinacia oleracea]
  misc_feature (48)..(359): Homolog of NCBI NO: 34894388 NR Description: unnamed protein product [Oryza sativa (japonica
  misc_feature (52)..(359): Homolog of NCBI NO: 34902236 NR Description: Putative peroxidase [Oryza sativa (japonica
KSPSPSPSTQATTANLLRLQLIMGSTTWLAAVLAALVVAASSTVASHASLPGKLEVGFYEHSCPQAEDIVRNAVRRGIAREPGVGAGLIRMHFHDCFVRGCDGSILINSTPGNKAEKDSVANNPSMRGFDVIDDAKAVLEAHCPRTVSCADIVALAARDSTYLAGGLDYKVPSGRRDGRVSKEEEVLDNNVPAPTDEVDELIESFKRKGLNADDMVTLSGAHTIGRSHCSSFTQRLYNFSGQLGQTDPSLDPAYAGHLKARCPWPSSDDQMDPTVVPLDPVTPATFDNQYYKNVLAHKVLFISDNTLLDNPWTAGMVHFNAAVEKAWQVKFAKAMVKMGKVQVLTGEEGEIREKCFAVNPHY

SEQ ID NO: 16360 - protein, 340 aa, Zea mays subsp. mays
  peptide (1)..(340): Ceres Seq. ID no. 12386862
  misc_feature (48)..(299): Pfam Name: Peroxidase Pfam Description: Peroxidase
  misc_feature (1)..(337): Homolog of NCBI NO: 12039355 NR Description: putative peroxidase [Oryza sativa]
  misc_feature (7)..(337): Homolog of NCBI NO: 34902232 NR Description: Putative peroxidase [Oryza sativa (japonica
  misc_feature (26)..(337): Homolog of NCBI NO: 34894766 NR Description: putative peroxidase [Oryza sativa (japonica
  misc_feature (10)..(337): Homolog of NCBI NO: 34894758 NR Description: putative peroxidase [Oryza sativa (japonica
  misc_feature (29)..(340): Homolog of NCBI NO: 12056448 NR Description: peroxidase [Zea mays]
  misc_feature (13)..(338): Homolog of NCBI NO: 34894748 NR Description: putative peroxidase [Oryza sativa (japonica
  misc_feature (31)..(337): Homolog of NCBI NO: 4760700 NR Description: peroxidase 1 [Scutellaria baicalensis]
  misc_feature (28)..(337): Homolog of NCBI NO: 7453849 NR Description: peroxidase prx12 precursor [Spinacia oleracea]
  misc_feature (26)..(337): Homolog of NCBI NO: 34894388 NR Description: unnamed protein product [Oryza sativa (japonica
  misc_feature (30)..(337): Homolog of NCBI NO: 34902236 NR Description: Putative peroxidase [Oryza sativa (japonica
MGSTTWLAAVLAALVVAASSTVASHASLPGKLEVGFYEHSCPQAEDIVRNAVRRGIAREPGVGAGLIRMHFHDCFVRGCDGSILINSTPGNKAEKDSVANNPSMRGFDVIDDAKAVLEAHCPRTVSCADIVALAARDSTYLAGGLDYKVPSGRRDGRVSKEEEVLDNNVPAPTDEVDELIESFKRKGLNADDMVTLSGAHTIGRSHCSSFTQRLYNFSGQLGQTDPSLDPAYAGHLKARCPWPSSDDQMDPTVVPLDPVTPATFDNQYYKNVLAHKVLFISDNTLLDNPWTAGMVHFNAAVEKAWQVKFAKAMVKMGKVQVLTGEEGEIREKCFAVNPHY

SEQ ID NO: 16361 - protein, 272 aa, Zea mays subsp. mays
  peptide (1)..(272): Ceres Seq. ID no. 12386863
  misc_feature (1)..(231): Pfam Name: Peroxidase Pfam Description: Peroxidase
  misc_feature (1)..(269): Homolog of NCBI NO: 12039355 NR Description: putative peroxidase [Oryza sativa]
  misc_feature (1)..(269): Homolog of NCBI NO: 34902232 NR Description: Putative peroxidase [Oryza sativa (japonica
  misc_feature (1)..(269): Homolog of NCBI NO: 34894766 NR Description: putative peroxidase [Oryza sativa (japonica
  misc_feature (1)..(269): Homolog of NCBI NO: 34894758 NR Description: putative peroxidase [Oryza sativa (japonica
  misc_feature (1)..(272): Homolog of NCBI NO: 12056448 NR Description: peroxidase [Zea mays]
  misc_feature (1)..(270): Homolog of NCBI NO: 34894748 NR Description: putative peroxidase [Oryza sativa (japonica
  misc_feature (1)..(269): Homolog of NCBI NO: 4760700 NR Description: peroxidase 1 [Scutellaria baicalensis]
  misc_feature (1)..(269): Homolog of NCBI NO: 7453849 NR Description: peroxidase prx12 precursor [Spinacia oleracea]
  misc_feature (1)..(269): Homolog of NCBI NO: 34894388 NR Description: unnamed protein product [Oryza sativa (japonica
  misc_feature (1)..(269): Homolog of NCBI NO: 34902236 NR Description: Putative peroxidase [Oryza sativa (japonica
MHFHDCFVRGCDGSILINSTPGNKAEKDSVANNPSMRGFDVIDDAKAVLEAHCPRTVSCADIVALAARDSTYLAGGLDYKVPSGRRDGRVSKEEEVLDNNVPAPTDEVDELIESFKRKGLNADDMVTLSGAHTIGRSHCSSFTQRLYNFSGQLGQTDPSLDPAYAGHLKARCPWPSSDDQMDPTVVPLDPVTPATFDNQYYKNVLAHKVLFISDNTLLDNPWTAGMVHFNAAVEKAWQVKFAKAMVKMGKVQVLTGEEGEIREKCFAVNPHY

SEQ ID NO: 16362 - DNA, 1397 bp, Zea mays subsp. mays
  misc_feature (1)..(1397): Ceres Seq. ID no. 12366678
  misc_feature: MA Experiment ID: 108543 Result: Down-regulated in Transcription
aactcactcatcgtcagtcagtcgtcacagtactcgatcgagcgcgatctgatctctttccgagcaatcatccgttctagcgtagtagagcgcatggacatggcctcgtcctctgcatcagcagctctcctcctggctgtctccctcgccgctctgcacttgtgctgccgccatgggcacggtgccggcgacgccgccggcaacggcatcactgccatctacagcctcggcgactccatcactgacaccgggaacctcgtcaaggaggcgcctccgggcatgttcgagaccatcaagcacctcccctacggcgtcacgttcgggtacccgaccgggcggtgctccgacggcctcctcatgatcgacttcctggctcaggacctgggtctcccgttcctgaacccgtacctgggcaagaacaagagcttcgaccacggcgtcaacttcgccgtcgccggagccaccgccgtggacccggccgaccagttcaacctccccgccgtccccgtgccgttcgcctccaagtccctcaaggtgcagctccggtggttcaaggacttcctcaagtacaccttcggcaccgatgaagagattcgcagacggcttcaagcttctctggttttggtcggggagatcggcgggaacgactacaactacgccttcttccaggccaagcctgtggccgaggtggagaagctcatcccaggggtcgtgaagaccatcgtcggcgccgccaaggaggtgctggacatgggcgccaccagggtcatcgtcccgggcaacttccccatcggctgcgtgccgggctacctggccatgaacgccgcctcgtcggagccggcggactacgactcggcggggtgcctccgggagctcaacgacttcgccgccaagcacaactcgcggctccggcgcgccgtcgccgacctgcaggcgtcgtacccgggcgccgccgtcgcctacgccgactacttcgactccttcctcaccctcctccacaacgcctcctcgttcggtttcgacgccgcgagcacgcgcaaggcctgctgcggcgccggtgccggcgagtacaacttcgactggcggcggatgtgcggcttcccggggacggcggcgtgcgctgacccgtccacgtacctgagctgggacggcatacacatgacgcaggcggcgtacagggccatgtccaggctcatctaccacggcaagtacctgcagccacagatactgagcttcccggagaaaaacgggcagacataaactcacgtcgtcatcatatatagaacttagttagaaaatatactcgaaacaccggctacaaataagctgtcagtagtcagctgtatcggtaagtacatgcgcgctgttcaactaatgctatcatcaagctgtgagcc

SEQ ID NO: 16363 - protein, 419 aa, Zea mays subsp. mays
  peptide (1)..(419): Ceres Seq. ID no. 12366679
  misc_feature (73)..(399): Pfam Name: GDSL-like Lipase/Acylhydrolase Pfam Description: GDSL-like Lipase/Acylhydrolase
  misc_feature (72)..(407): Homolog of NCBI NO: 15218731 NR Description: lipase, putative
  misc_feature (72)..(407): Homolog of NCBI NO: 10764858 NR Description: F1K23.17 [Arabidopsis thaliana]
  misc_feature (72)..(407): Homolog of NCBI NO: 21593234 NR Description: lipase, putative [Arabidopsis thaliana]
  misc_feature (52)..(411): Homolog of NCBI NO: 34903996 NR Description: unnamed protein product [Oryza sativa (japonica
  misc_feature (72)..(407): Homolog of NCBI NO: 15218728 NR Description: lipase, putative; protein id: At1g28590.1
  misc_feature (72)..(407): Homolog of NCBI NO: 10764858 NR Description: F1K23.17 [Arabidopsis thaliana]
  misc_feature (45)..(410): Homolog of NCBI NO: 34903958 NR Description: OSJNBa0038J17.24 [Oryza sativa (japonica
  misc_feature (32)..(411): Homolog of NCBI NO: 34903994 NR Description: unnamed protein product [Oryza sativa (japonica
  misc_feature (36)..(418): Homolog of NCBI NO: 34903986 NR Description: unnamed protein product [Oryza sativa (japonica
  misc_feature (34)..(410): Homolog of NCBI NO: 34903978 NR Description: unnamed protein product [Oryza sativa (japonica
NSLIVSQSSQYSIERDLISFRAIIRSSVVERMDMASSSASAALLLAVSLAALHLCCRHGHGAGDAAGNGITAIYSLGDSITDTGNLVKEAPPGMFETIKHLPYGVTFGYPTGRCSDGLLMIDFLAQDLGLPFLNPYLGKNKSFDHGVNFAVAGATAVDPADQFNLPAVPVPFASKSLKVQLRWFKDFLKYTFGTDEEIRRRLQASLVLVGEIGGNDYNYAFFQAKPVAEVEKLIPGVVKTIVGAAKEVLDMGATRVIVPGNFPIGCVPGYLAMNAASSEPADYDSAGCLRELNDFAAKHNSRLRRAVADLQASYPGAAVAYADYFDSFLTLLHNASSFGFDAASTRKACCGAGAGEYNFDWRRMCGFPGTAACADPSTYLSWDGIHMTQAAYRAMSRLIYHGKYLQPQILSFPEKNGQT

SEQ ID NO: 16364 - protein, 388 aa, Zea mays subsp. mays
  peptide (1)..(388): Ceres Seq. ID no. 12366680
  misc_feature (42)..(368): Pfam Name: GDSL-like Lipase/Acylhydrolase Pfam Description: GDSL-like Lipase/Acylhydrolase
  misc_feature (41)..(376): Homolog of NCBI NO: 15218731 NR Description: lipase, putative
  misc_feature (41)..(376): Homolog of NCBI NO: 10764858 NR Description: F1K23.17 [Arabidopsis thaliana]
  misc_feature (41)..(376): Homolog of NCBI NO: 21593234 NR Description: lipase, putative [Arabidopsis thaliana]
  misc_feature (21)..(380): Homolog of NCBI NO: 34903996 NR Description: unnamed protein product [Oryza sativa (japonica
  misc_feature (41)..(376): Homolog of NCBI NO: 15218728 NR Description: lipase, putative; protein id: At1g28590.1
  misc_feature (41)..(376): Homolog of NCBI NO: 10764858 NR Description: F1K23.17 [Arabidopsis thaliana]
  misc_feature (14)..(379): Homolog of NCBI NO: 34903958 NR Description: OSJNBa0038J17.24 [Oryza sativa (japonica
  misc_feature (1)..(380): Homolog of NCBI NO: 34903994 NR Description: unnamed protein product [Oryza sativa (japonica
  misc_feature (5)..(387): Homolog of NCBI NO: 34903986 NR Description: unnamed protein product [Oryza sativa (japonica
  misc_feature (3)..(379): Homolog of NCBI NO: 34903978 NR Description: unnamed protein product [Oryza sativa (japonica
MDMASSSASAALLLAVSLAALHLCCRHGHGAGDAAGNGITAIYSLGDSITDTGNLVKEAPPGMFETIKHLPYGVTFGYPTGRCSDGLLMIDFLAQDLGLPFLNPYLGKNKSFDHGVNFAVAGATAVDPADQFNLPAVPVPFASKSLKVQLRWFKDFLKYTFGTDEEIRRRLQASLVLVGEIGGNDYNYAFFQAKPVAEVEKLIPGVVKTIVGAAKEVLDMGATRVIVPGNFPIGCVPGYLAMNAASSEPADYDSAGCLRELNDFAAKHNSRLRRAVADLQASYPGAAVAYADYFDSFLTLLHNASSFGFDAASTRKACCGAGAGEYNFDWRRMCGFPGTAACADPSTYLSWDGIHMTQAAYRAMSRLIYHGKYLQPQILSFPEKNGQT

SEQ ID NO: 16365 - protein, 386 aa, Zea mays subsp. mays
  peptide (1)..(386): Ceres Seq. ID no. 12366681
  misc_feature (40)..(366): Pfam Name: GDSL-like Lipase/Acylhydrolase Pfam Description: GDSL-like Lipase/Acylhydrolase
  misc_feature (39)..(374): Homolog of NCBI NO: 15218731 NR Description: lipase, putative
  misc_feature (39)..(374): Homolog of NCBI NO: 10764858 NR Description: F1K23.17 [Arabidopsis thaliana]
  misc_feature (39)..(374): Homolog of NCBI NO: 21593234 NR Description: lipase, putative [Arabidopsis thaliana]
  misc_feature (19)..(378): Homolog of NCBI NO: 34903996 NR Description: unnamed protein product [Oryza sativa (japonica
  misc_feature (39)..(374): Homolog of NCBI NO: 15218728 NR Description: lipase, putative; protein id: At1g28590.1
  misc_feature (39)..(374): Homolog of NCBI NO: 10764858 NR Description: F1K23.17 [Arabidopsis thaliana]
  misc_feature (12)..(377): Homolog of NCBI NO: 34903958 NR Description: OSJNBa0038J17.24 [Oryza sativa (japonica
  misc_feature (1)..(378): Homolog of NCBI NO: 34903994 NR Description: unnamed protein product [Oryza sativa (japonica
  misc_feature (3)..(385): Homolog of NCBI NO: 34903986 NR Description: unnamed protein product [Oryza sativa (japonica
  misc_feature (1)..(377): Homolog of NCBI NO: 34903978 NR Description: unnamed protein product [Oryza sativa (japonica
MASSSASAALLLAVSLAALHLCCRHGHGAGDAAGNGITAIYSLGDSITDTGNLVKEAPPGMFETIKHLPYGVTFGYPTGRCSDGLLMIDFLAQDLGLPFLNPYLGKNKSFDHGVNFAVAGATAVDPADQFNLPAVPVPFASKSLKVQLRWFKDFLKYTFGTDEEIRRRLQASLVLVGEIGGNDYNYAFFQAKPVAEVEKLIPGVVKTIVGAAKEVLDMGATRVIVPGNFPIGCVPGYLAMNAASSEPADYDSAGCLRELNDFAAKHNSRLRRAVADLQASYPGAAVAYADYFDSFLTLLHNASSFGFDAASTRKACCGAGAGEYNFDWRRMCGFPGTAACADPSTYLSWDGIHMTQAAYRAMSRLIYHGKYLQPQILSFPEKNGQT

SEQ ID NO: 16366 - DNA, 1680 bp, Zea mays subsp. mays
  misc_feature (1)..(1680): Ceres Seq. ID no. 12366104
  misc_feature: MA Experiment ID: 108528 Result: Up-regulated in Transcription
  misc_feature: MA Experiment 108528 PARAMETER Experiment Name: Zm_Imbibed_Seeds_P Parameter: Age (day) Value: 5 vs. 2
  misc_feature: MA Experiment 108528 PARAMETER Experiment Name: Zm_Imbibed_Seeds_P Parameter: Organism Value: Zea mays
  misc_feature: MA Experiment 108528 PARAMETER Experiment Name: Zm_Imbibed_Seeds_P Parameter: Plant Line Value: 35A19
  misc_feature: MA Experiment 108528 PARAMETER Experiment Name: Zm_Imbibed_Seeds_P Parameter: Tissue Value: Aerial vs. Embryo
  misc_feature: MA Experiment ID: 108529 Result: Up-regulated in Transcription
  misc_feature: MA Experiment 108529 PARAMETER Experiment Name: Zm_Imbibed_Seeds_P Parameter: Age (day) Value: 5 vs. 2
  misc_feature: MA Experiment 108529 PARAMETER Experiment Name: Zm_Imbibed_Seeds_P Parameter: Organism Value: Zea mays
  misc_feature: MA Experiment 108529 PARAMETER Experiment Name: Zm_Imbibed_Seeds_P Parameter: Plant Line Value: 35A19
  misc_feature: MA Experiment 108529 PARAMETER Experiment Name: Zm_Imbibed_Seeds_P Parameter: Tissue Value: Roots vs. Embryo
  misc_feature: MA Experiment ID: 108530 Result: Up-regulated in Transcription
  misc_feature: MA Experiment 108530 PARAMETER Experiment Name: Zm_Imbibed_Seeds_P Parameter: Age (day) Value: 6 vs. 2
  misc_feature: MA Experiment 108530 PARAMETER Experiment Name: Zm_Imbibed_Seeds_P Parameter: Organism Value: Zea mays
  misc_feature: MA Experiment 108530 PARAMETER Experiment Name: Zm_Imbibed_Seeds_P Parameter: Plant Line Value: 35A19
  misc_feature: MA Experiment 108530 PARAMETER Experiment Name: Zm_Imbibed_Seeds_P Parameter: Tissue Value: Aerial vs. Embryo
  misc_feature: MA Experiment ID: 108534 Result: Up-regulated in Transcription
  misc_feature: MA Experiment 108534 PARAMETER Experiment Name: Zm_4deg_Cold_P Parameter: Age (hr) Value: 8
  misc_feature: MA Experiment 108534 PARAMETER Experiment Name: Zm_4deg_Cold_P Parameter: Organism Value: Zea mays
  misc_feature: MA Experiment 108534 PARAMETER Experiment Name: Zm_4deg_Cold_P Parameter: Plant Line Value: 35A19
  misc_feature: MA Experiment 108534 PARAMETER Experiment Name: Zm_4deg_Cold_P Parameter: Temperature (deg C) Value: 4 vs. 22
  misc_feature: MA Experiment 108534 PARAMETER Experiment Name: Zm_4deg_Cold_P Parameter: Timepoint (hr) Value: 6
  misc_feature: MA Experiment 108534 PARAMETER Experiment Name: Zm_4deg_Cold_P Parameter: Tissue Value: Aerial
  misc_feature: MA Experiment ID: 108535 Result: Down-regulated in Transcription
  misc_feature: MA Experiment 108535 PARAMETER Experiment Name: Zm_Meristem_P Parameter: Age (day) Value: 8
  misc_feature: MA Experiment 108535 PARAMETER Experiment Name: Zm_Meristem_P Parameter: Organism Value: Zea mays
  misc_feature: MA Experiment 108535 PARAMETER Experiment Name: Zm_Meristem_P Parameter: Plant Line Value: 35A19
  misc_feature: MA Experiment 108535 PARAMETER Experiment Name: Zm_Meristem_P Parameter: Tissue Value: Root Meristem vs. Above Root Meristem
  misc_feature: MA Experiment ID: 108547 Result: Up-regulated in Transcription
  misc_feature: MA Experiment 108547 PARAMETER Experiment Name: Zm_Imbibed_Seeds_P Parameter: Age (day) Value: 4 vs. 2
  misc_feature: MA Experiment 108547 PARAMETER Experiment Name: Zm_Imbibed_Seeds_P Parameter: Organism Value: Zea mays
  misc_feature: MA Experiment 108547 PARAMETER Experiment Name: Zm_Imbibed_Seeds_P Parameter: Plant Line Value: 35A19
  misc_feature: MA Experiment 108547 PARAMETER Experiment Name: Zm_Imbibed_Seeds_P Parameter: Tissue Value: Aerial vs. Embryo
  misc_feature: MA Experiment ID: 108688 Result: Down-regulated in Transcription
  misc_feature: MA Experiment 108688 PARAMETER Experiment Name: Zm_Embryos-Flowers__P Parameter: Tissue Value: Immature Flowers vs. Aerial+
  misc_feature: MA Experiment ID: 20000108 Result: Down-regulated in Transcription
  misc_feature: MA Experiment 20000108 PARAMETER Experiment Name: Zm_Root-Tips_P Parameter: Age (day) Value: 12
  misc_feature: MA Experiment 20000108 PARAMETER Experiment Name: Zm_Root-Tips_P Parameter: Organism Value: Zea mays
  misc_feature: MA Experiment 20000108 PARAMETER Experiment Name: Zm_Root-Tips_P Parameter: Tissue Value: Root tips vs. Root mid region    35
  misc_feature: MA Experiment 20000108 PARAMETER Experiment Name: Zm_Root-Tips_P Parameter: Tissue Value: Root tips vs. Root mid region   Sequence Listing-Misc Features (4)
  misc_feature: MA Experiment ID: 20000535 Result: Down-regulated in Transcription
  misc_feature: MA Experiment 20000535 PARAMETER Experiment Name: Zm_Hybrid_Seed_Dev_P Parameter: DAP Value: 30 vs. 12
  misc_feature: MA Experiment 20000535 PARAMETER Experiment Name: Zm_Hybrid_Seed_Dev_P Parameter: Organism Value: Zea mays
  misc_feature: MA Experiment 20000535 PARAMETER Experiment Name: Zm_Hybrid_Seed_Dev_P Parameter: Plant Line Value: 35A19
  misc_feature: MA Experiment 20000535 PARAMETER Experiment Name: Zm_Hybrid_Seed_Dev_P Parameter: Tissue Value: Embryo vs. Unfert Floret
atattagtattaatccgggttttttcccctcgaagaaacggaagctcgtttgtaggagtgacttgtaggtagtagcgctcactgcataaaattggattggattggattatgctcttctatactagtagacccagccagagcttatactagcactgtagcatgaacagggaccgggacagctggacagtggcagaggagaggagatgagccgatcctttgctaccttttcctcccttttcaatgaatctccatcttcctcctccctggtcttggctgtttggttcgttccagaggagggctgggacccggacctcttcatactcctctgatgatgatgatccattaatggtacagctcatgtgtggtgtggctgtgacttgtgatgagtgagcgtgccccttcttcctcctccagcctccagctccaggtgcggtgtgaggtcccgctcctgctcctgtcctaccagcgtactactccagtagtacagtggagtagccgagcgcatttaatagctggacaaggtgagaggaggaagctctagccacacacacacagcacagcacagcacagagggaccgcaacggagcagagaactgggccaccaaactgaaccaaccgcgggaaggagaaagggaacccgaacccttttcctccgcgtgcattaaaacccttcacatgggcatgggcatgtcagctgctgccccttcgtcctcgcccctgcttgctggctggctggtctgctctgtcccgtccgtcctactcctacgaggagtcgacggtggagacggaggtgcgcgcggcgcacaacgtgctggaggcgtgcgcgcagacggacgccatggagcgggtcgtcttcacctcctccgtcaccgccgtcgtctggagcggcgccggcgccggcgtcggcgcccacagggaggaggtcgccgacgagaggagctggagcgacctcgccttctgcaggaagttcaagctgtggcacgccctggccaagacgctgtcggagaagacggcgtgggcgctggccatggaccggggcgtcgacatggtggccatcaacgccggcctgctgctgtccgcccccgggcccgggctcgggctcaccgccgcgcacccctacctcaagggcgcccccgacatgtacgacggcggcgtcctcgccaccgtcgacgtcggcttcctggccgacgcgcacgtcgccgcctacgagtcccccaccgcctacggccgctacctctgcttcagcgacgccgtctgccgtcccgaggacgccgtcaagctcgcccagatgctctcgccggccgcgccacgctcgccgccgccaagcgacgaactgaaggtgataccacagaggatccagggcaagaaactgaacaagctcatgctggagttcgccagcggggtatacggggagctggactaggaaggaactgccaggccacagatgatgcgatgcgactagggctgttgtattcttttgtacgtagtactatttgtagttttcgcccccctcacaaaaaaaaggagggaaatctgtttggttggccaaaatgtgccatacgctcgctgtacatggccaaacacgccacgtgtgtagcccctgccagcagcaggggtgggtggggagagcatttcagtgatcggttgccaaagaaataccatatcgtatctaggttcgtg

SEQ ID NO: 16367 - protein, 335 aa, Zea mays subsp. mays
  peptide (1)..(335): Ceres Seq. ID no. 12366105
  misc_feature (43)..(255): Homolog of NCBI NO: 23018055 NR Description: hypothetical protein [Thermobifida fusca]
MGMGMSAAAPSSSPLLAGWLVCSVPSVLLLRGVDGGDGGARGAQRAGGVRADGRHGAGRLHLLRHRRRLERRRRRRRRPQGGGRRREELERPRLLQEVQAVARPGQDAVGEDGVGAGHGPGRRHGGHQRRPAAVRPRARARAHRRAPLPQGRPRHVRRRRPRHRRRRLPGRRARRRLRVPHRLRPLPLLQRRRLPSRGRRQARPDALAGRATLAAAKRRTEGDTTEDPGQETEQAHAGVRQRGIRGAGLGRNCQATDDAMRLGLLYSFVRSTICSFRPPHKKKEGNLFGWPKCAIRSLYMAKHATCVAPASSRGGWGEHFSDRLPKKYHIVSRFV

SEQ ID NO: 16368 - protein, 333 aa, Zea mays subsp. mays
  peptide (1)..(333): Ceres Seq. ID no. 12366106
  misc_feature (41)..(253): Homolog of NCBI NO: 23018055 NR Description: hypothetical protein [Thermobifida fusca]
MGMSAAAPSSSPLLAGWLVCSVPSVLLLRGVDGGDGGARGAQRAGGVRADGRHGAGRLHLLRHRRRLERRRRRRRRPQGGGRRREELERPRLLQEVQAVARPGQDAVGEDGVGAGHGPGRRHGGHQRRPAAVRPRARARAHRRAPLPQGRPRHVRRRRPRHRRRRLPGRRARRRLRVPHRLRPLPLLQRRRLPSRGRRQARPDALAGRATLAAAKRRTEGDTTEDPGQETEQAHAGVRQRGIRGAGLGRNCQATDDAMRLGLLYSFVRSTICSFRPPHKKKEGNLFGWPKCAIRSLYMAKHATCVAPASSRGGWGEHFSDRLPKKYHIVSRFV

SEQ ID NO: 16369 - protein, 331 aa, Zea mays subsp. mays
  peptide (1)..(331): Ceres Seq. ID no. 12366107
  misc_feature (39)..(251): Homolog of NCBI NO: 23018055 NR Description: hypothetical protein [Thermobifida fusca]
MSAAAPSSSPLLAGWLVCSVPSVLLLRGVDGGDGGARGAQRAGGVRADGRHGAGRLHLLRHRRRLERRRRRRRRPQGGGRRREELERPRLLQEVQAVARPGQDAVGEDGVGAGHGPGRRHGGHQRRPAAVRPRARARAHRRAPLPQGRPRHVRRRRPRHRRRRLPGRRARRRLRVPHRLRPLPLLQRRRLPSRGRRQARPDALAGRATLAAAKRRTEGDTTEDPGQETEQAHAGVRQRGIRGAGLGRNCQATDDAMRLGLLYSFVRSTICSFRPPHKKKEGNLFGWPKCAIRSLYMAKHATCVAPASSRGGWGEHFSDRLPKKYHIVSRFV

SEQ ID NO: 16370 - DNA, 1351 bp, Zea mays subsp. mays
  misc_feature (1)..(1351): Ceres Seq. ID no. 12382032
  misc_feature: MA Experiment ID: 108527 Result: Up-regulated in Transcription
  misc_feature: MA Experiment 108527 PARAMETER Experiment Name: Zm_5mM_NO_P Parameter: Age (day) Value: 8
  misc_feature: MA Experiment 108527 PARAMETER Experiment Name: Zm_5mM_NO_P Parameter: Organism Value: Zea mays
  misc_feature: MA Experiment 108527 PARAMETER Experiment Name: Zm_5mM_NO_P Parameter: Plant Line Value: 35A19
  misc_feature: MA Experiment 108527 PARAMETER Experiment Name: Zm_5mM_NO_P Parameter: Timepoint (hr) Value: 6
  misc_feature: MA Experiment 108527 PARAMETER Experiment Name: Zm_5mM_NO_P Parameter: Tissue Value: Aerial
  misc_feature: MA Experiment 108527 PARAMETER Experiment Name: Zm_5mM_NO_P Parameter: Treatment Value: 5mM NO vs. No Treatment
  misc_feature: MA Experiment ID: 108535 Result: Down-regulated in Transcription
  misc_feature: MA Experiment 108535 PARAMETER Experiment Name: Zm_Meristem_P Parameter: Age (day) Value: 8
  misc_feature: MA Experiment 108535 PARAMETER Experiment Name: Zm_Meristem_P Parameter: Organism Value: Zea mays
  misc_feature: MA Experiment 108535 PARAMETER Experiment Name: Zm_Meristem_P Parameter: Plant Line Value: 35A19
  misc_feature: MA Experiment 108535 PARAMETER Experiment Name: Zm_Meristem_P Parameter: Tissue Value: Root Meristem vs. Above Root Meristem
  misc_feature: MA Experiment ID: 108687 Result: Down-regulated in Transcription
  misc_feature: MA Experiment 108687 PARAMETER Experiment Name: Zm_Embryos-Flowers__P Parameter: Tissue Value: Embryo vs. Aerial+
  misc_feature: MA Experiment ID: 20000108 Result: Down-regulated in Transcription
  misc_feature: MA Experiment 20000108 PARAMETER Experiment Name: Zm_Root-Tips_P Parameter: Age (day) Value: 12
  misc_feature: MA Experiment 20000108 PARAMETER Experiment Name: Zm_Root-Tips_P Parameter: Organism Value: Zea mays
  misc_feature: MA Experiment 20000108 PARAMETER Experiment Name: Zm_Root-Tips_P Parameter: Tissue Value: Root tips vs. Root mid region    35
  misc_feature: MA Experiment 20000108 PARAMETER Experiment Name: Zm_Root-Tips_P Parameter: Tissue Value: Root tips vs. Root mid region   Sequence Listing-Misc Features (4)
  misc_feature: MA Experiment ID: 20000535 Result: Down-regulated in Transcription
  misc_feature: MA Experiment 20000535 PARAMETER Experiment Name: Zm_Hybrid_Seed_Dev_P Parameter: DAP Value: 30 vs. 12
  misc_feature: MA Experiment 20000535 PARAMETER Experiment Name: Zm_Hybrid_Seed_Dev_P Parameter: Organism Value: Zea mays
  misc_feature: MA Experiment 20000535 PARAMETER Experiment Name: Zm_Hybrid_Seed_Dev_P Parameter: Plant Line Value: 35A19
  misc_feature: MA Experiment 20000535 PARAMETER Experiment Name: Zm_Hybrid_Seed_Dev_P Parameter: Tissue Value: Embryo vs. Unfert Floret
aagccacggcccaatcgccggccgacactcacaagaacctgcctccctctggatcgctatctcttttctagtgcccagggaaagctagctagctcacagctgagctgagggaagaaagcaaggagagggagccagggaggaaggggaaaaacacgcggagagggtgagcaagaaagaaccgaggcggatcgccttctgttcctcctgccggctccgcgagaggaggcactgctcagtcccgtgattcctacaggggggaagaaagaggtggaacaacgccccggggcagagcagagatgatgcgggagacgtacatggacgtgctgccgccggtggaccacatagccgcacggagcaactggttcccggcggcggcgcgtctgtggacggcggcggagaacaagcagttcgagcgggcgctcgccgggctcgacctctgccgcccggactgggaggaggtggcgcgggccatcccccggccggacggtgcgcgaggtcgtcagccacttcaagcacctcgaggtcgacgtccagcagatcgagagcgggcaggtgcccttgccggcctacggcggcggggccagctcgttcaccctgcagtgggacggctacggccccggtccgggggacttcaggcacgggtaccgcttcgccggaggctgcgggaggcggcaccacggccgcacgccggagcaggagcggaagaagggcgtgccatggacggaggaggagcacaggttgttcctcctaggcctgaagaaatacggcaagggtgactggaggaacatttcgcgcaacttcgtccagaccaggacgcccacccaggtggccagccacgcgcagaagtacttcatcaggctcaactccggcggcaaggacaagaggaggtccagcatccacgacatcaccacggtcaacctgacggacgaccagccgccctcgccgtcccagtcctccctaatcaccagccaatcgaacgcaccagctccagctccggccgcggggatatgccaggtcccattggcggccgacgccaagcgacacggtgccggaactctgcccttcagctcaccgaaccggacctctgcggcgccggcctacaggatggagtttcatgaccaacaaggcctgcagtgtggccctctgcatgatcagttgctcgccagccagagcgtcctgttctaggcgcggtggcagcccaccctgcggcatggatcgaccaggtgcctagtgtataatacttgtggtatcgctctagcttcagcgcctgtattgaagggattagccttttgggagcataacagaaaggaggtcttcatttcatggtggtccataatttgttggagaatgc

SEQ ID NO: 16371 - protein, 159 aa, Zea mays subsp. mays
  peptide (1)..(159): Ceres Seq. ID no. 12382033
  misc_feature (1)..(61): Homolog of NCBI NO: 34908386 NR Description: P0529E05.19 [Oryza sativa (japonica
  misc_feature (1)..(60): Homolog of NCBI NO: 34895714 NR Description: putative myb-related transcription activator
MMRETYMDVLPPVDHIAARSNWFPAAARLWTAAENKQFERALAGLDLCRPDWEEVARAIPRPDGARGRQPLQAPRGRRPADRERAGALAGLRRRGQLVHPAVGRLRPRSGGLQARVPLRRRLREAAPRPHAGAGAEEGRAMDGGGAQVVPPRPEEIRQG

SEQ ID NO: 16372 - protein, 158 aa, Zea mays subsp. mays
  peptide (1)..(158): Ceres Seq. ID no. 12382034
  misc_feature (1)..(60): Homolog of NCBI NO: 34908386 NR Description: P0529E05.19 [Oryza sativa (japonica
  misc_feature (1)..(59): Homolog of NCBI NO: 34895714 NR Description: putative myb-related transcription activator
MRETYMDVLPPVDHIAARSNWFPAAARLWTAAENKQFERALAGLDLCRPDWEEVARAIPRPDGARGRQPLQAPRGRRPADRERAGALAGLRRRGQLVHPAVGRLRPRSGGLQARVPLRRRLREAAPRPHAGAGAEEGRAMDGGGAQVVPPRPEEIRQG

SEQ ID NO: 16373 - protein, 153 aa, Zea mays subsp. mays
  peptide (1)..(153): Ceres Seq. ID no. 12382035
  misc_feature (1)..(55): Homolog of NCBI NO: 34908386 NR Description: P0529E05.19 [Oryza sativa (japonica
  misc_feature (1)..(54): Homolog of NCBI NO: 34895714 NR Description: putative myb-related transcription activator
MDVLPPVDHIAARSNWFPAAARLWTAAENKQFERALAGLDLCRPDWEEVARAIPRPDGARGRQPLQAPRGRRPADRERAGALAGLRRRGQLVHPAVGRLRPRSGGLQARVPLRRRLREAAPRPHAGAGAEEGRAMDGGGAQVVPPRPEEIRQG

SEQ ID NO: 16374 - DNA, 1312 bp, Zea mays subsp. mays
  misc_feature (1)..(1312): Ceres Seq. ID no. 12372672
  misc_feature: MA Experiment ID: 108522 Result: Up-regulated in Transcription
  misc_feature: MA Experiment 108522 PARAMETER Experiment Name: Zm_42deg_Heat_P Parameter: Age (day) Value: 8
  misc_feature: MA Experiment 108522 PARAMETER Experiment Name: Zm_42deg_Heat_P Parameter: Organism Value: Zea mays
  misc_feature: MA Experiment 108522 PARAMETER Experiment Name: Zm_42deg_Heat_P Parameter: Plant Line Value: 35A19
  misc_feature: MA Experiment 108522 PARAMETER Experiment Name: Zm_42deg_Heat_P Parameter: Temperature (deg C) Value: 42 vs. 22
  misc_feature: MA Experiment 108522 PARAMETER Experiment Name: Zm_42deg_Heat_P Parameter: Timepoint (hr) Value: 1
  misc_feature: MA Experiment 108522 PARAMETER Experiment Name: Zm_42deg_Heat_P Parameter: Tissue Value: Aerial
  misc_feature: MA Experiment ID: 108523 Result: Up-regulated in Transcription
  misc_feature: MA Experiment 108523 PARAMETER Experiment Name: Zm_42deg_Heat_P Parameter: Age (day) Value: 8
  misc_feature: MA Experiment 108523 PARAMETER Experiment Name: Zm_42deg_Heat_P Parameter: Organism Value: Zea mays
  misc_feature: MA Experiment 108523 PARAMETER Experiment Name: Zm_42deg_Heat_P Parameter: Plant Line Value: 35A19
  misc_feature: MA Experiment 108523 PARAMETER Experiment Name: Zm_42deg_Heat_P Parameter: Temperature (deg C) Value: 42 vs. 22
  misc_feature: MA Experiment 108523 PARAMETER Experiment Name: Zm_42deg_Heat_P Parameter: Timepoint (hr) Value: 6
  misc_feature: MA Experiment 108523 PARAMETER Experiment Name: Zm_42deg_Heat_P Parameter: Tissue Value: Aerial
  misc_feature: MA Experiment ID: 108527 Result: Up-regulated in Transcription
  misc_feature: MA Experiment 108527 PARAMETER Experiment Name: Zm_5mM_NO_P Parameter: Age (day) Value: 8
  misc_feature: MA Experiment 108527 PARAMETER Experiment Name: Zm_5mM_NO_P Parameter: Organism Value: Zea mays
  misc_feature: MA Experiment 108527 PARAMETER Experiment Name: Zm_5mM_NO_P Parameter: Plant Line Value: 35A19
  misc_feature: MA Experiment 108527 PARAMETER Experiment Name: Zm_5mM_NO_P Parameter: Timepoint (hr) Value: 6
  misc_feature: MA Experiment 108527 PARAMETER Experiment Name: Zm_5mM_NO_P Parameter: Tissue Value: Aerial
  misc_feature: MA Experiment 108527 PARAMETER Experiment Name: Zm_5mM_NO_P Parameter: Treatment Value: 5mM NO vs. No Treatment
  misc_feature: MA Experiment ID: 108543 Result: Down-regulated in Transcription
  misc_feature: MA Experiment ID: 20000492 Result: Down-regulated in Transcription
  misc_feature: MA Experiment 20000492 PARAMETER Experiment Name: Zm_Hybrid_Seed_Dev_P Parameter: DAP Value: 12
  misc_feature: MA Experiment 20000492 PARAMETER Experiment Name: Zm_Hybrid_Seed_Dev_P Parameter: Organism Value: Zea mays
  misc_feature: MA Experiment 20000492 PARAMETER Experiment Name: Zm_Hybrid_Seed_Dev_P Parameter: Plant Line Value: 35A19
  misc_feature: MA Experiment 20000492 PARAMETER Experiment Name: Zm_Hybrid_Seed_Dev_P Parameter: Tissue Value: Fert Kernel vs. Unfert Floret
  misc_feature: MA Experiment ID: 20000534 Result: Down-regulated in Transcription
  misc_feature: MA Experiment 20000534 PARAMETER Experiment Name: Zm_Hybrid_Pollen_P Parameter: Age (day) Value: 8
  misc_feature: MA Experiment 20000534 PARAMETER Experiment Name: Zm_Hybrid_Pollen_P Parameter: Organism Value: Zea mays
  misc_feature: MA Experiment 20000534 PARAMETER Experiment Name: Zm_Hybrid_Pollen_P Parameter: Plant Line Value: 35A19
  misc_feature: MA Experiment 20000534 PARAMETER Experiment Name: Zm_Hybrid_Pollen_P Parameter: Tissue Value: Pollen vs. Aerial
  misc_feature: MA Experiment ID: 20000535 Result: Down-regulated in Transcription
  misc_feature: MA Experiment 20000535 PARAMETER Experiment Name: Zm_Hybrid_Seed_Dev_P Parameter: DAP Value: 30 vs. 12
  misc_feature: MA Experiment 20000535 PARAMETER Experiment Name: Zm_Hybrid_Seed_Dev_P Parameter: Organism Value: Zea mays
  misc_feature: MA Experiment 20000535 PARAMETER Experiment Name: Zm_Hybrid_Seed_Dev_P Parameter: Plant Line Value: 35A19
  misc_feature: MA Experiment 20000535 PARAMETER Experiment Name: Zm_Hybrid_Seed_Dev_P Parameter: Tissue Value: Embryo vs. Unfert Floret
  misc_feature: MA Experiment ID: 20000626 Result: Up-regulated in Transcription
  misc_feature: MA Experiment 20000626 PARAMETER Experiment Name: Zm_Herbicide-Treatments_P Parameter: Timepoint (hr) Value: 12
  misc_feature: MA Experiment 20000626 PARAMETER Experiment Name: Zm_Herbicide-Treatments_P Parameter: Tissue Value: Aerial
  misc_feature: MA Experiment 20000626 PARAMETER Experiment Name: Zm_Herbicide-Treatments_P Parameter: Treatment Value: Roundup vs. No Treatment
  misc_feature: MA Experiment ID: 20000629 Result: Up-regulated in Transcription
  misc_feature: MA Experiment 20000629 PARAMETER Experiment Name: Zm_Herbicide-Treatments_P Parameter: Timepoint (hr) Value: 12
  misc_feature: MA Experiment 20000629 PARAMETER Experiment Name: Zm_Herbicide-Treatments_P Parameter: Tissue Value: Aerial
  misc_feature: MA Experiment 20000629 PARAMETER Experiment Name: Zm_Herbicide-Treatments_P Parameter: Treatment Value: Trimec vs. No Treatment
  misc_feature: MA Experiment ID: 20001610 Result: Up-regulated in Transcription
  misc_feature: MA Experiment 20001610 PARAMETER Experiment Name: Zm_50ppm_KNO3_L-to-H_P Parameter: Age (day) Value: 19
  misc_feature: MA Experiment 20001610 PARAMETER Experiment Name: Zm_50ppm_KNO3_L-to-H_P Parameter: Organism Value: Zea mays
  misc_feature: MA Experiment 20001610 PARAMETER Experiment Name: Zm_50ppm_KNO3_L-to-H_P Parameter: Plant Line Value: 35A19
  misc_feature: MA Experiment 20001610 PARAMETER Experiment Name: Zm_50ppm_KNO3_L-to-H_P Parameter: Timepoint (hr) Value: 2
  misc_feature: MA Experiment 20001610 PARAMETER Experiment Name: Zm_50ppm_KNO3_L-to-H_P Parameter: Tissue Value: Roots
  misc_feature: MA Experiment 20001610 PARAMETER Experiment Name: Zm_50ppm_KNO3_L-to-H_P Parameter: Treatment Value: 50ppm KNO3 vs. 50ppm KCl
  misc_feature: MA Experiment ID: 20001612 Result: Up-regulated in Transcription
  misc_feature: MA Experiment 20001612 PARAMETER Experiment Name: Zm_50ppm_KNO3_L-to-H_P Parameter: Age (day) Value: 19
  misc_feature: MA Experiment 20001612 PARAMETER Experiment Name: Zm_50ppm_KNO3_L-to-H_P Parameter: Organism Value: Zea mays
  misc_feature: MA Experiment 20001612 PARAMETER Experiment Name: Zm_50ppm_KNO3_L-to-H_P Parameter: Plant Line Value: 35A19
  misc_feature: MA Experiment 20001612 PARAMETER Experiment Name: Zm_50ppm_KNO3_L-to-H_P Parameter: Timepoint (hr) Value: 8
  misc_feature: MA Experiment 20001612 PARAMETER Experiment Name: Zm_50ppm_KNO3_L-to-H_P Parameter: Tissue Value: Roots
  misc_feature: MA Experiment 20001612 PARAMETER Experiment Name: Zm_50ppm_KNO3_L-to-H_P Parameter: Treatment Value: 50ppm KNO3 vs. 50ppm KCl
aagcagagccaagcctactcttccaatccctgtcagggtggttagtctttgagctggtgggatcatggttgccaagacgaggacgaggcgacagctcgccaagctcgcgctgcttctactcgccctgctgctcctgctcgccgccatcctgctgtgcgtcttcttgatcccgcgccaccacaggaggccgctgccccccgcctcgccgccgggggcggggaacgcctcgaatcccgacgacagcatcgtggcgttcgacttctccccgtacctcatcatgtacaagagcggccgcgtgcaccggctggacggcaccgcccggtgctcggccggcgtggacgaggccacgggggtgacctccaaggacgtcgtgatcgacagcgggaccaggctcgcggcacggatgtacctgccgccggcgccccgcgggacgcaaagcaagggcctcggcaggcggcacccggtgctggtgttctaccacggcggcgcgttcgtcatcgagtcggcgttcacgccgctgtaccacgcctacctgaacggcgtggcggcgaaggcgcgcgtggtggcggtgtccgtggagtaccgcctggcgccggagcaccggctgccgacggcgtacgacgactcgtggcaggcgctcaactgggtggccaggaacgccggatccgggccggagccgtggctgcgggaccggggcaacctgtcccggctgttcgtcgccggggacagcgccggcgccaacatcgcgcacgacatggccatgcgcgcgggcacggggggcgggctggacggcggcgcggccatcgcgggcctcctgctcctggacccctacttctgggggaagaagccggtggccggggagacgacggacccggccaggcggcgccagtacgaggcgacgtggtcgttcatctgcggcgggcggtacggcatcgacgacccgctggtggacccgctgtcgatgccggcgtccgagtggcggaagctggcgtgcctcgcgcgtggcggtgacgtcgtcgggcctcgacgacttccggccgcgcgggctggcgtacgtggcggcgctccgcgacagcgggtgggacggggagacggagcagtacgagacgcccggcgagcggcacgtctacttcttggataggcccaaggaccccaattccgtcaaggagctggccttcgtcaccggattcctgagccgggagtaggtaggtagccatcacggcgagggcgtacagtttaggtgcaatcgtgaggattgcttgctgatcgaggcacgtgaatacgtgattgattaatagagactattatttct

SEQ ID NO: 16375 - protein, 358 aa, Zea mays subsp. mays
  peptide (1)..(358): Ceres Seq. ID no. 12372673
  misc_feature (129)..(177): Pfam Name: Carboxylesterase Pfam Description: Carboxylesterase
  misc_feature (59)..(310): Homolog of NCBI NO: 15228426 NR Description: putative protein; protein id: At3g48700.1
  misc_feature (55)..(293): Homolog of NCBI NO: 18402731 NR Description: expressed protein
  misc_feature (59)..(318): Homolog of NCBI NO: 15221975 NR Description: hypothetical protein; protein id: At1g19190.1
  misc_feature (59)..(310): Homolog of NCBI NO: 15222795 NR Description: unknown protein; protein id: At1g49660.1
  misc_feature (62)..(310): Homolog of NCBI NO: 28393060 NR Description: putative esterase [Arabidopsis thaliana]
  misc_feature (59)..(310): Homolog of NCBI NO: 15227669 NR Description: putative esterase; protein id: At2g03550.1
  misc_feature (62)..(310): Homolog of NCBI NO: 21536771 NR Description: unknown [Arabidopsis thaliana]
  misc_feature (62)..(310): Homolog of NCBI NO: 18401743 NR Description: expressed protein
  misc_feature (59)..(310): Homolog of NCBI NO: 18086341 NR Description: AT3g48690/T8P19_200 [Arabidopsis thaliana]
  misc_feature (59)..(310): Homolog of NCBI NO: 15228425 NR Description: putative protein
MVAKTRTRRQLAKLALLLLALLLLLAAILLCVFLIPRHHRRPLPPASPPGAGNASNPDDSIVAFDFSPYLIMYKSGRVHRLDGTARCSAGVDEATGVTSKDVVIDSGTRLAARMYLPPAPRGTQSKGLGRRHPVLVFYHGGAFVIESAFTPLYHAYLNGVAAKARVVAVSVEYRLAPEHRLPTAYDDSWQALNWVARNAGSGPEPWLRDRGNLSRLFVAGDSAGANIAHDMAMRAGTGGGLDGGAAIAGLLLLDPYFWGKKPVAGETTDPARRRQYEATWSFICGGRYGIDDPLVDPLSMPASEWRKLACLARGGDVVGPRRLPAARAGVRGGAPRQRVGRGDGAVRDARRAARLLLG

SEQ ID NO: 16376 - protein, 287 aa, Zea mays subsp. mays
  peptide (1)..(287): Ceres Seq. ID no. 12372674
  misc_feature (58)..(106): Pfam Name: Carboxylesterase Pfam Description: Carboxylesterase
  misc_feature (1)..(239): Homolog of NCBI NO: 15228426 NR Description: putative protein; protein id: At3g48700.1
  misc_feature (1)..(222): Homolog of NCBI NO: 18402731 NR Description: expressed protein
  misc_feature (1)..(247): Homolog of NCBI NO: 15221975 NR Description: hypothetical protein; protein id: At1g19190.1
  misc_feature (1)..(239): Homolog of NCBI NO: 15222795 NR Description: unknown protein; protein id: At1g49660.1
  misc_feature (1)..(239): Homolog of NCBI NO: 28393060 NR Description: putative esterase [Arabidopsis thaliana]
  misc_feature (1)..(239): Homolog of NCBI NO: 15227669 NR Description: putative esterase; protein id: At2g03550.1
  misc_feature (1)..(239): Homolog of NCBI NO: 21536771 NR Description: unknown [Arabidopsis thaliana]
  misc_feature (1)..(239): Homolog of NCBI NO: 18401743 NR Description: expressed protein
  misc_feature (1)..(239): Homolog of NCBI NO: 18086341 NR Description: AT3g48690/T8P19_200 [Arabidopsis thaliana]
  misc_feature (1)..(239): Homolog of NCBI NO: 15228425 NR Description: putative protein
MYKSGRVHRLDGTARCSAGVDEATGVTSKDVVIDSGTRLAARMYLPPAPRGTQSKGLGRRHPVLVFYHGGAFVIESAFTPLYHAYLNGVAAKARVVAVSVEYRLAPEHRLPTAYDDSWQALNWVARNAGSGPEPWLRDRGNLSRLFVAGDSAGANIAHDMAMRAGTGGGLDGGAAIAGLLLLDPYFWGKKPVAGETTDPARRRQYEATWSFICGGRYGIDDPLVDPLSMPASEWRKLACLARGGDVVGPRRLPAARAGVRGGAPRQRVGRGDGAVRDARRAARLLLG

SEQ ID NO: 16377 - protein, 245 aa, Zea mays subsp. mays
  peptide (1)..(245): Ceres Seq. ID no. 12372675
  misc_feature (16)..(64): Pfam Name: Carboxylesterase Pfam Description: Carboxylesterase
  misc_feature (1)..(197): Homolog of NCBI NO: 18086341 NR Description: AT3g48690/T8P19_200 [Arabidopsis thaliana]
  misc_feature (1)..(197): Homolog of NCBI NO: 15228426 NR Description: putative protein; protein id: At3g48700.1
  misc_feature (1)..(205): Homolog of NCBI NO: 15221975 NR Description: hypothetical protein; protein id: At1g19190.1
  misc_feature (1)..(197): Homolog of NCBI NO: 28393060 NR Description: putative esterase [Arabidopsis thaliana]
  misc_feature (1)..(197): Homolog of NCBI NO: 21536771 NR Description: unknown [Arabidopsis thaliana]
  misc_feature (1)..(197): Homolog of NCBI NO: 18401743 NR Description: expressed protein
  misc_feature (1)..(197): Homolog of NCBI NO: 15227669 NR Description: putative esterase; protein id: At2g03550.1
  misc_feature (1)..(197): Homolog of NCBI NO: 15222795 NR Description: unknown protein; protein id: At1g49660.1
  misc_feature (1)..(180): Homolog of NCBI NO: 18402731 NR Description: expressed protein
  misc_feature (1)..(197): Homolog of NCBI NO: 15228425 NR Description: putative protein
MYLPPAPRGTQSKGLGRRHPVLVFYHGGAFVIESAFTPLYHAYLNGVAAKARVVAVSVEYRLAPEHRLPTAYDDSWQALNWVARNAGSGPEPWLRDRGNLSRLFVAGDSAGANIAHDMAMRAGTGGGLDGGAAIAGLLLLDPYFWGKKPVAGETTDPARRRQYEATWSFICGGRYGIDDPLVDPLSMPASEWRKLACLARGGDVVGPRRLPAARAGVRGGAPRQRVGRGDGAVRDARRAARLLLG

SEQ ID NO: 16378 - DNA, 1667 bp, Zea mays subsp. mays
  misc_feature (1)..(1667): Ceres Seq. ID no. 12363303
  misc_feature: MA Experiment ID: 108543 Result: Up-regulated in Transcription
  misc_feature: MA Experiment ID: 108597 Result: Down-regulated in Transcription
  misc_feature: MA Experiment 108597 PARAMETER Experiment Name: Zm_100uM_ABA_P Parameter: Age (day) Value: 9
  misc_feature: MA Experiment 108597 PARAMETER Experiment Name: Zm_100uM_ABA_P Parameter: Organism Value: Zea mays
  misc_feature: MA Experiment 108597 PARAMETER Experiment Name: Zm_100uM_ABA_P Parameter: Plant Line Value: 35A19
  misc_feature: MA Experiment 108597 PARAMETER Experiment Name: Zm_100uM_ABA_P Parameter: Timepoint (hr) Value: 24
  misc_feature: MA Experiment 108597 PARAMETER Experiment Name: Zm_100uM_ABA_P Parameter: Tissue Value: Aerial
  misc_feature: MA Experiment 108597 PARAMETER Experiment Name: Zm_100uM_ABA_P Parameter: Treatment Value: 100uM ABA vs. No Treatment
  misc_feature: MA Experiment ID: 20000478 Result: Down-regulated in Transcription
  misc_feature: MA Experiment 20000478 PARAMETER Experiment Name: Zm_5mM_SA_P Parameter: Age (day) Value: 11
  misc_feature: MA Experiment 20000478 PARAMETER Experiment Name: Zm_5mM_SA_P Parameter: Organism Value: Zea mays
  misc_feature: MA Experiment 20000478 PARAMETER Experiment Name: Zm_5mM_SA_P Parameter: Plant Line Value: 35A19
  misc_feature: MA Experiment 20000478 PARAMETER Experiment Name: Zm_5mM_SA_P Parameter: Timepoint (hr) Value: 72
  misc_feature: MA Experiment 20000478 PARAMETER Experiment Name: Zm_5mM_SA_P Parameter: Tissue Value: Aerial
  misc_feature: MA Experiment 20000478 PARAMETER Experiment Name: Zm_5mM_SA_P Parameter: Treatment Value: 5mM SA vs. No Treatment
  misc_feature: MA Experiment ID: 20000535 Result: Up-regulated in Transcription
  misc_feature: MA Experiment 20000535 PARAMETER Experiment Name: Zm_Hybrid_Seed_Dev_P Parameter: DAP Value: 30 vs. 12
  misc_feature: MA Experiment 20000535 PARAMETER Experiment Name: Zm_Hybrid_Seed_Dev_P Parameter: Organism Value: Zea mays
  misc_feature: MA Experiment 20000535 PARAMETER Experiment Name: Zm_Hybrid_Seed_Dev_P Parameter: Plant Line Value: 35A19
  misc_feature: MA Experiment 20000535 PARAMETER Experiment Name: Zm_Hybrid_Seed_Dev_P Parameter: Tissue Value: Embryo vs. Unfert Floret
acgggagcggacggagaaaattttgaaacgcgggcgaggccgccaccaccgcgccaaatcgagccatccagattccattcgacggccggaagtcagatccgtgcatctataatacttccaggaattctctcctctcccaagacccgcaccgcaccacgcgaaatcaagtcctgcaaaagcctcgcggctacctcacgtggatcggcgacggcgatgacggcgtccttctcttccgtcgccgaggtagcggttcccgctgctgcggcggtgatggcatcagctttgccgcaggagcagcagcaggcgcggccgcggccgcggccgatgcacgctggtggtggtggtggtggcggcggcggcgccaatggccgccaccacgcgtacagccgcaaggacaagtcactcggcctcctctgctccaacttcgtggttctctacaaccgcgacgacgtggagtccatcgggctggacgaagcggccaaatgcctcggcgtggagaggcgccggatctacgacattgtcaacgtgctcgagagcgttggaattcttgtgaggaaagccaagaatcgctacacctggataggtttcggcggagtctcaatatccttgcgagaactcaaggaaagggcgttaagggagaagtctggcttggctcctctgcaaaccgagcagcaatctgctgccacaatttctgaagacgaagatgatgatacattggccaatccgggtgcttatatcgagactgagagattgagtcaaactgtggacaaaccttctggcaaaccgggcgcatccggttgccgccttagatctgatcataggaaggaaaagtcacttgggctgctcacacagaatttcgtgaagctcttcctcaccatggaggttgacacgatctcactcgatgaagctgcaaaactgctccttggagaaggccacgaggagaccaatatgagaactaaagttcggaggttatatgacattgccaatgtcctgtcttcactgaatctaattgagaagatacatcaaggggactcgagaaagcctgcgtttcgttggttgggtagggcaacgctgaacacagaaaatggtgtcacagttgctgtgcccccaccagggaagatcgcatcaaagaaaagagcgtttggaacagaactcactaacattgacatgcatagaagtaatctagattcaaaaaataagaagaaagcaaaacttgtacagagtagtggtgatgtcttgacgaattgcaaattagctgtgcgtagtcggctggggcagggtaaacaaagtggctttgtttatggtcctttccacccttctggcgcaaggaaacatggacttgatggcggcaataagcctgggcaaagggagagggctgaggactgggagagcctttctgcttcatttcgaccacagtaccagaaccaagcactcagtgatctatttgtccattatgtcgacgcgtggaagacatggtattctgaatttgctcaaggcagcagcatcatgcaacaacactttggtcatcctgttaaccattttttgtaggcaaattttagggccaagcattgcagttcttagtgcatgcttgtgtattttacctgtacaatctgttaaaacggaggaaacaaagacatgattgagcctagggttcattgtatttaccc

SEQ ID NO: 16379 - protein, 515 aa, Zea mays subsp. mays
  peptide (1)..(515): Ceres Seq. ID no. 12363304
  misc_feature (129)..(195): Pfam Name: Transcription factor E2F/dimerisation partner (TDP) Pfam Description: Transcription factor E2F/dimerisation partner
  misc_feature (129)..(382): Homolog of NCBI NO: 29741773 NR Description: similar to Transcription factor E2F dimerisation
  misc_feature (129)..(354): Homolog of NCBI NO: 26334515 NR Description: unnamed protein product [Mus musculus]
  misc_feature (129)..(408): Homolog of NCBI NO: 38505226 NR Description: FLJ23311 protein [Homo sapiens]
  misc_feature (128)..(216): Homolog of NCBI NO: 22330789 NR Description: DP-E2F-like protein 3
  misc_feature (378)..(495): Homolog of NCBI NO: 22330789 NR Description: DP-E2F-like protein 3
  misc_feature (154)..(482): Homolog of NCBI NO: 7487385 NR Description: hypothetical protein T24C20.40 - Arabidopsis
  misc_feature (128)..(240): Homolog of NCBI NO: 15242176 NR Description: DP-E2F-like 2
  misc_feature (270)..(498): Homolog of NCBI NO: 15242176 NR Description: DP-E2F-like 2
  misc_feature (125)..(482): Homolog of NCBI NO: 30692988 NR Description: DP-E2F-related protein 1 [Arabidopsis thaliana]
  misc_feature (125)..(506): Homolog of NCBI NO: 22331664 NR Description: DP-E2F-like protein 1
TGADGENFETRARPPPPRQIEPSRFHSTAGSQIRASIILPGILSSPKTRTAPREIKSCKSLAATSRGSATAMTASFSSVAEVAVPAAAAVMASALPQEQQQARPRPRPMHAGGGGGGGGGANGRHHAYSRKDKSLGLLCSNFVVLYNRDDVESIGLDEAAKCLGVERRRIYDIVNVLESVGILVRKAKNRYTWIGFGGVSISLRELKERALREKSGLAPLQTEQQSAATISEDEDDDTLANPGAYIETERLSQTVDKPSGKPGASGCRLRSDHRKEKSLGLLTQNFVKLFLTMEVDTISLDEAAKLLLGEGHEETNMRTKVRRLYDIANVLSSLNLIEKIHQGDSRKPAFRWLGRATLNTENGVTVAVPPPGKIASKKRAFGTELTNIDMHRSNLDSKNKKKAKLVQSSGDVLTNCKLAVRSRLGQGKQSGFVYGPFHPSGARKHGLDGGNKPGQRERAEDWESLSASFRPQYQNQALSDLFVHYVDAWKTWYSEFAQGSSIMQQHFGHPVNHFL

SEQ ID NO: 16380 - protein, 444 aa, Zea mays subsp. mays
  peptide (1)..(444): Ceres Seq. ID no. 12363305
  misc_feature (58)..(124): Pfam Name: Transcription factor E2F/dimerisation partner (TDP) Pfam Description: Transcription factor E2F/dimerisation partner
  misc_feature (58)..(311): Homolog of NCBI NO: 29741773 NR Description: similar to Transcription factor E2F dimerisation
  misc_feature (58)..(283): Homolog of NCBI NO: 26334515 NR Description: unnamed protein product [Mus musculus]
  misc_feature (58)..(337): Homolog of NCBI NO: 38505226 NR Description: FLJ23311 protein [Homo sapiens]
  misc_feature (57)..(145): Homolog of NCBI NO: 22330789 NR Description: DP-E2F-like protein 3
  misc_feature (307)..(424): Homolog of NCBI NO: 22330789 NR Description: DP-E2F-like protein 3
  misc_feature (83)..(411): Homolog of NCBI NO: 7487385 NR Description: hypothetical protein T24C20.40 - Arabidopsis
  misc_feature (57)..(169): Homolog of NCBI NO: 15242176 NR Description: DP-E2F-like 2
  misc_feature (199)..(427): Homolog of NCBI NO: 15242176 NR Description: DP-E2F-like 2
  misc_feature (54)..(411): Homolog of NCBI NO: 30692988 NR Description: DP-E2F-related protein 1 [Arabidopsis thaliana]
  misc_feature (54)..(435): Homolog of NCBI NO: 22331664 NR Description: DP-E2F-like protein 1
MTASFSSVAEVAVPAAAAVMASALPQEQQQARPRPRPMHAGGGGGGGGGANGRHHAYSRKDKSLGLLCSNFVVLYNRDDVESIGLDEAAKCLGVERRRIYDIVNVLESVGILVRKAKNRYTWIGFGGVSISLRELKERALREKSGLAPLQTEQQSAATISEDEDDDTLANPGAYIETERLSQTVDKPSGKPGASGCRLRSDHRKEKSLGLLTQNFVKLFLTMEVDTISLDEAAKLLLGEGHEETNMRTKVRRLYDIANVLSSLNLIEKIHQGDSRKPAFRWLGRATLNTENGVTVAVPPPGKIASKKRAFGTELTNIDMHRSNLDSKNKKKAKLVQSSGDVLTNCKLAVRSRLGQGKQSGFVYGPFHPSGARKHGLDGGNKPGQRERAEDWESLSASFRPQYQNQALSDLFVHYVDAWKTWYSEFAQGSSIMQQHFGHPVNHFL

SEQ ID NO: 16381 - protein, 425 aa, Zea mays subsp. mays
  peptide (1)..(425): Ceres Seq. ID no. 12363306
  misc_feature (39)..(105): Pfam Name: Transcription factor E2F/dimerisation partner (TDP) Pfam Description: Transcription factor E2F/dimerisation partner
  misc_feature (39)..(292): Homolog of NCBI NO: 29741773 NR Description: similar to Transcription factor E2F dimerisation
  misc_feature (39)..(264): Homolog of NCBI NO: 26334515 NR Description: unnamed protein product [Mus musculus]
  misc_feature (39)..(318): Homolog of NCBI NO: 38505226 NR Description: FLJ23311 protein [Homo sapiens]
  misc_feature (38)..(126): Homolog of NCBI NO: 22330789 NR Description: DP-E2F-like protein 3
  misc_feature (288)..(405): Homolog of NCBI NO: 22330789 NR Description: DP-E2F-like protein 3
  misc_feature (64)..(392): Homolog of NCBI NO: 7487385 NR Description: hypothetical protein T24C20.40 - Arabidopsis
  misc_feature (38)..(150): Homolog of NCBI NO: 15242176 NR Description: DP-E2F-like 2
  misc_feature (180)..(408): Homolog of NCBI NO: 15242176 NR Description: DP-E2F-like 2
  misc_feature (35)..(392): Homolog of NCBI NO: 30692988 NR Description: DP-E2F-related protein 1 [Arabidopsis thaliana]
  misc_feature (35)..(416): Homolog of NCBI NO: 22331664 NR Description: DP-E2F-like protein 1
MASALPQEQQQARPRPRPMHAGGGGGGGGGANGRHHAYSRKDKSLGLLCSNFVVLYNRDDVESIGLDEAAKCLGVERRRIYDIVNVLESVGILVRKAKNRYTWIGFGGVSISLRELKERALREKSGLAPLQTEQQSAATISEDEDDDTLANPGAYIETERLSQTVDKPSGKPGASGCRLRSDHRKEKSLGLLTQNFVKLFLTMEVDTISLDEAAKLLLGEGHEETNMRTKVRRLYDIANVLSSLNLIEKIHQGDSRKPAFRWLGRATLNTENGVTVAVPPPGKIASKKRAFGTELTNIDMHRSNLDSKNKKKAKLVQSSGDVLTNCKLAVRSRLGQGKQSGFVYGPFHPSGARKHGLDGGNKPGQRERAEDWESLSASFRPQYQNQALSDLFVHYVDAWKTWYSEFAQGSSIMQQHFGHPVNHFL

SEQ ID NO: 16382 - DNA, 1485 bp, Zea mays subsp. mays
  misc_feature (1)..(1485): Ceres Seq. ID no. 15180769
  misc_feature: MA Experiment ID: 108543 Result: Up-regulated in Transcription
atctcggttttattcaaatgctcaacacgcttgtttcccgcaggagcgtggtcagatcctccacaggttcgcggacctgatcgacgagcacgtggaggagctggcggcgctggacacggtggacgccggcaagctgttcgccgtgggcaaggcgcgggacatcccgggcgccgcgcacctgctgcgctactacgccggcgccgccgacaaggtgcacggcgcgacgctcaagatggcgcagcggatgcacgggtacacgctcaaggagcccgtgggcgtggtgggccacatcgtgccctggaactaccccaccaccatgttcttcttcaaggtagggcccgcgctcgccgcaggctgcgccgtcgtcgtcaagcccgccgagcagacgccgctgtccgcgctcttctacgcgcacctcgccagggaggccggcgtccccgccggcgtgctcaacgtcgtgccgggattcgggcccacggccggggccgccgtcgccgcccacatggacgtcgacaaggtcagcttcaccgggtccacggaggtcggccgcctcgtcatgagggccgcggccgagagcaacctcaagcccgtgtcgctcgagctgggcggcaagtctcccgtcatcgtcttcgatgacgccgacctcgacatggccgtcaacctcgtcaacttcgccacctacaccaacaagggcgagatctgtgtggccggcacgcgcatctacgtgcaggaagggatctacgacgagttcgtgaagaaggccgccgagctcgccagcaagtccgtggtcggagacccgttcaacccgagtgtcagccaaggcccccaggttgacaaggaccagtacgagaaggtcctcaggtacattgacatcggaaagcgcgaaggcgccacgctggtcaccggagggaagccctgcggcgacaataagggctactacatcgagcccaccatcttcacggacgtcaaggacgacatgacgatcgcacaggatgaaatctttgggccggtgatggctctcatgaaattcaagaccgtggaggaggtgatccagaaagcgaacaacacccggtacggcctggccgccggcatcgtgaccaagaacatcgacgtcgccaacaccgtgtcgcggtccatccgcgccggcgccatctggatcaactgctacttcgcgttcgacccggacgcgccgttcggcgggtacaagatgagcgggttcggcaaggacatgggcatggacgcgctcgacaagtacctgcagaccaagaccgtggtcactccgctgtacaacactccatggctctgaccgaccgacctcatccctgtccgatgaacagttcaacatcacaaaacaagaagaaacatgtcttgtaagatactccaaaggatcggttgcctgcagtagctgtactcttacacctgcatggattgatgatgtcgtagtgcaatgtaacattcagaacaataaagacatgtttcggactg

SEQ ID NO: 16383 - protein, 434 aa, Zea mays subsp. mays
  peptide (1)..(434): Ceres Seq. ID no. 15180770
  misc_feature (15)..(434): Homolog of NCBI NO: 7431451 NR Description: rf2 nuclear restorer protein - maize
  misc_feature (15)..(434): Homolog of NCBI NO: 20530127 NR Description: mitochondrial aldehyde dehydrogenase [Secale
  misc_feature (15)..(434): Homolog of NCBI NO: 8163730 NR Description: aldehyde dehydrogenase [Oryza sativa]
  misc_feature (15)..(434): Homolog of NCBI NO: 18404212 NR Description: aldehyde dehydrogenase (ALDH1a) [Arabidopsis
  misc_feature (8)..(433): Homolog of NCBI NO: 34912252 NR Description: putative cytosolic aldehyde dehydrogenase
  misc_feature (8)..(433): Homolog of NCBI NO: 19850247 NR Description: cytosolic aldehyde dehydrogenase RF2D [Zea mays]
  misc_feature (8)..(433): Homolog of NCBI NO: 19850245 NR Description: cytosolic aldehyde dehydrogenase RF2D [Zea mays]
  misc_feature (16)..(434): Homolog of NCBI NO: 34912248 NR Description: cytosolic aldehyde dehydrogenase
  misc_feature (15)..(434): Homolog of NCBI NO: 19850241 NR Description: cytosolic aldehyde dehydrogenase RF2C [Zea mays]
  misc_feature (15)..(434): Homolog of NCBI NO: 19850243 NR Description: cytosolic aldehyde dehydrogenase RF2C [Zea mays]
SRFYSNAQHACFPQERGQILHRFADLIDEHVEELAALDTVDAGKLFAVGKARDIPGAAHLLRYYAGAADKVHGATLKMAQRMHGYTLKEPVGVVGHIVPWNYPTTMFFFKVGPALAAGCAVVVKPAEQTPLSALFYAHLAREAGVPAGVLNVVPGFGPTAGAAVAAHMDVDKVSFTGSTEVGRLVMRAAAESNLKPVSLELGGKSPVIVFDDADLDMAVNLVNFATYTNKGEICVAGTRIYVQEGIYDEFVKKAAELASKSVVGDPFNPSVSQGPQVDKDQYEKVLRYIDIGKREGATLVTGGKPCGDNKGYYIEPTIFTDVKDDMTIAQDEIFGPVMALMKFKTVEEVIQKANNTRYGLAAGIVTKNIDVANTVSRSIRAGAIWINCYFAFDPDAPFGGYKMSGFGKDMGMDALDKYLQTKTVVTPLYNTPWL

SEQ ID NO: 16384 - protein, 357 aa, Zea mays subsp. mays
  peptide (1)..(357): Ceres Seq. ID no. 15180771
  misc_feature (1)..(357): Homolog of NCBI NO: 7431451 NR Description: rf2 nuclear restorer protein - maize
  misc_feature (1)..(357): Homolog of NCBI NO: 20530127 NR Description: mitochondrial aldehyde dehydrogenase [Secale
  misc_feature (1)..(357): Homolog of NCBI NO: 8163730 NR Description: aldehyde dehydrogenase [Oryza sativa]
  misc_feature (1)..(357): Homolog of NCBI NO: 18404212 NR Description: aldehyde dehydrogenase (ALDH1a) [Arabidopsis
  misc_feature (1)..(356): Homolog of NCBI NO: 34912252 NR Description: putative cytosolic aldehyde dehydrogenase
  misc_feature (1)..(356): Homolog of NCBI NO: 19850247 NR Description: cytosolic aldehyde dehydrogenase RF2D [Zea mays]
  misc_feature (1)..(356): Homolog of NCBI NO: 19850245 NR Description: cytosolic aldehyde dehydrogenase RF2D [Zea mays]
  misc_feature (1)..(357): Homolog of NCBI NO: 34912248 NR Description: cytosolic aldehyde dehydrogenase
  misc_feature (1)..(357): Homolog of NCBI NO: 19850241 NR Description: cytosolic aldehyde dehydrogenase RF2C [Zea mays]
  misc_feature (1)..(357): Homolog of NCBI NO: 19850243 NR Description: cytosolic aldehyde dehydrogenase RF2C [Zea mays]
MAQRMHGYTLKEPVGVVGHIVPWNYPTTMFFFKVGPALAAGCAVVVKPAEQTPLSALFYAHLAREAGVPAGVLNVVPGFGPTAGAAVAAHMDVDKVSFTGSTEVGRLVMRAAAESNLKPVSLELGGKSPVIVFDDADLDMAVNLVNFATYTNKGEICVAGTRIYVQEGIYDEFVKKAAELASKSVVGDPFNPSVSQGPQVDKDQYEKVLRYIDIGKREGATLVTGGKPCGDNKGYYIEPTIFTDVKDDMTIAQDEIFGPVMALMKFKTVEEVIQKANNTRYGLAAGIVTKNIDVANTVSRSIRAGAIWINCYFAFDPDAPFGGYKMSGFGKDMGMDALDKYLQTKTVVTPLYNTPWL

SEQ ID NO: 16385 - protein, 353 aa, Zea mays subsp. mays
  peptide (1)..(353): Ceres Seq. ID no. 15180772
  misc_feature (1)..(353): Homolog of NCBI NO: 7431451 NR Description: rf2 nuclear restorer protein - maize
  misc_feature (1)..(353): Homolog of NCBI NO: 20530127 NR Description: mitochondrial aldehyde dehydrogenase [Secale
  misc_feature (1)..(353): Homolog of NCBI NO: 8163730 NR Description: aldehyde dehydrogenase [Oryza sativa]
  misc_feature (1)..(353): Homolog of NCBI NO: 18404212 NR Description: aldehyde dehydrogenase (ALDH1a) [Arabidopsis
  misc_feature (1)..(352): Homolog of NCBI NO: 34912252 NR Description: putative cytosolic aldehyde dehydrogenase
  misc_feature (1)..(352): Homolog of NCBI NO: 19850247 NR Description: cytosolic aldehyde dehydrogenase RF2D [Zea mays]
  misc_feature (1)..(352): Homolog of NCBI NO: 19850245 NR Description: cytosolic aldehyde dehydrogenase RF2D [Zea mays]
  misc_feature (1)..(353): Homolog of NCBI NO: 34912248 NR Description: cytosolic aldehyde dehydrogenase
  misc_feature (1)..(353): Homolog of NCBI NO: 19850241 NR Description: cytosolic aldehyde dehydrogenase RF2C [Zea mays]
  misc_feature (1)..(353): Homolog of NCBI NO: 19850243 NR Description: cytosolic aldehyde dehydrogenase RF2C [Zea mays]
MHGYTLKEPVGVVGHIVPWNYPTTMFFFKVGPALAAGCAVVVKPAEQTPLSALFYAHLAREAGVPAGVLNVVPGFGPTAGAAVAAHMDVDKVSFTGSTEVGRLVMRAAAESNLKPVSLELGGKSPVIVFDDADLDMAVNLVNFATYTNKGEICVAGTRIYVQEGIYDEFVKKAAELASKSVVGDPFNPSVSQGPQVDKDQYEKVLRYIDIGKREGATLVTGGKPCGDNKGYYIEPTIFTDVKDDMTIAQDEIFGPVMALMKFKTVEEVIQKANNTRYGLAAGIVTKNIDVANTVSRSIRAGAIWINCYFAFDPDAPFGGYKMSGFGKDMGMDALDKYLQTKTVVTPLYNTPWL

SEQ ID NO: 16386 - DNA, 1499 bp, Zea mays subsp. mays
  misc_feature (1)..(1499): Ceres Seq. ID no. 12407470
  misc_feature: MA Experiment ID: 108528 Result: Down-regulated in Transcription
  misc_feature: MA Experiment 108528 PARAMETER Experiment Name: Zm_Imbibed_Seeds_P Parameter: Age (day) Value: 5 vs. 2
  misc_feature: MA Experiment 108528 PARAMETER Experiment Name: Zm_Imbibed_Seeds_P Parameter: Organism Value: Zea mays
  misc_feature: MA Experiment 108528 PARAMETER Experiment Name: Zm_Imbibed_Seeds_P Parameter: Plant Line Value: 35A19
  misc_feature: MA Experiment 108528 PARAMETER Experiment Name: Zm_Imbibed_Seeds_P Parameter: Tissue Value: Aerial vs. Embryo
  misc_feature: MA Experiment ID: 108530 Result: Down-regulated in Transcription
  misc_feature: MA Experiment 108530 PARAMETER Experiment Name: Zm_Imbibed_Seeds_P Parameter: Age (day) Value: 6 vs. 2
  misc_feature: MA Experiment 108530 PARAMETER Experiment Name: Zm_Imbibed_Seeds_P Parameter: Organism Value: Zea mays
  misc_feature: MA Experiment 108530 PARAMETER Experiment Name: Zm_Imbibed_Seeds_P Parameter: Plant Line Value: 35A19
  misc_feature: MA Experiment 108530 PARAMETER Experiment Name: Zm_Imbibed_Seeds_P Parameter: Tissue Value: Aerial vs. Embryo
  misc_feature: MA Experiment ID: 108545 Result: Down-regulated in Transcription
  misc_feature: MA Experiment 108545 PARAMETER Experiment Name: Zm_Imbibed_Seeds_P Parameter: Age (day) Value: 3 vs. 2
  misc_feature: MA Experiment 108545 PARAMETER Experiment Name: Zm_Imbibed_Seeds_P Parameter: Organism Value: Zea mays
  misc_feature: MA Experiment 108545 PARAMETER Experiment Name: Zm_Imbibed_Seeds_P Parameter: Plant Line Value: 35A19
  misc_feature: MA Experiment 108545 PARAMETER Experiment Name: Zm_Imbibed_Seeds_P Parameter: Tissue Value: Aerial vs. Embryo
  misc_feature: MA Experiment ID: 108547 Result: Down-regulated in Transcription
  misc_feature: MA Experiment 108547 PARAMETER Experiment Name: Zm_Imbibed_Seeds_P Parameter: Age (day) Value: 4 vs. 2
  misc_feature: MA Experiment 108547 PARAMETER Experiment Name: Zm_Imbibed_Seeds_P Parameter: Organism Value: Zea mays
  misc_feature: MA Experiment 108547 PARAMETER Experiment Name: Zm_Imbibed_Seeds_P Parameter: Plant Line Value: 35A19
  misc_feature: MA Experiment 108547 PARAMETER Experiment Name: Zm_Imbibed_Seeds_P Parameter: Tissue Value: Aerial vs. Embryo
aaatccgcggcacggacggagagacggctgcaccgccccacacccacccttttccgcgcccgcgaagaaaacgaaggcagtggaacccgaagcggaggggccagaaagcgacccgaccgtctctccgctccctccctcccccacaccacccacctgtgatctcccgcgcgggagatccgcccgccccatggcgccgtcgcgcccgctcatgcgggggatccgcccgccgcgcgtcttcccgacccgcggcggccgcgcctcgccgtacgctgtcgccctcacggccctgctcctcgtctccgccgccctcctcgcgctcatcgccttcggcgtcttctcgctccccgtgtcagcgccgaacgccgccgccaccaccacagccggaggggagaccgaatccgccgacacccgccccgcgcgcccccgcgcccgccgggacctgggggaggggctgggagagcgcggcgcgcagtggaccgaggtcatctcgtgggagccaagggcattcgtctaccacaacttcctgtctaaggaagagtgtgaatacctaattggattggccaagcctcacatggtaaaatcaacagttgtcgacagcactactggtaaaagcaaggacagcagggtccggacaagttcgggcatgtttcttcaaagaggaagggacaaggttattcgagtaattgaaaagaggattgcagactataccttcatacctgtagatcatggagagggactccaagtactgcattatgaagtcgggcagaagtatgagcctcactttgattattttcttgatgagtttaacaccaagaatggtggtcagaggatggctactcttctgatgtatctatcagatgttgaagaagggggcgagactattttccctgatgcaaatgtgaacgtcagttctttaccatggtacaatgagctttcagagtgtgccaagagaggcctttctgtcaaaccaaagatgggagatgcacttcttttctggagcatgaaaccagatgccaccctggacccattaagtttgcatgggggttgtcctgtgattagaggaaataaatggtcgtcaaccaagtggatgcatatccacgagtacaaagcttgagccttcaagactcgagagtcgagcgtaccaaagatggatctctatgcatgtgacttggggctgtctactgggttgacacccatgtatgctttacagacccactgaagctgtattctttgctcctttgttggaggggggagaattgcagataataggggccaataagcaggggccttgctcatccctgcagtatttttgggtctgatccttgctgacttggcttttgtcttttcttttctttttcttaccttgccgtaccccagctatagaggaatggtgtagtgtctgggggcatagagtttgagattttgttttgtgccacacctgtgttactagtataagctttggtactaatgaataacgaggcctaagctcacatctactg

SEQ ID NO: 16387 - protein, 370 aa, Zea mays subsp. mays
  peptide (1)..(370): Ceres Seq. ID no. 12407471
  misc_feature (242)..(365): Pfam Name: 2OG-Fe(II) oxygenase superfamily Pfam Description: 2OG-Fe(II) oxygenase superfamily
  misc_feature (162)..(368): Homolog of NCBI NO: 15239594 NR Description: putative protein
  misc_feature (143)..(368): Homolog of NCBI NO: 29150365 NR Description: putative oxidoreductase [Oryza sativa (japonica
  misc_feature (162)..(368): Homolog of NCBI NO: 20260280 NR Description: unknown protein [Arabidopsis thaliana]
  misc_feature (92)..(347): Homolog of NCBI NO: 7488226 NR Description: procollagen-proline dioxygenase alpha chain
  misc_feature (74)..(347): Homolog of NCBI NO: 15239240 NR Description: prolyl 4-hydroxylase, alpha subunit-like protein
  misc_feature (83)..(352): Homolog of NCBI NO: 37535718 NR Description: putative prolyl 4-hydroxylase, alpha subunit
  misc_feature (92)..(369): Homolog of NCBI NO: 21593091 NR Description: putative prolyl 4-hydroxylase, alpha subunit
  misc_feature (92)..(369): Homolog of NCBI NO: 15227885 NR Description: putative prolyl 4-hydroxylase, alpha subunit
  misc_feature (87)..(369): Homolog of NCBI NO: 21537370 NR Description: putative prolyl 4-hydroxylase, alpha subunit
  misc_feature (87)..(369): Homolog of NCBI NO: 18394842 NR Description: expressed protein
NPRHGRRDGCTAPHPPFSAPAKKTKAVEPEAEGPESDPTVSPLPPSPTPPTCDLPRGRSARPMAPSRPLMRGIRPPRVFPTRGGRASPYAVALTALLLVSAALLALIAFGVFSLPVSAPNAAATTTAGGETESADTRPARPRARRDLGEGLGERGAQWTEVISWEPRAFVYHNFLSKEECEYLIGLAKPHMVKSTVVDSTTGKSKDSRVRTSSGMFLQRGRDKVIRVIEKRIADYTFIPVDHGEGLQVLHYEVGQKYEPHFDYFLDEFNTKNGGQRMATLLMYLSDVEEGGETIFPDANVNVSSLPWYNELSECAKRGLSVKPKMGDALLFWSMKPDATLDPLSLHGGCPVIRGNKWSSTKWMHIHEYKA

SEQ ID NO: 16388 - protein, 308 aa, Zea mays subsp. mays; identical to SEQ ID NO: 5872
  peptide (1)..(308): Ceres Seq. ID no. 12407472
  misc_feature (180)..(303): Pfam Name: 2OG-Fe(II) oxygenase superfamily Pfam Description: 2OG-Fe(II) oxygenase superfamily
  misc_feature (25)..(307): Homolog of NCBI NO: 18394842 NR Description: expressed protein
  misc_feature (30)..(307): Homolog of NCBI NO: 15227885 NR Description: putative prolyl 4-hydroxylase, alpha subunit
  misc_feature (25)..(307): Homolog of NCBI NO: 21537370 NR Description: putative prolyl 4-hydroxylase, alpha subunit
  misc_feature (100)..(306): Homolog of NCBI NO: 15239594 NR Description: putative protein
  misc_feature (81)..(306): Homolog of NCBI NO: 29150365 NR Description: putative oxidoreductase [Oryza sativa (japonica
  misc_feature (100)..(306): Homolog of NCBI NO: 20260280 NR Description: unknown protein [Arabidopsis thaliana]
  misc_feature (30)..(285): Homolog of NCBI NO: 7488226 NR Description: procollagen-proline dioxygenase alpha chain
  misc_feature (12)..(285): Homolog of NCBI NO: 15239240 NR Description: prolyl 4-hydroxylase, alpha subunit-like protein
  misc_feature (21)..(290): Homolog of NCBI NO: 37535718 NR Description: putative prolyl 4-hydroxylase, alpha subunit
  misc_feature (30)..(307): Homolog of NCBI NO: 21593091 NR Description: putative prolyl 4-hydroxylase, alpha subunit

SEQ ID NO: 16389 - protein, 301 aa, Zea mays subsp. mays; identical to SEQ ID NO: 5873
  peptide (1)..(301): Ceres Seq. ID no. 12407473
  misc_feature (173)..(296): Pfam Name: 2OG-Fe(II) oxygenase superfamily Pfam Description: 2OG-Fe(II) oxygenase superfamily
  misc_feature (93)..(299): Homolog of NCBI NO: 15239594 NR Description: putative protein
  misc_feature (74)..(299): Homolog of NCBI NO: 29150365 NR Description: putative oxidoreductase [Oryza sativa (japonica
  misc_feature (93)..(299): Homolog of NCBI NO: 20260280 NR Description: unknown protein [Arabidopsis thaliana]
  misc_feature (23)..(278): Homolog of NCBI NO: 7488226 NR Description: procollagen-proline dioxygenase alpha chain
  misc_feature (5)..(278): Homolog of NCBI NO: 15239240 NR Description: prolyl 4-hydroxylase, alpha subunit-like protein
  misc_feature (14)..(283): Homolog of NCBI NO: 37535718 NR Description: putative prolyl 4-hydroxylase, alpha subunit
  misc_feature (23)..(300): Homolog of NCBI NO: 21593091 NR Description: putative prolyl 4-hydroxylase, alpha subunit
  misc_feature (23)..(300): Homolog of NCBI NO: 15227885 NR Description: putative prolyl 4-hydroxylase, alpha subunit
  misc_feature (18)..(300): Homolog of NCBI NO: 21537370 NR Description: putative prolyl 4-hydroxylase, alpha subunit
  misc_feature (18)..(300): Homolog of NCBI NO: 18394842 NR Description: expressed protein

SEQ ID NO: 16390 - DNA, 2136 bp, Zea mays subsp. mays
  misc_feature (1)..(2136): Ceres Seq. ID no. 12353121
  misc_feature: MA Experiment ID: 20000535 Result: Down-regulated in Transcription
  misc_feature: MA Experiment 20000535 PARAMETER Experiment Name: Zm_Hybrid_Seed_Dev_P Parameter: DAP Value: 30 vs. 12
  misc_feature: MA Experiment 20000535 PARAMETER Experiment Name: Zm_Hybrid_Seed_Dev_P Parameter: Organism Value: Zea mays
  misc_feature: MA Experiment 20000535 PARAMETER Experiment Name: Zm_Hybrid_Seed_Dev_P Parameter: Plant Line Value: 35A19
  misc_feature: MA Experiment 20000535 PARAMETER Experiment Name: Zm_Hybrid_Seed_Dev_P Parameter: Tissue Value: Embryo vs. Unfert Floret
gcattcgattcggcagctgcggggccgccggccgaagccgaatcgcctccgcagtccgcaccacacgtgccaccccctcgcgcctccctctcctcttcactccgccaccactcttctccccctccggcgagagcgtgcgcccacgcggccacgcccaccccgccatgaagcagctgcaccggcagtccagcatgagcaagcagcaccgcccgcaccaccaccgtacatccctctcccgcaccctcgcttcctacctcctccgcgagcagcgcctcctcttcgtcctcctcggcttcctcctagcctcgtccttcttcttcctctacccgcattccgccgccggatcctcctcggccaccaatatcaccgccgccttcgccagaaagaacccccgcagcagcggcgcctcctcctccgcgcgccgcctccccgtcggtgtccggaagccctccctgcgcatcgtcgtcaccggcggcgcgggttttgttggcagccacctcgtcgacaagctcctcgcccgcggggatagcgtcatcgtcgtcgacaacttcttcacgggccgcaaggacaacgtcgcgcaccacctcggcaacccgcgattcgagctcatccgccacgacgtcgtcgaacccattctcctagaggtcgaccagatctaccacctcgcctgccccgcatcccccgtgcactacaagttcaatcccatcaaaaccatcatatcctccccgctccgctgcccgcgcataattcgtccacatcctcacagaaattggattcgttatatttgtctttattggtttatttatggacacggatacggcttctgtaatgcacatttcacatgggggtgaaggtgcgcgtggggggtgcatttgtagttttgtgcttgcgtggggaatagcctgtatttacatctgtttattttgtctgttttttttcttcaattgtttctttaaccaactatgtacaagacaaatgtcatggggaccttgaatatgcttggactggctaagagggttggggcccggttcttgttgactagtaccagtgaagtgtatggtgatcctcttgagcatccacagaaggagagctactggggacatgtcaatcccataggtgttaggagctgttatgatgagggaaagagaacagctgaaactcttaccatggattaccaccgcggtgctggtgttgaggtgagaattgcacgcatatttaacacatatggccctcgaatgtgtttagatgatggccgagttgttagcaactttgttgcacaggctttgcggaaacaaccaatgacagtttatggcgatggaaaacagactagaagttttcagtatgtttcagatttggttgatgggttggtaactctaatggaaagcgaccatattggaccattcaacttggggaatcctggagaatttacaatgctggagcttgcacaggtggtaaaagaaactatcgacccaggtgcatctgtcgagttcaaacccaatactgcggatgatccacacatgagaaaacctgacatttcgaaggccaaatctcttctcaattgggagccccaagtttcactaaaacaaggtctgccgcgtatggtgtcggacttccagaaacgcatcatggatgagaaatgatgaggagcagaggtttgtttcgaaaaggaaatgaggagcagacgccaccagtctcagaacactgtatcctactgacagatctcttttggtgccatgaaggctgaaggccttgacaaaggtcagatgaacgactaattgccaaaaaattcttcctcgctccagggcaatttttttttgtgacaggacatctgttctttggttctggtttcttcgatacataaacttcgccatagaattccataattgcctttaagcgaacagtgagaggtcaacataaatttagtccctctttctctctttctgatgttattgaaacccatccacgtccattttacgtaggatgataccatattctcatgctacacatgtcctctatttcgtgtctgaatttttaggtgattttattactcttgtacaacaaacaaatagttattttatggttccttaaattgttacttttataatttgtgattttatgatttgtgatttgtttttg

SEQ ID NO: 16391 - protein, 282 aa, Zea mays subsp. mays
  peptide (1)..(282): Ceres Seq. ID no. 12353122
  misc_feature (153)..(238): Pfam Name: NAD dependent epimerase/dehydratase family Pfam Description: NAD dependent epimerase/dehydratase family
  misc_feature (150)..(238): Homolog of NCBI NO: 15231432 NR Description: dTDP-glucose 4-6-dehydratases-like protein
  misc_feature (150)..(238): Homolog of NCBI NO: 13591616 NR Description: UDP-D-glucuronate carboxy-lyase [Pisum sativum]
  misc_feature (55)..(198): Homolog of NCBI NO: 34908082 NR Description: P0506B12.30 [Oryza sativa (japonica
  misc_feature (109)..(238): Homolog of NCBI NO: 15227109 NR Description: putative dTDP-glucose 4-6-dehydratase; protein
  misc_feature (84)..(238): Homolog of NCBI NO: 2129578 NR Description: dTDP-glucose 4-6-dehydratase homolog D18 -
  misc_feature (84)..(238): Homolog of NCBI NO: 15229334 NR Description: dTDP-glucose 4-6-dehydratase homolog D18; protein
  misc_feature (63)..(238): Homolog of NCBI NO: 30693847 NR Description: NAD-dependent epimerase/dehydratase family
  misc_feature (63)..(238): Homolog of NCBI NO: 11270116 NR Description: dTDP-glucose 4-6-dehydratase-like protein -
  misc_feature (63)..(238): Homolog of NCBI NO: 17473549 NR Description: dTDP-glucose 4-6-dehydratase-like protein
  misc_feature (55)..(238): Homolog of NCBI NO: 25396402 NR Description: UDP-glucuronic acid decarboxylase
IRFGSCGAAGRSRIASAVRTTRATPSRLPLLFTPPPLFSPSGESVRPRGHAHPAMKQLHRQSSMSKQHRPHHHRTSLSRTLASYLLREQRLLFVLLGFLLASSFFFLYPHSAAGSSSATNITAAFARKNPRSSGASSSARRLPVGVRKPSLRIVVTGGAGFVGSHLVDKLLARGDSVIVVDNFFTGRKDNVAHHLGNPRFELIRHDVVEPILLEVDQIYHLACPASPVHYKFNPIKTIISSPLRCPRIIRPHPHRNWIRYICLYWFIYGHGYGFCNAHFTWG

SEQ ID NO: 16392 - protein, 228 aa, Zea mays subsp. mays
  peptide (1)..(228): Ceres Seq. ID no. 12353123
  misc_feature (99)..(184): Pfam Name: NAD dependent epimerase/dehydratase family Pfam Description: NAD dependent epimerase/dehydratase family
  misc_feature (96)..(184): Homolog of NCBI NO: 15231432 NR Description: dTDP-glucose 4-6-dehydratases-like protein
  misc_feature (96)..(184): Homolog of NCBI NO: 13591616 NR Description: UDP-D-glucuronate carboxy-lyase [Pisum sativum]
  misc_feature (1)..(144): Homolog of NCBI NO: 34908082 NR Description: P0506B12.30 [Oryza sativa (japonica
  misc_feature (55)..(184): Homolog of NCBI NO: 15227109 NR Description: putative dTDP-glucose 4-6-dehydratase; protein
  misc_feature (30)..(184): Homolog of NCBI NO: 2129578 NR Description: dTDP-glucose 4-6-dehydratase homolog D18 -
  misc_feature (30)..(184): Homolog of NCBI NO: 15229334 NR Description: dTDP-glucose 4-6-dehydratase homolog D18; protein
  misc_feature (9)..(184): Homolog of NCBI NO: 30693847 NR Description: NAD-dependent epimerase/dehydratase family
  misc_feature (9)..(184): Homolog of NCBI NO: 11270116 NR Description: dTDP-glucose 4-6-dehydratase-like protein -
  misc_feature (9)..(184): Homolog of NCBI NO: 17473549 NR Description: dTDP-glucose 4-6-dehydratase-like protein
  misc_feature (1)..(184): Homolog of NCBI NO: 25396402 NR Description: UDP-glucuronic acid decarboxylase
MKQLHRQSSMSKQHRPHHHRTSLSRTLASYLLREQRLLFVLLGFLLASSFFFLYPHSAAGSSSATNITAAFARKNPRSSGASSSARRLPVGVRKPSLRIVVTGGAGFVGSHLVDKLLARGDSVIVVDNFFTGRKDNVAHHLGNPRFELIRHDVVEPILLEVDQIYHLACPASPVHYKFNPIKTIISSPLRCPRIIRPHPHRNWIRYICLYWFIYGHGYGFCNAHFTWG

SEQ ID NO: 16393 - protein, 225 aa, Zea mays subsp. mays
  peptide (1)..(225): Ceres Seq. ID no. 12353124
  misc_feature (3)..(221): Pfam Name: NAD dependent epimerase/dehydratase family Pfam Description: NAD dependent epimerase/dehydratase family
  misc_feature (3)..(221): Homolog of NCBI NO: 15231432 NR Description: dTDP-glucose 4-6-dehydratases-like protein
  misc_feature (3)..(225): Homolog of NCBI NO: 13591616 NR Description: UDP-D-glucuronate carboxy-lyase [Pisum sativum]
  misc_feature (4)..(224): Homolog of NCBI NO: 34908082 NR Description: P0506B12.30 [Oryza sativa (japonica
  misc_feature (3)..(225): Homolog of NCBI NO: 15227109 NR Description: putative dTDP-glucose 4-6-dehydratase; protein
  misc_feature (3)..(225): Homolog of NCBI NO: 2129578 NR Description: dTDP-glucose 4-6-dehydratase homolog D18 -
  misc_feature (3)..(225): Homolog of NCBI NO: 15229334 NR Description: dTDP-glucose 4-6-dehydratase homolog D18; protein
  misc_feature (2)..(224): Homolog of NCBI NO: 30693847 NR Description: NAD-dependent epimerase/dehydratase family
  misc_feature (3)..(224): Homolog of NCBI NO: 11270116 NR Description: dTDP-glucose 4-6-dehydratase-like protein -
  misc_feature (3)..(224): Homolog of NCBI NO: 17473549 NR Description: dTDP-glucose 4-6-dehydratase-like protein
  misc_feature (3)..(224): Homolog of NCBI NO: 25396402 NR Description: UDP-glucuronic acid decarboxylase
MYKTNVMGTLNMLGLAKRVGARFLLTSTSEVYGDPLEHPQKESYWGHVNPIGVRSCYDEGKRTAETLTMDYHRGAGVEVRIARIFNTYGPRMCLDDGRVVSNFVAQALRKQPMTVYGDGKQTRSFQYVSDLVDGLVTLMESDHIGPFNLGNPGEFTMLELAQVVKETIDPGASVEFKPNTADDPHMRKPDISKAKSLLNWEPQVSLKQGLPRMVSDFQKRIMDEK

SEQ ID NO: 16394 - DNA, 1409 bp, Zea mays subsp. mays
  misc_feature (1)..(1409): Ceres Seq. ID no. 12369478
  misc_feature: MA Experiment ID: 108504 Result: Up-regulated in Transcription
  misc_feature: MA Experiment 108504 PARAMETER Experiment Name: Zm_Drought_P Parameter: Age (day) Value: 8
  misc_feature: MA Experiment 108504 PARAMETER Experiment Name: Zm_Drought_P Parameter: Organism Value: Zea mays
  misc_feature: MA Experiment 108504 PARAMETER Experiment Name: Zm_Drought_P Parameter: Plant Line Value: 35A19
  misc_feature: MA Experiment 108504 PARAMETER Experiment Name: Zm_Drought_P Parameter: Timepoint (hr) Value: 12
  misc_feature: MA Experiment 108504 PARAMETER Experiment Name: Zm_Drought_P Parameter: Tissue Value: Aerial
  misc_feature: MA Experiment 108504 PARAMETER Experiment Name: Zm_Drought_P Parameter: Treatment Value: Drought vs. No Drought
  misc_feature: MA Experiment ID: 108526 Result: Up-regulated in Transcription
  misc_feature: MA Experiment 108526 PARAMETER Experiment Name: Zm_5mM_NO_P Parameter: Age (day) Value: 8
  misc_feature: MA Experiment 108526 PARAMETER Experiment Name: Zm_5mM_NO_P Parameter: Organism Value: Zea mays
  misc_feature: MA Experiment 108526 PARAMETER Experiment Name: Zm_5mM_NO_P Parameter: Plant Line Value: 35A19
  misc_feature: MA Experiment 108526 PARAMETER Experiment Name: Zm_5mM_NO_P Parameter: Timepoint (hr) Value: 1
  misc_feature: MA Experiment 108526 PARAMETER Experiment Name: Zm_5mM_NO_P Parameter: Tissue Value: Aerial
  misc_feature: MA Experiment 108526 PARAMETER Experiment Name: Zm_5mM_NO_P Parameter: Treatment Value: 5mM NO vs. No Treatment
  misc_feature: MA Experiment ID: 108527 Result: Up-regulated in Transcription
  misc_feature: MA Experiment 108527 PARAMETER Experiment Name: Zm_5mM_NO_P Parameter: Age (day) Value: 8
  misc_feature: MA Experiment 108527 PARAMETER Experiment Name: Zm_5mM_NO_P Parameter: Organism Value: Zea mays
  misc_feature: MA Experiment 108527 PARAMETER Experiment Name: Zm_5mM_NO_P Parameter: Plant Line Value: 35A19
  misc_feature: MA Experiment 108527 PARAMETER Experiment Name: Zm_5mM_NO_P Parameter: Timepoint (hr) Value: 6
  misc_feature: MA Experiment 108527 PARAMETER Experiment Name: Zm_5mM_NO_P Parameter: Tissue Value: Aerial
  misc_feature: MA Experiment 108527 PARAMETER Experiment Name: Zm_5mM_NO_P Parameter: Treatment Value: 5mM NO vs. No Treatment
  misc_feature: MA Experiment ID: 108529 Result: Down-regulated in Transcription
  misc_feature: MA Experiment 108529 PARAMETER Experiment Name: Zm_Imbibed_Seeds_P Parameter: Age (day) Value: 5 vs. 2
  misc_feature: MA Experiment 108529 PARAMETER Experiment Name: Zm_Imbibed_Seeds_P Parameter: Organism Value: Zea mays
  misc_feature: MA Experiment 108529 PARAMETER Experiment Name: Zm_Imbibed_Seeds_P Parameter: Plant Line Value: 35A19
  misc_feature: MA Experiment 108529 PARAMETER Experiment Name: Zm_Imbibed_Seeds_P Parameter: Tissue Value: Roots vs. Embryo
  misc_feature: MA Experiment ID: 108535 Result: Down-regulated in Transcription
  misc_feature: MA Experiment 108535 PARAMETER Experiment Name: Zm_Meristem_P Parameter: Age (day) Value: 8
  misc_feature: MA Experiment 108535 PARAMETER Experiment Name: Zm_Meristem_P Parameter: Organism Value: Zea mays
  misc_feature: MA Experiment 108535 PARAMETER Experiment Name: Zm_Meristem_P Parameter: Plant Line Value: 35A19
  misc_feature: MA Experiment 108535 PARAMETER Experiment Name: Zm_Meristem_P Parameter: Tissue Value: Root Meristem vs. Above Root Meristem
  misc_feature: MA Experiment ID: 108536 Result: Up-regulated in Transcription
  misc_feature: MA Experiment 108536 PARAMETER Experiment Name: Zm_Meristem_P Parameter: Age (day) Value: 8
  misc_feature: MA Experiment 108536 PARAMETER Experiment Name: Zm_Meristem_P Parameter: Organism Value: Zea mays
  misc_feature: MA Experiment 108536 PARAMETER Experiment Name: Zm_Meristem_P Parameter: Plant Line Value: 35A19
  misc_feature: MA Experiment 108536 PARAMETER Experiment Name: Zm_Meristem_P Parameter: Tissue Value: Shoot Meristem vs. Above Shoot Meristem
  misc_feature: MA Experiment ID: 108540 Result: Up-regulated in Transcription
  misc_feature: MA Experiment 108540 PARAMETER Experiment Name: Zm_20percent_PEG_P Parameter: Age (day) Value: 8
  misc_feature: MA Experiment 108540 PARAMETER Experiment Name: Zm_20percent_PEG_P Parameter: Organism Value: Zea mays
  misc_feature: MA Experiment 108540 PARAMETER Experiment Name: Zm_20percent_PEG_P Parameter: Plant Line Value: 35A19
  misc_feature: MA Experiment 108540 PARAMETER Experiment Name: Zm_20percent_PEG_P Parameter: Timepoint (hr) Value: 6
  misc_feature: MA Experiment 108540 PARAMETER Experiment Name: Zm_20percent_PEG_P Parameter: Tissue Value: Aerial
  misc_feature: MA Experiment 108540 PARAMETER Experiment Name: Zm_20percent_PEG_P Parameter: Treatment Value: 20percent PEG vs. No Treatment
  misc_feature: MA Experiment ID: 108542 Result: Up-regulated in Transcription
  misc_feature: MA Experiment 108542 PARAMETER Experiment Name: Zm_150mM_NaCl_P Parameter: Age (day) Value: 8
  misc_feature: MA Experiment 108542 PARAMETER Experiment Name: Zm_150mM_NaCl_P Parameter: Organism Value: Zea mays
  misc_feature: MA Experiment 108542 PARAMETER Experiment Name: Zm_150mM_NaCl_P Parameter: Plant Line Value: 35A19
  misc_feature: MA Experiment 108542 PARAMETER Experiment Name: Zm_150mM_NaCl_P Parameter: Timepoint (hr) Value: 6
  misc_feature: MA Experiment 108542 PARAMETER Experiment Name: Zm_150mM_NaCl_P Parameter: Tissue Value: Aerial
  misc_feature: MA Experiment 108542 PARAMETER Experiment Name: Zm_150mM_NaCl_P Parameter: Treatment Value: 150mM NaCl vs. No Treatment
  misc_feature: MA Experiment ID: 108543 Result: Down-regulated in Transcription
  misc_feature: MA Experiment ID: 108545 Result: Down-regulated in Transcription
  misc_feature: MA Experiment 108545 PARAMETER Experiment Name: Zm_Imbibed_Seeds_P Parameter: Age (day) Value: 3 vs. 2
  misc_feature: MA Experiment 108545 PARAMETER Experiment Name: Zm_Imbibed_Seeds_P Parameter: Organism Value: Zea mays
  misc_feature: MA Experiment 108545 PARAMETER Experiment Name: Zm_Imbibed_Seeds_P Parameter: Plant Line Value: 35A19
  misc_feature: MA Experiment 108545 PARAMETER Experiment Name: Zm_Imbibed_Seeds_P Parameter: Tissue Value: Aerial vs. Embryo
  misc_feature: MA Experiment ID: 108556 Result: Up-regulated in Transcription
  misc_feature: MA Experiment 108556 PARAMETER Experiment Name: Zm_Drought_P Parameter: Age (day) Value: 9
  misc_feature: MA Experiment 108556 PARAMETER Experiment Name: Zm_Drought_P Parameter: Organism Value: Zea mays
  misc_feature: MA Experiment 108556 PARAMETER Experiment Name: Zm_Drought_P Parameter: Plant Line Value: 35A19
  misc_feature: MA Experiment 108556 PARAMETER Experiment Name: Zm_Drought_P Parameter: Timepoint (hr) Value: 24
  misc_feature: MA Experiment 108556 PARAMETER Experiment Name: Zm_Drought_P Parameter: Tissue Value: Aerial
  misc_feature: MA Experiment 108556 PARAMETER Experiment Name: Zm_Drought_P Parameter: Treatment Value: Drought vs. No Drought
  misc_feature: MA Experiment ID: 108559 Result: Up-regulated in Transcription
  misc_feature: MA Experiment 108559 PARAMETER Experiment Name: Zm_5mM_NO_P Parameter: Age (day) Value: 8
  misc_feature: MA Experiment 108559 PARAMETER Experiment Name: Zm_5mM_NO_P Parameter: Organism Value: Zea mays
  misc_feature: MA Experiment 108559 PARAMETER Experiment Name: Zm_5mM_NO_P Parameter: Plant Line Value: 35A19
  misc_feature: MA Experiment 108559 PARAMETER Experiment Name: Zm_5mM_NO_P Parameter: Timepoint (hr) Value: 12
  misc_feature: MA Experiment 108559 PARAMETER Experiment Name: Zm_5mM_NO_P Parameter: Tissue Value: Aerial
  misc_feature: MA Experiment 108559 PARAMETER Experiment Name: Zm_5mM_NO_P Parameter: Treatment Value: 5mM NO vs. No Treatment
  misc_feature: MA Experiment ID: 108688 Result: Down-regulated in Transcription
  misc_feature: MA Experiment 108688 PARAMETER Experiment Name: Zm_Embryos-Flowers__P Parameter: Tissue Value: Immature Flowers vs. Aerial+
  misc_feature: MA Experiment ID: 108689 Result: Up-regulated in Transcription
  misc_feature: MA Experiment 108689 PARAMETER Experiment Name: Zm_Drought_Roots_P Parameter: Age (day) Value: 9
  misc_feature: MA Experiment 108689 PARAMETER Experiment Name: Zm_Drought_Roots_P Parameter: Organism Value: Zea mays
  misc_feature: MA Experiment 108689 PARAMETER Experiment Name: Zm_Drought_Roots_P Parameter: Plant Line Value: 35A19
  misc_feature: MA Experiment 108689 PARAMETER Experiment Name: Zm_Drought_Roots_P Parameter: Timepoint (hr) Value: 24
  misc_feature: MA Experiment 108689 PARAMETER Experiment Name: Zm_Drought_Roots_P Parameter: Tissue Value: Roots
  misc_feature: MA Experiment 108689 PARAMETER Experiment Name: Zm_Drought_Roots_P Parameter: Treatment Value: Drought vs. No Drought
  misc_feature: MA Experiment ID: 20000477 Result: Up-regulated in Transcription
  misc_feature: MA Experiment 20000477 PARAMETER Experiment Name: Zm_5mM_SA_P Parameter: Age (day) Value: 10
  misc_feature: MA Experiment 20000477 PARAMETER Experiment Name: Zm_5mM_SA_P Parameter: Organism Value: Zea mays
  misc_feature: MA Experiment 20000477 PARAMETER Experiment Name: Zm_5mM_SA_P Parameter: Plant Line Value: 35A19
  misc_feature: MA Experiment 20000477 PARAMETER Experiment Name: Zm_5mM_SA_P Parameter: Timepoint (hr) Value: 48
  misc_feature: MA Experiment 20000477 PARAMETER Experiment Name: Zm_5mM_SA_P Parameter: Tissue Value: Aerial
  misc_feature: MA Experiment 20000477 PARAMETER Experiment Name: Zm_5mM_SA_P Parameter: Treatment Value: 5mM SA vs. No Treatment
  misc_feature: MA Experiment ID: 20000480 Result: Up-regulated in Transcription
  misc_feature: MA Experiment 20000480 PARAMETER Experiment Name: Zm_Drought_P Parameter: Age (day) Value: 11
  misc_feature: MA Experiment 20000480 PARAMETER Experiment Name: Zm_Drought_P Parameter: Organism Value: Zea mays
  misc_feature: MA Experiment 20000480 PARAMETER Experiment Name: Zm_Drought_P Parameter: Plant Line Value: 35A19
  misc_feature: MA Experiment 20000480 PARAMETER Experiment Name: Zm_Drought_P Parameter: Timepoint (hr) Value: 72
  misc_feature: MA Experiment 20000480 PARAMETER Experiment Name: Zm_Drought_P Parameter: Tissue Value: Aerial
  misc_feature: MA Experiment 20000480 PARAMETER Experiment Name: Zm_Drought_P Parameter: Treatment Value: Drought vs. No Drought
  misc_feature: MA Experiment ID: 20000533 Result: Up-regulated in Transcription
  misc_feature: MA Experiment 20000533 PARAMETER Experiment Name: Zm_0.001percent_MeJA_P Parameter: Age (day) Value: 11
  misc_feature: MA Experiment 20000533 PARAMETER Experiment Name: Zm_0.001percent_MeJA_P Parameter: Organism Value: Zea mays
  misc_feature: MA Experiment 20000533 PARAMETER Experiment Name: Zm_0.001percent_MeJA_P Parameter: Plant Line Value: 35A19
  misc_feature: MA Experiment 20000533 PARAMETER Experiment Name: Zm_0.001percent_MeJA_P Parameter: Timepoint (hr) Value: 72
  misc_feature: MA Experiment 20000533 PARAMETER Experiment Name: Zm_0.001percent_MeJA_P Parameter: Tissue Value: Aerial
  misc_feature: MA Experiment 20000533 PARAMETER Experiment Name: Zm_0.001percent_MeJA_P Parameter: Treatment Value: 0.001percent MeJA vs. No Treatment
  misc_feature: MA Experiment ID: 20000535 Result: Down-regulated in Transcription
  misc_feature: MA Experiment 20000535 PARAMETER Experiment Name: Zm_Hybrid_Seed_Dev_P Parameter: DAP Value: 30 vs. 12
  misc_feature: MA Experiment 20000535 PARAMETER Experiment Name: Zm_Hybrid_Seed_Dev_P Parameter: Organism Value: Zea mays
  misc_feature: MA Experiment 20000535 PARAMETER Experiment Name: Zm_Hybrid_Seed_Dev_P Parameter: Plant Line Value: 35A19
  misc_feature: MA Experiment 20000535 PARAMETER Experiment Name: Zm_Hybrid_Seed_Dev_P Parameter: Tissue Value: Embryo vs. Unfert Floret
  misc_feature: MA Experiment ID: 20001608 Result: Down-regulated in Transcription
  misc_feature: MA Experiment 20001608 PARAMETER Experiment Name: Zm_50ppm_KNO3_L-to-H_P Parameter: Age (day) Value: 21
  misc_feature: MA Experiment 20001608 PARAMETER Experiment Name: Zm_50ppm_KNO3_L-to-H_P Parameter: Organism Value: Zea mays
  misc_feature: MA Experiment 20001608 PARAMETER Experiment Name: Zm_50ppm_KNO3_L-to-H_P Parameter: Plant Line Value: 35A19
  misc_feature: MA Experiment 20001608 PARAMETER Experiment Name: Zm_50ppm_KNO3_L-to-H_P Parameter: Timepoint (hr) Value: 48
  misc_feature: MA Experiment 20001608 PARAMETER Experiment Name: Zm_50ppm_KNO3_L-to-H_P Parameter: Tissue Value: Shoots
  misc_feature: MA Experiment 20001608 PARAMETER Experiment Name: Zm_50ppm_KNO3_L-to-H_P Parameter: Treatment Value: 50ppm KNO3 vs. 50ppm KCl
atgcctttcgcgagagaaaggggtcgaatcggcggctgatttgacccggctcgctattagagctgcgaaagtgatccgagcagtcacggtttcggaagcggcgcgtcggccggaggagaaacgcaaccagctgtcgaggagctatgagcagcggtggcggaggcagagtgccggcggcggcggcggcgcagtcgcaggagctgcagctaccgccggggttccggttccacccgacggatgaggagctggtggtgcactacctctgccggcgctgcgccgggctgcccatctccgtgcccatcatcgccgaggtcgacctatacaagcacgatccctggcagctcccaaggatggcgctgtacggcgagaaggagtggtacttcttctccccgcgggaccgcaagtacccgaacgggtcgcggccgaaccgcgccgccggcgccgggtactggaaggccactggcgcagacaagccggtgggcacgccgaagccggtggccatcaagaaggctctcgtcttctacgccggcaaggcacccaagggcgacaagaccaactggatcatgcatgagtaccgcctcgccgacgtcgaccgcaccgcccgcaagaagaacaacagcctcaggttggatgattgggtgctgtgccgaatctacaacaagaaaggcgcgctggagaagccgaccggagccggcggcagggccgaggccagcagccagggcgcgctggggtccatgtccatgggctcgccgccggagcagaaaccgtccgtgctgccgtctgccacggcaacggccgcggccgcggccgggacggggtacgcgccgctgccgttctcggagctggcggcgtactacgaggtccggccgtccgactcgatgccccgggcgcacggcgcggactcgagctgctcgggccacgcgctggccgccacgtcgtcgtgcggcggnggcggctggcgagcggcctgaggtacagagccagcccaagatctccgagtgggagcgcactttcgccgccggcgccggcccgggaatcaacccggccggctcgatgctggggcttggcgggcatcagctcggcccctcggcggtgggggtagggctgcccgcgggcgacccgctgctccaggacatcctcacatactggggcaagccgtactgagaaagatgactggtccgagccgccggcgatgaggccatgtcggcttgtgaatgatcatggagctggactacaggattattgctgctacgagttgaattaaactgtttatatgcgattgatttggtactgggatttttgtatacttgaattagtactctctctatatagagagacatacacatactcgagtatatatgttttgcttatatagagtatggagtaataatatttatatctgctggtcc

SEQ ID NO: 16395 - protein, 308 aa, Zea mays subsp. mays
  peptide (1)..(308): Ceres Seq. ID no. 12369479
  misc_feature (1)..(253): Homolog of NCBI NO: 28972153 NR Description: mKIAA0324 protein [Mus musculus]
  misc_feature (245)..(308): Homolog of NCBI NO: 25458553 NR Description: OsNAC6 protein [imported] - rice
  misc_feature (238)..(238): Xaa is any aa, unknown or other
MRSWWCTTSAGAAPGCPSPCPSSPRSTYTSTIPGSSQGWRCTARRSGTSSPRGTASTRTGRGRTAPPAPGTGRPLAQTSRWARRSRWPSRRLSSSTPARHPRATRPTGSCMSTASPTSTAPPARRTTASGWMIGCCAESTTRKARWRSRPEPAAGPRPAARARWGPCPWARRRSRNRPCCRLPRQRPRPRPGRGTRRCRSRSWRRTTRSGRPTRCPGRTARTRAARATRWPPRRRAAXAAGERPEVQSQPKISEWERTFAAGAGPGINPAGSMLGLGGHQLGPSAVGVGLPAGDPLLQDILTYWGKPY

SEQ ID NO: 16396 - protein, 275 aa, Zea mays subsp. mays
  peptide (1)..(275): Ceres Seq. ID no. 12369480
  misc_feature (22)..(147): Pfam Name: No apical meristem (NAM) protein Pfam Description: No apical meristem (NAM) protein
  misc_feature (19)..(230): Homolog of NCBI NO: 22326685 NR Description: Expressed protein
  misc_feature (19)..(179): Homolog of NCBI NO: 21593134 NR Description: GRAB1-like protein [Arabidopsis thaliana]
  misc_feature (20)..(271): Homolog of NCBI NO: 25458551 NR Description: OsNAC5 protein [imported] - rice
  misc_feature (19)..(179): Homolog of NCBI NO: 15223963 NR Description: GRAB1-like protein
  misc_feature (17)..(262): Homolog of NCBI NO: 40647397 NR Description: NAC domain protein [Lycopersicon esculentum]
  misc_feature (14)..(262): Homolog of NCBI NO: 14485513 NR Description: putative NAC domain protein [Solanum tuberosum]
  misc_feature (17)..(267): Homolog of NCBI NO: 21105734 NR Description: nam-like protein 3 [Petunia x hybrida]
  misc_feature (17)..(206): Homolog of NCBI NO: 15223456 NR Description: NAC domain protein, putative
  misc_feature (19)..(267): Homolog of NCBI NO: 21105748 NR Description: nam-like protein 10 [Petunia x hybrida]
  misc_feature (18)..(267): Homolog of NCBI NO: 25458553 NR Description: OsNAC6 protein [imported] - rice
  misc_feature (269)..(269): Xaa is any aa, unknown or other
MSSGGGGRVPAAAAAQSQELQLPPGFRFHPTDEELVVHYLCRRCAGLPISVPIIAEVDLYKHDPWQLPRMALYGEKEWYFFSPRDRKYPNGSRPNRAAGAGYWKATGADKPVGTPKPVAIKKALVFYAGKAPKGDKTNWIMHEYRLADVDRTARKKNNSLRLDDWVLCRIYNKKGALEKPTGAGGRAEASSQGALGSMSMGSPPEQKPSVLPSATATAAAAAGTGYAPLPFSELAAYYEVRPSDSMPRAHGADSSCSGHALAATSSCGXGGWRAA

SEQ ID NO: 16397 - protein, 206 aa, Zea mays subsp. mays
  peptide (1)..(206): Ceres Seq. ID no. 12369481
  misc_feature (1)..(78): Pfam Name: No apical meristem (NAM) protein Pfam Description: No apical meristem (NAM) protein
  misc_feature (1)..(161): Homolog of NCBI NO: 22326685 NR Description: Expressed protein
  misc_feature (1)..(110): Homolog of NCBI NO: 21593134 NR Description: GRAB1-like protein [Arabidopsis thaliana]
  misc_feature (1)..(202): Homolog of NCBI NO: 25458551 NR Description: OsNAC5 protein [imported] - rice
  misc_feature (1)..(110): Homolog of NCBI NO: 15223963 NR Description: GRAB1-like protein
  misc_feature (1)..(193): Homolog of NCBI NO: 40647397 NR Description: NAC domain protein [Lycopersicon esculentum]
  misc_feature (1)..(193): Homolog of NCBI NO: 14485513 NR Description: putative NAC domain protein [Solanum tuberosum]
  misc_feature (1)..(198): Homolog of NCBI NO: 21105734 NR Description: nam-like protein 3 [Petunia x hybrida]
  misc_feature (1)..(137): Homolog of NCBI NO: 15223456 NR Description: NAC domain protein, putative
  misc_feature (1)..(198): Homolog of NCBI NO: 21105748 NR Description: nam-like protein 10 [Petunia x hybrida]
  misc_feature (1)..(198): Homolog of NCBI NO: 25458553 NR Description: OsNAC6 protein [imported] - rice
  misc_feature (200)..(200): Xaa is any aa, unknown or other
MALYGEKEWYFFSPRDRKYPNGSRPNRAAGAGYWKATGADKPVGTPKPVAIKKALVFYAGKAPKGDKTNWIMHEYRLADVDRTARKKNNSLRLDDWVLCRIYNKKGALEKPTGAGGRAEASSQGALGSMSMGSPPEQKPSVLPSATATAAAAAGTGYAPLPFSELAAYYEVRPSDSMPRAHGADSSCSGHALAATSSCGXGGWRAA

SEQ ID NO: 16398 - DNA, 1363 bp, Zea mays subsp. mays
  misc_feature (1)..(1363): Ceres Seq. ID no. 12406464
  misc_feature: MA Experiment ID: 108527 Result: Down-regulated in Transcription
  misc_feature: MA Experiment 108527 PARAMETER Experiment Name: Zm_5mM_NO_P Parameter: Age (day) Value: 8
  misc_feature: MA Experiment 108527 PARAMETER Experiment Name: Zm_5mM_NO_P Parameter: Organism Value: Zea mays
  misc_feature: MA Experiment 108527 PARAMETER Experiment Name: Zm_5mM_NO_P Parameter: Plant Line Value: 35A19
  misc_feature: MA Experiment 108527 PARAMETER Experiment Name: Zm_5mM_NO_P Parameter: Timepoint (hr) Value: 6
  misc_feature: MA Experiment 108527 PARAMETER Experiment Name: Zm_5mM_NO_P Parameter: Tissue Value: Aerial
  misc_feature: MA Experiment 108527 PARAMETER Experiment Name: Zm_5mM_NO_P Parameter: Treatment Value: 5mM NO vs. No Treatment
  misc_feature: MA Experiment ID: 108529 Result: Up-regulated in Transcription
  misc_feature: MA Experiment 108529 PARAMETER Experiment Name: Zm_Imbibed_Seeds_P Parameter: Age (day) Value: 5 vs. 2
  misc_feature: MA Experiment 108529 PARAMETER Experiment Name: Zm_Imbibed_Seeds_P Parameter: Organism Value: Zea mays
  misc_feature: MA Experiment 108529 PARAMETER Experiment Name: Zm_Imbibed_Seeds_P Parameter: Plant Line Value: 35A19
  misc_feature: MA Experiment 108529 PARAMETER Experiment Name: Zm_Imbibed_Seeds_P Parameter: Tissue Value: Roots vs. Embryo
  misc_feature: MA Experiment ID: 108535 Result: Down-regulated in Transcription
  misc_feature: MA Experiment 108535 PARAMETER Experiment Name: Zm_Meristem_P Parameter: Age (day) Value: 8
  misc_feature: MA Experiment 108535 PARAMETER Experiment Name: Zm_Meristem_P Parameter: Organism Value: Zea mays
  misc_feature: MA Experiment 108535 PARAMETER Experiment Name: Zm_Meristem_P Parameter: Plant Line Value: 35A19
  misc_feature: MA Experiment 108535 PARAMETER Experiment Name: Zm_Meristem_P Parameter: Tissue Value: Root Meristem vs. Above Root Meristem
  misc_feature: MA Experiment ID: 108543 Result: Up-regulated in Transcription
  misc_feature: MA Experiment ID: 108546 Result: Up-regulated in Transcription
  misc_feature: MA Experiment 108546 PARAMETER Experiment Name: Zm_Imbibed_Seeds_P Parameter: Age (day) Value: 3 vs. 2
  misc_feature: MA Experiment 108546 PARAMETER Experiment Name: Zm_Imbibed_Seeds_P Parameter: Organism Value: Zea mays
  misc_feature: MA Experiment 108546 PARAMETER Experiment Name: Zm_Imbibed_Seeds_P Parameter: Plant Line Value: 35A19
  misc_feature: MA Experiment 108546 PARAMETER Experiment Name: Zm_Imbibed_Seeds_P Parameter: Tissue Value: Roots vs. Embryo
  misc_feature: MA Experiment ID: 108556 Result: Down-regulated in Transcription
  misc_feature: MA Experiment 108556 PARAMETER Experiment Name: Zm_Drought_P Parameter: Age (day) Value: 9
  misc_feature: MA Experiment 108556 PARAMETER Experiment Name: Zm_Drought_P Parameter: Organism Value: Zea mays
  misc_feature: MA Experiment 108556 PARAMETER Experiment Name: Zm_Drought_P Parameter: Plant Line Value: 35A19
  misc_feature: MA Experiment 108556 PARAMETER Experiment Name: Zm_Drought_P Parameter: Timepoint (hr) Value: 24
  misc_feature: MA Experiment 108556 PARAMETER Experiment Name: Zm_Drought_P Parameter: Tissue Value: Aerial
  misc_feature: MA Experiment 108556 PARAMETER Experiment Name: Zm_Drought_P Parameter: Treatment Value: Drought vs. No Drought
  misc_feature: MA Experiment ID: 108597 Result: Down-regulated in Transcription
  misc_feature: MA Experiment 108597 PARAMETER Experiment Name: Zm_100uM_ABA_P Parameter: Age (day) Value: 9
  misc_feature: MA Experiment 108597 PARAMETER Experiment Name: Zm_100uM_ABA_P Parameter: Organism Value: Zea mays
  misc_feature: MA Experiment 108597 PARAMETER Experiment Name: Zm_100uM_ABA_P Parameter: Plant Line Value: 35A19
  misc_feature: MA Experiment 108597 PARAMETER Experiment Name: Zm_100uM_ABA_P Parameter: Timepoint (hr) Value: 24
  misc_feature: MA Experiment 108597 PARAMETER Experiment Name: Zm_100uM_ABA_P Parameter: Tissue Value: Aerial
  misc_feature: MA Experiment 108597 PARAMETER Experiment Name: Zm_100uM_ABA_P Parameter: Treatment Value: 100uM ABA vs. No Treatment
  misc_feature: MA Experiment ID: 20000477 Result: Down-regulated in Transcription
  misc_feature: MA Experiment 20000477 PARAMETER Experiment Name: Zm_5mM_SA_P Parameter: Age (day) Value: 10
  misc_feature: MA Experiment 20000477 PARAMETER Experiment Name: Zm_5mM_SA_P Parameter: Organism Value: Zea mays
  misc_feature: MA Experiment 20000477 PARAMETER Experiment Name: Zm_5mM_SA_P Parameter: Plant Line Value: 35A19
  misc_feature: MA Experiment 20000477 PARAMETER Experiment Name: Zm_5mM_SA_P Parameter: Timepoint (hr) Value: 48
  misc_feature: MA Experiment 20000477 PARAMETER Experiment Name: Zm_5mM_SA_P Parameter: Tissue Value: Aerial
  misc_feature: MA Experiment 20000477 PARAMETER Experiment Name: Zm_5mM_SA_P Parameter: Treatment Value: 5mM SA vs. No Treatment
  misc_feature: MA Experiment ID: 20000478 Result: Down-regulated in Transcription
  misc_feature: MA Experiment 20000478 PARAMETER Experiment Name: Zm_5mM_SA_P Parameter: Age (day) Value: 11
  misc_feature: MA Experiment 20000478 PARAMETER Experiment Name: Zm_5mM_SA_P Parameter: Organism Value: Zea mays
  misc_feature: MA Experiment 20000478 PARAMETER Experiment Name: Zm_5mM_SA_P Parameter: Plant Line Value: 35A19
  misc_feature: MA Experiment 20000478 PARAMETER Experiment Name: Zm_5mM_SA_P Parameter: Timepoint (hr) Value: 72
  misc_feature: MA Experiment 20000478 PARAMETER Experiment Name: Zm_5mM_SA_P Parameter: Tissue Value: Aerial
  misc_feature: MA Experiment 20000478 PARAMETER Experiment Name: Zm_5mM_SA_P Parameter: Treatment Value: 5mM SA vs. No Treatment
  misc_feature: MA Experiment ID: 20000480 Result: Down-regulated in Transcription
  misc_feature: MA Experiment 20000480 PARAMETER Experiment Name: Zm_Drought_P Parameter: Age (day) Value: 11
  misc_feature: MA Experiment 20000480 PARAMETER Experiment Name: Zm_Drought_P Parameter: Organism Value: Zea mays
  misc_feature: MA Experiment 20000480 PARAMETER Experiment Name: Zm_Drought_P Parameter: Plant Line Value: 35A19
  misc_feature: MA Experiment 20000480 PARAMETER Experiment Name: Zm_Drought_P Parameter: Timepoint (hr) Value: 72
  misc_feature: MA Experiment 20000480 PARAMETER Experiment Name: Zm_Drought_P Parameter: Tissue Value: Aerial
  misc_feature: MA Experiment 20000480 PARAMETER Experiment Name: Zm_Drought_P Parameter: Treatment Value: Drought vs. No Drought
  misc_feature: MA Experiment ID: 20000492 Result: Down-regulated in Transcription
  misc_feature: MA Experiment 20000492 PARAMETER Experiment Name: Zm_Hybrid_Seed_Dev_P Parameter: DAP Value: 12
  misc_feature: MA Experiment 20000492 PARAMETER Experiment Name: Zm_Hybrid_Seed_Dev_P Parameter: Organism Value: Zea mays
  misc_feature: MA Experiment 20000492 PARAMETER Experiment Name: Zm_Hybrid_Seed_Dev_P Parameter: Plant Line Value: 35A19
  misc_feature: MA Experiment 20000492 PARAMETER Experiment Name: Zm_Hybrid_Seed_Dev_P Parameter: Tissue Value: Fert Kernel vs. Unfert Floret
  misc_feature: MA Experiment ID: 20000535 Result: Down-regulated in Transcription
  misc_feature: MA Experiment 20000535 PARAMETER Experiment Name: Zm_Hybrid_Seed_Dev_P Parameter: DAP Value: 30 vs. 12
  misc_feature: MA Experiment 20000535 PARAMETER Experiment Name: Zm_Hybrid_Seed_Dev_P Parameter: Organism Value: Zea mays
  misc_feature: MA Experiment 20000535 PARAMETER Experiment Name: Zm_Hybrid_Seed_Dev_P Parameter: Plant Line Value: 35A19
  misc_feature: MA Experiment 20000535 PARAMETER Experiment Name: Zm_Hybrid_Seed_Dev_P Parameter: Tissue Value: Embryo vs. Unfert Floret
atccaagctcacggagtcgcagtgccaccgaggcttccaagcaagaaccacccccgcctgcctgcggagctcggccgtcccctgcgctgcggagcgggagcgggagcggcggcgacaatgtcctccaacggcaagcccaccccacagcccgcggcggccagcgccggcgccggcgccggcgggccgccgaagatgtaccagcgacccatctaccggccgcagcaggcgccggcgaagcggcggcgcggggggcggtcgtgcccgttcagctgctgctgctgcttctgctggacgctcctcgtcgtcgtcctcctcgccgtcctggccgccgtggccgggggcgccttctacctgctgtaccggccgcaccggccggccttcacgctgaccgcggcgcgcgtgacgaggctgagcctgtcgtcgtccgccaccgcgcccgcgctgagcgacgccatcgacgtgacgctgaccgccaggaaccccaacaagaagctggtgtacgtctacgacgacttcgccgtgacggccgccacggccgccaacgccgtgccgctgggcgcggccaccgcgcccgggttcgcgcacgacgccggcaacgtcaccgtcatccgggccaccgtctccgcgtccgcgctcgcggtcgaccccgccgcggccggctccgacgtcaagaggtccggcgagttccccatcgtcctggacctggagaccagggccggcgtccgggttggcgcgctcaggaccaaagaagatcggcatcctggtgcactgcgacggcgtcaaggtggccgcgcccgcgcccgcgccggccaagaagacgaagaagctggcgaaggccgcggccgacaccccagcccccgccgccgcggccgttgaagacgcgccggcgccgcccgccgcgtcggccacggccaccgtcgctcgcgcgtgccaggtcagggtccgcgtcaagatctggaagtggaccttctanccacgtcgtcgtcgccagcctccgaggggccgcattgcaaaatttttcgggtgaaagggaaaaaggttgctttgctttgctttgctttgcaacaccgggtgaagtttctccagtcagtccagtaggagggaaagcaagggaaacagaattcgaatcaaatgccggccgctgtaaatttttttccgtgtttaattgaattttaccaaattcggcggggagggaaggagaaggagaggtcggaggagcggcaaggcaggaagtgacgtgccgtgtgcattctgttctgcagtgtgaggcttgaacgatttgatttctctctctctctctttctctttatcgctttgtgtagtgccatttttttaaattttttcacgcatcttcttgttggtg

SEQ ID NO: 16399 - protein, 388 aa, Zea mays subsp. mays
  peptide (1)..(388): Ceres Seq. ID no. 12406465
  misc_feature (105)..(280): Pfam Name: HlyD family secretion protein Pfam Description: HlyD family secretion protein
  misc_feature (1)..(318): Homolog of NCBI NO: 5821151 NR Description: RNA binding protein [Homo sapiens]
  misc_feature (16)..(319): Homolog of NCBI NO: 29247944 NR Description: GLP_26_54603_52153 [Giardia lamblia ATCC 50803]
  misc_feature (42)..(388): Homolog of NCBI NO: 25989119 NR Description: unknown [Streptomyces aureofaciens]
  misc_feature (37)..(335): Homolog of NCBI NO: 25989119 NR Description: unknown [Streptomyces aureofaciens]
  misc_feature (4)..(317): Homolog of NCBI NO: 7949115 NR Description: Ser/Arg-related nuclear matrix protein
  misc_feature (99)..(321): Homolog of NCBI NO: 11362193 NR Description: hypothetical protein
  misc_feature (1)..(318): Homolog of NCBI NO: 6634015 NR Description: KIAA0324 protein [Homo sapiens]
  misc_feature (129)..(323): Homolog of NCBI NO: 5032119 NR Description: Ser/Arg-related nuclear matrix protein (plenty of
  misc_feature (263)..(308): Homolog of NCBI NO: 14253159 NR Description: VMP3 protein [Volvox carteri f. nagariensis]
  misc_feature (11)..(346): Homolog of NCBI NO: 23106243 NR Description: hypothetical protein [Azotobacter vinelandii]
  misc_feature (324)..(324): Xaa is any aa, unknown or other
PSSRSRSATEASKQEPPPPACGARPSPALRSGSGSGGDNVLQRQAHPTARGGQRRRRRRRAAEDVPATHLPAAAGAGEAAARGAVVPVQLLLLLLLDAPRRRPPRRPGRRGRGRLLPAVPAAPAGLHADRGARDEAEPVVVRHRARAERRHRRDADRQEPQQEAGVRLRRLRRDGRHGRQRRAAGRGHRARVRARRRQRHRHPGHRLRVRARGRPRRGRLRRQEVRRVPHRPGPGDQGRRPGWRAQDQRRSASWCTATASRWPRPRPRRPRRRRSWRRPRPTPQPPPPRPLKTRRRRPPRRPRPPSLARARSGSASRSGSGPSXHVVVASLRGAALQNFSGEREKGCFALLCFATPGEVSPVSPVGGKARETEFESNAGRCKFFSVFN

SEQ ID NO: 16400 - protein, 291 aa, Zea mays subsp. mays
  peptide (1)..(291): Ceres Seq. ID no. 12406466
  misc_feature (41)..(252): Homolog of NCBI NO: 6686408 NR Description: F1E22.7 [Arabidopsis thaliana]
  misc_feature (27)..(247): Homolog of NCBI NO: 38344198 NR Description: OSJNBa0064G10.14 [Oryza sativa (japonica
  misc_feature (41)..(252): Homolog of NCBI NO: 18408342 NR Description: expressed protein
  misc_feature (39)..(248): Homolog of NCBI NO: 15242167 NR Description: putative protein; protein id: At5g21130.1
  misc_feature (50)..(248): Homolog of NCBI NO: 18394509 NR Description: expressed protein
  misc_feature (50)..(248): Homolog of NCBI NO: 11762174 NR Description: At1g17620 [Arabidopsis thaliana]
  misc_feature (46)..(249): Homolog of NCBI NO: 21536796 NR Description: unknown [Arabidopsis thaliana]
  misc_feature (46)..(249): Homolog of NCBI NO: 15239804 NR Description: putative protein
  misc_feature (14)..(249): Homolog of NCBI NO: 34914304 NR Description: B1151A10.19 [Oryza sativa (japonica
  misc_feature (38)..(250): Homolog of NCBI NO: 34903552 NR Description: P0001B06.28 [Oryza sativa (japonica
IQAHGVAVPPRLPSKNHPRLPAELGRPLRCGAGAGAAATMSSNGKPTPQPAAASAGAGAGGPPKMYQRPIYRPQQAPAKRRRGGRSCPFSCCCCFCWTLLVVVLLAVLAAVAGGAFYLLYRPHRPAFTLTAARVTRLSLSSSATAPALSDAIDVTLTARNPNKKLVYVYDDFAVTAATAANAVPLGAATAPGFAHDAGNVTVIRATVSASALAVDPAAAGSDVKRSGEFPIVLDLETRAGVRVGALRTKEDRHPGALRRRQGGRARARAGQEDEEAGEGRGRHPSPRRRGR

SEQ ID NO: 16401 - protein, 252 aa, Zea mays subsp. mays
  peptide (1)..(252): Ceres Seq. ID no. 12406467
  misc_feature (2)..(213): Homolog of NCBI NO: 6686408 NR Description: F1E22.7 [Arabidopsis thaliana]
  misc_feature (1)..(208): Homolog of NCBI NO: 38344198 NR Description: OSJNBa0064G10.14 [Oryza sativa (japonica
  misc_feature (2)..(213): Homolog of NCBI NO: 18408342 NR Description: expressed protein
  misc_feature (1)..(209): Homolog of NCBI NO: 15242167 NR Description: putative protein; protein id: At5g21130.1
  misc_feature (11)..(209): Homolog of NCBI NO: 18394509 NR Description: expressed protein
  misc_feature (11)..(209): Homolog of NCBI NO: 11762174 NR Description: At1g17620 [Arabidopsis thaliana]
  misc_feature (7)..(210): Homolog of NCBI NO: 21536796 NR Description: unknown [Arabidopsis thaliana]
  misc_feature (7)..(210): Homolog of NCBI NO: 15239804 NR Description: putative protein
  misc_feature (1)..(210): Homolog of NCBI NO: 34914304 NR Description: B1151A10.19 [Oryza sativa (japonica
  misc_feature (1)..(211): Homolog of NCBI NO: 34903552 NR Description: P0001B06.28 [Oryza sativa (japonica
MSSNGKPTPQPAAASAGAGAGGPPKMYQRPIYRPQQAPAKRRRGGRSCPFSCCCCFCWTLLVVVLLAVLAAVAGGAFYLLYRPHRPAFTLTAARVTRLSLSSSATAPALSDAIDVTLTARNPNKKLVYVYDDFAVTAATAANAVPLGAATAPGFAHDAGNVTVIRATVSASALAVDPAAAGSDVKRSGEFPIVLDLETRAGVRVGALRTKEDRHPGALRRRQGGRARARAGQEDEEAGEGRGRHPSPRRRGR

SEQ ID NO: 16402 - DNA, 1566 bp, Zea mays subsp. mays
  misc_feature (1)..(1566): Ceres Seq. ID no. 12359525
  misc_feature: MA Experiment ID: 20000478 Result: Down-regulated in Transcription
  misc_feature: MA Experiment 20000478 PARAMETER Experiment Name: Zm_5mM_SA_P Parameter: Age (day) Value: 11
  misc_feature: MA Experiment 20000478 PARAMETER Experiment Name: Zm_5mM_SA_P Parameter: Organism Value: Zea mays
  misc_feature: MA Experiment 20000478 PARAMETER Experiment Name: Zm_5mM_SA_P Parameter: Plant Line Value: 35A19
  misc_feature: MA Experiment 20000478 PARAMETER Experiment Name: Zm_5mM_SA_P Parameter: Timepoint (hr) Value: 72
  misc_feature: MA Experiment 20000478 PARAMETER Experiment Name: Zm_5mM_SA_P Parameter: Tissue Value: Aerial
  misc_feature: MA Experiment 20000478 PARAMETER Experiment Name: Zm_5mM_SA_P Parameter: Treatment Value: 5mM SA vs. No Treatment
ctctccctcgttgtccatggccctcgagtcatggctcaccaaggtccgctcggccatgtcctctgcctctggaggttcgggggcgccatcgaggccccggaagcagagcaccgtcggcatcctcgccttcgaggtcgccagcctcatgtccaagcttctccagctgtggcgagccgtgggtgacgctgccgtcgcacgcctccgccacgagaccatgaacctccacggcgtccgcaagatggtctccgacgacgacgacttccttgtcggcctcgcccgcgccgagctcgtggacacgctcagggccgcatccgactccgtggccgcgctcgccgcgcggtgcgcggaccccagcctccgcgacttcagggacgccttcctggagctggccgacaccggccgcgaccggcaccgctggacggcgcccagctggaaggagatggacgcgagggcgagcaggatggggaagcaggtggccaccaccgccgcgctccggagggccatggaggagctggccgaggccgagcacggcctccggaagcttgtcgtcctccagtgcgccgccagcagcctttcggcgagcaagatctcggcggcgtcggagcagcagcaggtggtcttctccaagaggcaggaggtgaagcacctgaagcagacgtccctctggggctccaccttcgacgctgccgtcgcgtcgctggcacgggcggcgttcaccaccctcgcgcgcatcaaggccgtcttcggcgccggccgggagcagcgccacccgccgctgtaccgcagcctgacactctcctcggcggtgcacccgtcaggcgacgcgcggtccccgccatcgcgcaagtccatgtcaatggaggaggtgctgctgttcgacgtggacgaccagccgtcgttcgctccgaaacggcaggtgcggggcggcgggttcctggaggacagctcggcggcactgacgcccccggcggggacgctgggcgcggcggcgctggcgccgcgctacgccgggctggtgatctcgatcgagcggatggcgcggtcgccgctgctggtgggccccgaggagcgggacgagctgtacgggatgctgacggcgagcgtgcgcgcgcagctccgggcgcggctgcgcggcgcggtgcccgcggcggacccggggctcgcagggcagtggtgcgcggcgctcgctgggatcctggagtggctggcgccgatggcgcacgcgacggtgcggtggcaggcggagcgcagcctggagcagcggggcgggagcggcaacggcagcgtgctgctgctgcagacactgcagttcgcggagcgcgacaaggtggacgcggcggtggtggagctcctggtggggctcaactacgtgtggcggttcgagaaggagatgagctgccgcgctatgctcgcctcgcccgcccgcccgcccgtccgatgacgatgcatccatggattatggatggtggtggtgatacgaatgatgcaagcacatctgcatctgcatctgtttgttgctcattctggatggatctgttgacgacgaataaatctctactacttatt

SEQ ID NO: 16403 - protein, 479 aa, Zea mays subsp. mays
  peptide (1)..(479): Ceres Seq. ID no. 12359526
  misc_feature (325)..(411): Pfam Name: Protein of unknown function (DUF668) Pfam Description: Protein of unknown function (DUF668)
  misc_feature (86)..(249): Homolog of NCBI NO: 12003396 NR Description: Avr9/Cf-9 rapidly elicited protein 137 [Nicotiana
  misc_feature (33)..(381): Homolog of NCBI NO: 15238198 NR Description: putative protein
  misc_feature (10)..(463): Homolog of NCBI NO: 34902086 NR Description: SR-rich pre-mRNA splicing activator
  misc_feature (203)..(469): Homolog of NCBI NO: 27754455 NR Description: unknown protein [Arabidopsis thaliana]
  misc_feature (304)..(472): Homolog of NCBI NO: 15228977 NR Description: hypothetical protein; protein id: At3g23160.1
  misc_feature (20)..(287): Homolog of NCBI NO: 15228977 NR Description: hypothetical protein; protein id: At3g23160.1
  misc_feature (304)..(472): Homolog of NCBI NO: 7939524 NR Description: contains similarity to unknown
  misc_feature (6)..(287): Homolog of NCBI NO: 7939524 NR Description: contains similarity to unknown
  misc_feature (6)..(469): Homolog of NCBI NO: 15242144 NR Description: putative protein; protein id: At5g51670.1
  misc_feature (6)..(467): Homolog of NCBI NO: 30102981 NR Description: hypothetical protein [Oryza sativa (japonica
SPSLSMALESWLTKVRSAMSSASGGSGAPSRPRKQSTVGILAFEVASLMSKLLQLWRAVGDAAVARLRHETMNLHGVRKMVSDDDDFLVGLARAELVDTLRAASDSVAALAARCADPSLRDFRDAFLELADTGRDRHRWTAPSWKEMDARASRMGKQVATTAALRRAMEELAEAEHGLRKLVVLQCAASSLSASKISAASEQQQVVFSKRQEVKHLKQTSLWGSTFDAAVASLARAAFTTLARIKAVFGAGREQRHPPLYRSLTLSSAVHPSGDARSPPSRKSMSMEEVLLFDVDDQPSFAPKRQVRGGGFLEDSSAALTPPAGTLGAAALAPRYAGLVISIERMARSPLLVGPEERDELYGMLTASVRAQLRARLRGAVPAADPGLAGQWCAALAGILEWLAPMAHATVRWQAERSLEQRGGSGNGSVLLLQTLQFAERDKVDAAVVELLVGLNYVWRFEKEMSCRAMLASPARPPVR

SEQ ID NO: 16404 - protein, 474 aa, Zea mays subsp. mays
  peptide (1)..(474): Ceres Seq. ID no. 12359527
  misc_feature (320)..(406): Pfam Name: Protein of unknown function (DUF668) Pfam Description: Protein of unknown function (DUF668)
  misc_feature (81)..(244): Homolog of NCBI NO: 12003396 NR Description: Avr9/Cf-9 rapidly elicited protein 137 [Nicotiana
  misc_feature (28)..(376): Homolog of NCBI NO: 15238198 NR Description: putative protein
  misc_feature (5)..(458): Homolog of NCBI NO: 34902086 NR Description: SR-rich pre-mRNA splicing activator
  misc_feature (198)..(464): Homolog of NCBI NO: 27754455 NR Description: unknown protein [Arabidopsis thaliana]
  misc_feature (299)..(467): Homolog of NCBI NO: 15228977 NR Description: hypothetical protein; protein id: At3g23160.1
  misc_feature (15)..(282): Homolog of NCBI NO: 15228977 NR Description: hypothetical protein; protein id: At3g23160.1
  misc_feature (299)..(467): Homolog of NCBI NO: 7939524 NR Description: contains similarity to unknown
  misc_feature (1)..(282): Homolog of NCBI NO: 7939524 NR Description: contains similarity to unknown
  misc_feature (1)..(464): Homolog of NCBI NO: 15242144 NR Description: putative protein; protein id: At5g51670.1
  misc_feature (1)..(462): Homolog of NCBI NO: 30102981 NR Description: hypothetical protein [Oryza sativa (japonica
MALESWLTKVRSAMSSASGGSGAPSRPRKQSTVGILAFEVASLMSKLLQLWRAVGDAAVARLRHETMNLHGVRKMVSDDDDFLVGLARAELVDTLRAASDSVAALAARCADPSLRDFRDAFLELADTGRDRHRWTAPSWKEMDARASRMGKQVATTAALRRAMEELAEAEHGLRKLVVLQCAASSLSASKISAASEQQQVVFSKRQEVKHLKQTSLWGSTFDAAVASLARAAFTTLARIKAVFGAGREQRHPPLYRSLTLSSAVHPSGDARSPPSRKSMSMEEVLLFDVDDQPSFAPKRQVRGGGFLEDSSAALTPPAGTLGAAALAPRYAGLVISIERMARSPLLVGPEERDELYGMLTASVRAQLRARLRGAVPAADPGLAGQWCAALAGILEWLAPMAHATVRWQAERSLEQRGGSGNGSVLLLQTLQFAERDKVDAAVVELLVGLNYVWRFEKEMSCRAMLASPARPPVR

SEQ ID NO: 16405 - protein, 461 aa, Zea mays subsp. mays
  peptide (1)..(461): Ceres Seq. ID no. 12359528
  misc_feature (307)..(393): Pfam Name: Protein of unknown function (DUF668) Pfam Description: Protein of unknown function (DUF668)
  misc_feature (68)..(231): Homolog of NCBI NO: 12003396 NR Description: Avr9/Cf-9 rapidly elicited protein 137 [Nicotiana
  misc_feature (15)..(363): Homolog of NCBI NO: 15238198 NR Description: putative protein
  misc_feature (1)..(445): Homolog of NCBI NO: 34902086 NR Description: SR-rich pre-mRNA splicing activator
  misc_feature (185)..(451): Homolog of NCBI NO: 27754455 NR Description: unknown protein [Arabidopsis thaliana]
  misc_feature (286)..(454): Homolog of NCBI NO: 15228977 NR Description: hypothetical protein; protein id: At3g23160.1
  misc_feature (2)..(269): Homolog of NCBI NO: 15228977 NR Description: hypothetical protein; protein id: At3g23160.1
  misc_feature (286)..(454): Homolog of NCBI NO: 7939524 NR Description: contains similarity to unknown
  misc_feature (1)..(269): Homolog of NCBI NO: 7939524 NR Description: contains similarity to unknown
  misc_feature (1)..(451): Homolog of NCBI NO: 15242144 NR Description: putative protein; protein id: At5g51670.1
  misc_feature (1)..(449): Homolog of NCBI NO: 30102981 NR Description: hypothetical protein [Oryza sativa (japonica
MSSASGGSGAPSRPRKQSTVGILAFEVASLMSKLLQLWRAVGDAAVARLRHETMNLHGVRKMVSDDDDFLVGLARAELVDTLRAASDSVAALAARCADPSLRDFRDAFLELADTGRDRHRWTAPSWKEMDARASRMGKQVATTAALRRAMEELAEAEHGLRKLVVLQCAASSLSASKISAASEQQQVVFSKRQEVKHLKQTSLWGSTFDAAVASLARAAFTTLARIKAVFGAGREQRHPPLYRSLTLSSAVHPSGDARSPPSRKSMSMEEVLLFDVDDQPSFAPKRQVRGGGFLEDSSAALTPPAGTLGAAALAPRYAGLVISIERMARSPLLVGPEERDELYGMLTASVRAQLRARLRGAVPAADPGLAGQWCAALAGILEWLAPMAHATVRWQAERSLEQRGGSGNGSVLLLQTLQFAERDKVDAAVVELLVGLNYVWRFEKEMSCRAMLASPARPPVR

SEQ ID NO: 16406 - DNA, 911 bp, Zea mays subsp. mays
  misc_feature (1)..(911): Ceres Seq. ID no. 12367785
  misc_feature: MA Experiment ID: 108528 Result: Up-regulated in Transcription
  misc_feature: MA Experiment 108528 PARAMETER Experiment Name: Zm_Imbibed_Seeds_P Parameter: Age (day) Value: 5 vs. 2
  misc_feature: MA Experiment 108528 PARAMETER Experiment Name: Zm_Imbibed_Seeds_P Parameter: Organism Value: Zea mays
  misc_feature: MA Experiment 108528 PARAMETER Experiment Name: Zm_Imbibed_Seeds_P Parameter: Plant Line Value: 35A19
  misc_feature: MA Experiment 108528 PARAMETER Experiment Name: Zm_Imbibed_Seeds_P Parameter: Tissue Value: Aerial vs. Embryo
  misc_feature: MA Experiment ID: 108530 Result: Up-regulated in Transcription
  misc_feature: MA Experiment 108530 PARAMETER Experiment Name: Zm_Imbibed_Seeds_P Parameter: Age (day) Value: 6 vs. 2
  misc_feature: MA Experiment 108530 PARAMETER Experiment Name: Zm_Imbibed_Seeds_P Parameter: Organism Value: Zea mays
  misc_feature: MA Experiment 108530 PARAMETER Experiment Name: Zm_Imbibed_Seeds_P Parameter: Plant Line Value: 35A19
  misc_feature: MA Experiment 108530 PARAMETER Experiment Name: Zm_Imbibed_Seeds_P Parameter: Tissue Value: Aerial vs. Embryo
  misc_feature: MA Experiment ID: 108547 Result: Up-regulated in Transcription
  misc_feature: MA Experiment 108547 PARAMETER Experiment Name: Zm_Imbibed_Seeds_P Parameter: Age (day) Value: 4 vs. 2
  misc_feature: MA Experiment 108547 PARAMETER Experiment Name: Zm_Imbibed_Seeds_P Parameter: Organism Value: Zea mays
  misc_feature: MA Experiment 108547 PARAMETER Experiment Name: Zm_Imbibed_Seeds_P Parameter: Plant Line Value: 35A19
  misc_feature: MA Experiment 108547 PARAMETER Experiment Name: Zm_Imbibed_Seeds_P Parameter: Tissue Value: Aerial vs. Embryo
  misc_feature: MA Experiment ID: 108688 Result: Down-regulated in Transcription
  misc_feature: MA Experiment 108688 PARAMETER Experiment Name: Zm_Embryos-Flowers__P Parameter: Tissue Value: Immature Flowers vs. Aerial+
accaccacccaatcactcccgtctcgctctgcaccactcaaacctcttcttcctttccggaaaccacaccagcagtccccgcaggctgcagcttccccggccgccgcgcccaagccccagctgcctcgatcgctcgagagccacaaccaccactccaccagcagggcaaagctggaggatggccgcagtcgcagcgatgaaggctctcgcggtcgccgcctcgccggtgtcggcacggcagccccgtcggtacgtcgcaggtggcgctagccggcggctgcagtcgccgttccacggcgtgtcggtgcagtgccctgggcgaccgcggcgggcgacgccccggcgggggcggcaggtggcggtggtggcggcggcggtccggccggcgatccagttcatccagggcacggacgagcagacgatcccggacgtgcggctgaccaagtcccgggacggcacgaacggcgtggccatcttcacgttcgagcagccgtcggtgttcgactcgtcggcggagctcggggacatcacgggcttctacatgatcgacgacgagggcgtgctgcagtccgtggacgtgagcgccaagttcgtcaacggcaagccggcgcggatcgaggccaagtacgtcatgcgcacgccccgggactgggaccgcttcatgcgcttcatggagcggtactctcaggccaacggcctccagttcgtcaagaactgacgagccggctttgagatcgattgcctgcctgctgcgctacgttctgcttgcttgctagtgttctttttttttttctttcctttctcccctgtgctgcgcccctggtgttgtgattgtgacctgctgtgtgcttgtgagtgatttttttttttgtagagaaaagaaagaaatatgggagatttgttttgctctg

SEQ ID NO: 16407 - protein, 238 aa, Zea mays subsp. mays
  peptide (1)..(238): Ceres Seq. ID no. 12367786
  misc_feature (125)..(237): Pfam Name: Photosystem II reaction centre W protein, PsbW Pfam Description: Photosystem II reaction centre W protein, PsbW
  misc_feature (129)..(238): Homolog of NCBI NO: 30468121 NR Description: photosystem II protein W [Cyanidioschyzon
  misc_feature (130)..(238): Homolog of NCBI NO: 22298036 NR Description: photosystem II reaction center W protein
  misc_feature (130)..(237): Homolog of NCBI NO: 11467376 NR Description: photosystem II protein W [Cyanophora paradoxa]
  misc_feature (130)..(237): Homolog of NCBI NO: 11467617 NR Description: photosystem II protein W [Guillardia theta]
  misc_feature (130)..(237): Homolog of NCBI NO: 11465813 NR Description: photosystem II protein W [Porphyra purpurea]
  misc_feature (130)..(237): Homolog of NCBI NO: 11467474 NR Description: photosystem II protein W [Odontella sinensis]
  misc_feature (141)..(237): Homolog of NCBI NO: 19880501 NR Description: saline responsive OSSRII protein [Oryza sativa]
  misc_feature (95)..(237): Homolog of NCBI NO: 18417239 NR Description: photosystem II protein W - like
  misc_feature (95)..(237): Homolog of NCBI NO: 7488014 NR Description: photosystem II protein W homolog T5F17.110 -
  misc_feature (121)..(237): Homolog of NCBI NO: 34907246 NR Description: photosystem II protein W-like protein
PPPNHSRLALHHSNLFFLSGNHTSSPRRLQLPRPPRPSPSCLDRSRATTTTPPAGQSWRMAAVAAMKALAVAASPVSARQPRRYVAGGASRRLQSPFHGVSVQCPGRPRRATPRRGRQVAVVAAAVRPAIQFIQGTDEQTIPDVRLTKSRDGTNGVAIFTFEQPSVFDSSAELGDITGFYMIDDEGVLQSVDVSAKFVNGKPARIEAKYVMRTPRDWDRFMRFMERYSQANGLQFVKN

SEQ ID NO: 16408 - protein, 179 aa, Zea mays subsp. mays
  peptide (1)..(179): Ceres Seq. ID no. 12367787
  misc_feature (66)..(178): Pfam Name: Photosystem II reaction centre W protein, PsbW Pfam Description: Photosystem II reaction centre W protein, PsbW
  misc_feature (70)..(179): Homolog of NCBI NO: 30468121 NR Description: photosystem II protein W [Cyanidioschyzon
  misc_feature (71)..(179): Homolog of NCBI NO: 22298036 NR Description: photosystem II reaction center W protein
  misc_feature (71)..(178): Homolog of NCBI NO: 11467376 NR Description: photosystem II protein W [Cyanophora paradoxa]
  misc_feature (71)..(178): Homolog of NCBI NO: 11467617 NR Description: photosystem II protein W [Guillardia theta]
  misc_feature (71)..(178): Homolog of NCBI NO: 11465813 NR Description: photosystem II protein W [Porphyra purpurea]
  misc_feature (71)..(178): Homolog of NCBI NO: 11467474 NR Description: photosystem II protein W [Odontella sinensis]
  misc_feature (82)..(178): Homolog of NCBI NO: 19880501 NR Description: saline responsive OSSRII protein [Oryza sativa]
  misc_feature (36)..(178): Homolog of NCBI NO: 18417239 NR Description: photosystem II protein W - like
  misc_feature (36)..(178): Homolog of NCBI NO: 7488014 NR Description: photosystem II protein W homolog T5F17.110 -
  misc_feature (62)..(178): Homolog of NCBI NO: 34907246 NR Description: photosystem II protein W-like protein
MAAVAAMKALAVAASPVSARQPRRYVAGGASRRLQSPFHGVSVQCPGRPRRATPRRGRQVAVVAAAVRPAIQFIQGTDEQTIPDVRLTKSRDGTNGVAIFTFEQPSVFDSSAELGDITGFYMIDDEGVLQSVDVSAKFVNGKPARIEAKYVMRTPRDWDRFMRFMERYSQANGLQFVKN

SEQ ID NO: 16409 - protein, 173 aa, Zea mays subsp. mays
  peptide (1)..(173): Ceres Seq. ID no. 12367788
  misc_feature (60)..(172): Pfam Name: Photosystem II reaction centre W protein, PsbW Pfam Description: Photosystem II reaction centre W protein, PsbW
  misc_feature (76)..(172): Homolog of NCBI NO: 19880501 NR Description: saline responsive OSSRII protein [Oryza sativa]
  misc_feature (30)..(172): Homolog of NCBI NO: 18417239 NR Description: photosystem II protein W - like
  misc_feature (64)..(173): Homolog of NCBI NO: 30468121 NR Description: photosystem II protein W [Cyanidioschyzon
  misc_feature (65)..(172): Homolog of NCBI NO: 11467376 NR Description: photosystem II protein W [Cyanophora paradoxa]
  misc_feature (65)..(172): Homolog of NCBI NO: 11465813 NR Description: photosystem II protein W [Porphyra purpurea]
  misc_feature (65)..(172): Homolog of NCBI NO: 11467474 NR Description: photosystem II protein W [Odontella sinensis]
  misc_feature (65)..(172): Homolog of NCBI NO: 11467617 NR Description: photosystem II protein W [Guillardia theta]
  misc_feature (65)..(173): Homolog of NCBI NO: 22298036 NR Description: photosystem II reaction center W protein
  misc_feature (30)..(172): Homolog of NCBI NO: 7488014 NR Description: photosystem II protein W homolog T5F17.110 -
  misc_feature (56)..(172): Homolog of NCBI NO: 34907246 NR Description: photosystem II protein W-like protein
MKALAVAASPVSARQPRRYVAGGASRRLQSPFHGVSVQCPGRPRRATPRRGRQVAVVAAAVRPAIQFIQGTDEQTIPDVRLTKSRDGTNGVAIFTFEQPSVFDSSAELGDITGFYMIDDEGVLQSVDVSAKFVNGKPARIEAKYVMRTPRDWDRFMRFMERYSQANGLQFVKN

SEQ ID NO: 16410 - DNA, 1562 bp, Zea mays subsp. mays
  misc_feature (1)..(1562): Ceres Seq. ID no. 12357066
  misc_feature: MA Experiment ID: 108528 Result: Up-regulated in Transcription
  misc_feature: MA Experiment 108528 PARAMETER Experiment Name: Zm_Imbibed_Seeds_P Parameter: Age (day) Value: 5 vs. 2
  misc_feature: MA Experiment 108528 PARAMETER Experiment Name: Zm_Imbibed_Seeds_P Parameter: Organism Value: Zea mays
  misc_feature: MA Experiment 108528 PARAMETER Experiment Name: Zm_Imbibed_Seeds_P Parameter: Plant Line Value: 35A19
  misc_feature: MA Experiment 108528 PARAMETER Experiment Name: Zm_Imbibed_Seeds_P Parameter: Tissue Value: Aerial vs. Embryo
  misc_feature: MA Experiment ID: 108547 Result: Up-regulated in Transcription
  misc_feature: MA Experiment 108547 PARAMETER Experiment Name: Zm_Imbibed_Seeds_P Parameter: Age (day) Value: 4 vs. 2
  misc_feature: MA Experiment 108547 PARAMETER Experiment Name: Zm_Imbibed_Seeds_P Parameter: Organism Value: Zea mays
  misc_feature: MA Experiment 108547 PARAMETER Experiment Name: Zm_Imbibed_Seeds_P Parameter: Plant Line Value: 35A19
  misc_feature: MA Experiment 108547 PARAMETER Experiment Name: Zm_Imbibed_Seeds_P Parameter: Tissue Value: Aerial vs. Embryo
  misc_feature: MA Experiment ID: 20000487 Result: Up-regulated in Transcription
  misc_feature: MA Experiment 20000487 PARAMETER Experiment Name: Zm_50mM_NH4NO3_L_to_H_P Parameter: Organism Value: Zea mays
  misc_feature: MA Experiment 20000487 PARAMETER Experiment Name: Zm_50mM_NH4NO3_L_to_H_P Parameter: Timepoint (hr) Value: 4
  misc_feature: MA Experiment 20000487 PARAMETER Experiment Name: Zm_50mM_NH4NO3_L_to_H_P Parameter: Tissue Value: Leaves
  misc_feature: MA Experiment 20000487 PARAMETER Experiment Name: Zm_50mM_NH4NO3_L_to_H_P Parameter: Treatment Value: 50mM NH4NO3 vs. 100mM Mannitol
  misc_feature: MA Experiment ID: 20000535 Result: Up-regulated in Transcription
  misc_feature: MA Experiment 20000535 PARAMETER Experiment Name: Zm_Hybrid_Seed_Dev_P Parameter: DAP Value: 30 vs. 12
  misc_feature: MA Experiment 20000535 PARAMETER Experiment Name: Zm_Hybrid_Seed_Dev_P Parameter: Organism Value: Zea mays
  misc_feature: MA Experiment 20000535 PARAMETER Experiment Name: Zm_Hybrid_Seed_Dev_P Parameter: Plant Line Value: 35A19
  misc_feature: MA Experiment 20000535 PARAMETER Experiment Name: Zm_Hybrid_Seed_Dev_P Parameter: Tissue Value: Embryo vs. Unfert Floret
acggcccaaccccatccactcctttcctcccacccgccagccgtcacccgcgcgtgcagccagcttccctgctacccccgcgcgccgccagccgagcggacgccggccctgccccgcacgccggcacgcggcacgcgcagccagctgccccacacgacgccggccgccctcgcactccccaccgcgctacccggcagccccgcgctacccggtcctcgctcggcgtccttgattcccaccgcacggcggcccttcttctgccaccgcacaccgcgcaggagcactgcccttcgccccttgtttagctgcagcaggagcgccgcccagccggccaccaccaccgcagcttgagagttgagacctgcagttgacgaccagaggccagagggcgttgctgcgctgcttcctcccctttttctgctgcgacgacggctggtcgagcgccgccacacttcgcagcttcgctggctcttcgcaggtgacgagcacccaccagacatggggcaaggtggacaagagaagtcgttcaatttccttcaagttttgctcgagggcagcatagctggaggaactgctggtgttgtggtggaaacagcactttacccgattgatactataaaaaccaggcttcaggctgctcgaggtggaagccggattgaatggaaaggcttgtattctggattagctggaaatctcactggcgtccttccggcctctgcgatatttgtcggggtgtatgagccaactaaaagaaaattactggaaacacttcctgaaaatctgagtgcagttgcccattttactgcaggggccattggaggtattgctgcttccctcgtccgtgtccctacagaggtggtcaaacaaaggatgcaaactggtcagttcaagtctgcacctgatgctgttcgtctcattgttgctaaagaaggatttaaaggactgtacgctggttatggttcctttctacttcgagatctaccatttgatgccatccagttctgcatttatgagcaacttcgaattggctacaaacttgtggcgaaaagggagttgaatgatccagagaatgcacttatcggtgcttttgctggcgccatcactggagctataacaaccccccttgatgtcatgaagacaagattgatggttcagggacaagggaaccaatacactggaattgtaagctgtgctcagacaatcctcagagaggaaggccctaaggcattcttgaagggcattgagccgcgagtgctgtggatcggcatcggtgggtccatcttctttggcgtgctggagaaaaccaagtcgatgctagccgagaggaggaaccgcgagcttcgggccgtcaaggacgaatgagtggagatcagctcttttttggcgttgagtccttaccctgaaacaaaatacacaattttacttgccgggggaggcagggggacaacctcgccggcccgtacctgtactccacggcgttcacgttatcacgtacgtagaaatcatgagcatgactgacggtttctacagattgaaaaccaaaacgtcttacatgcgctggc

SEQ ID NO: 16411 - protein, 287 aa, Zea mays subsp. mays
  peptide (1)..(287): Ceres Seq. ID no. 12357067
  misc_feature (21)..(267): Homolog of NCBI NO: 17539504 NR Description: Agpet8 (29.0 kD) [Caenorhabditis elegans]
  misc_feature (21)..(275): Homolog of NCBI NO: 6324325 NR Description: Member of family of mitochondrial carrier
  misc_feature (21)..(273): Homolog of NCBI NO: 24650120 NR Description: CG4743-PA [Drosophila melanogaster]
  misc_feature (22)..(264): Homolog of NCBI NO: 19115553 NR Description: agpet8 protein. [Schizosaccharomyces pombe]
  misc_feature (17)..(272): Homolog of NCBI NO: 3171731 NR Description: AgPET8 [Eremothecium gossypii]
  misc_feature (21)..(275): Homolog of NCBI NO: 27754081 NR Description: RIKEN cDNA 4930433D19; expressed sequence
  misc_feature (6)..(249): Homolog of NCBI NO: 7486053 NR Description: hypothetical protein F23K16.90 - Arabidopsis
  misc_feature (6)..(283): Homolog of NCBI NO: 18399114 NR Description: allinase, putative; protein id: At1g34065.1
  misc_feature (6)..(287): Homolog of NCBI NO: 18420458 NR Description: mitochondrial carrier protein family
  misc_feature (1)..(282): Homolog of NCBI NO: 34394981 NR Description: mitochondrial aspartate-glutamate carrier
MGQGGQEKSFNFLQVLLEGSIAGGTAGVVVETALYPIDTIKTRLQAARGGSRIEWKGLYSGLAGNLTGVLPASAIFVGVYEPTKRKLLETLPENLSAVAHFTAGAIGGIAASLVRVPTEVVKQRMQTGQFKSAPDAVRLIVAKEGFKGLYAGYGSFLLRDLPFDAIQFCIYEQLRIGYKLVAKRELNDPENALIGAFAGAITGAITTPLDVMKTRLMVQGQGNQYTGIVSCAQTILREEGPKAFLKGIEPRVLWIGIGGSIFFGVLEKTKSMLAERRNRELRAVKDE

SEQ ID NO: 16412 - protein, 163 aa, Zea mays subsp. mays
  peptide (1)..(163): Ceres Seq. ID no. 12357068
  misc_feature (1)..(143): Homolog of NCBI NO: 17539504 NR Description: Agpet8 (29.0 kD) [Caenorhabditis elegans]
  misc_feature (1)..(151): Homolog of NCBI NO: 6324325 NR Description: Member of family of mitochondrial carrier
  misc_feature (1)..(149): Homolog of NCBI NO: 24650120 NR Description: CG4743-PA [Drosophila melanogaster]
  misc_feature (1)..(140): Homolog of NCBI NO: 19115553 NR Description: agpet8 protein. [Schizosaccharomyces pombe]
  misc_feature (1)..(148): Homolog of NCBI NO: 3171731 NR Description: AgPET8 [Eremothecium gossypii]
  misc_feature (1)..(151): Homolog of NCBI NO: 27754081 NR Description: RIKEN cDNA 4930433D19; expressed sequence
  misc_feature (1)..(125): Homolog of NCBI NO: 7486053 NR Description: hypothetical protein F23K16.90 - Arabidopsis
  misc_feature (1)..(159): Homolog of NCBI NO: 18399114 NR Description: allinase, putative; protein id: At1g34065.1
  misc_feature (1)..(163): Homolog of NCBI NO: 18420458 NR Description: mitochondrial carrier protein family
  misc_feature (1)..(158): Homolog of NCBI NO: 34394981 NR Description: mitochondrial aspartate-glutamate carrier
MQTGQFKSAPDAVRLIVAKEGFKGLYAGYGSFLLRDLPFDAIQFCIYEQLRIGYKLVAKRELNDPENALIGAFAGAITGAITTPLDVMKTRLMVQGQGNQYTGIVSCAQTILREEGPKAFLKGIEPRVLWIGIGGSIFFGVLEKTKSMLAERRNRELRAVKDE

SEQ ID NO: 16413 - DNA, 769 bp, Zea mays subsp. mays
  misc_feature (1)..(769): Ceres Seq. ID no. 12545911
  misc_feature: MA Experiment ID: 108523 Result: Up-regulated in Transcription
  misc_feature: MA Experiment 108523 PARAMETER Experiment Name: Zm_42deg_Heat_P Parameter: Age (day) Value: 8
  misc_feature: MA Experiment 108523 PARAMETER Experiment Name: Zm_42deg_Heat_P Parameter: Organism Value: Zea mays
  misc_feature: MA Experiment 108523 PARAMETER Experiment Name: Zm_42deg_Heat_P Parameter: Plant Line Value: 35A19
  misc_feature: MA Experiment 108523 PARAMETER Experiment Name: Zm_42deg_Heat_P Parameter: Temperature (deg C) Value: 42 vs. 22
  misc_feature: MA Experiment 108523 PARAMETER Experiment Name: Zm_42deg_Heat_P Parameter: Timepoint (hr) Value: 6
  misc_feature: MA Experiment 108523 PARAMETER Experiment Name: Zm_42deg_Heat_P Parameter: Tissue Value: Aerial
acacatcattgagcgcaacgcggtcgtgattgcgagtgaatccgtggcgtccaactcccaagcccctaccggcaaccctagcgaggcgatggggaaggcggaggcgaggtcaagggggcgcggcggcggcggcggcggcggcggaggaggaggaggcggaggcgccagcggcaatccggggaagatcttcgtcggagggctcccgcgggacaccacggatgctacatttgtgaggcattttggacagtatggagaaatagttgattcggtgataatgaaggataggcacacatctcagccacggggttttggcttcattacatactccgaccctgctgttgttgataaagtgatagaggacaatcatgttatcaatggaaagcaagttgaaattaagagaaccataccaaaaggttcggtgcaatctagctctaaggatttcaagactaaaaagatatttgttggtgggcttccgtcaacactaacagaagacgaattcaagagtttctttgcaanatatgggactgtggtggaccaccagattatgtttgatcatgaaaccaaacgttcccgaggctttggatttatagtttttgcttctgagcaagttgtagatgatttgttagcaaatggaaatatggttgaccttgctggttcaaaggtgagtctgaagttcattatagaaatgacaccaatggttgtctcctccattgtggatctatggtgtaaaatatgtaaagtagtgttttgcattcttctattccaagtc

SEQ ID NO: 16414 - protein, 256 aa, Zea mays subsp. mays
  peptide (1)..(256): Ceres Seq. ID no. 12545912
  misc_feature (62)..(131): Pfam Name: RNA recognition motif. (a.k.a. RRM, RBD, or RNP domain) Pfam Description: RNA recognition motif. (a.k.a. RRM, RBD, or RNP
  misc_feature (148)..(224): Homolog of NCBI NO: 7487039 NR Description: hypothetical protein T15N24.100 - Arabidopsis
  misc_feature (60)..(141): Homolog of NCBI NO: 7487039 NR Description: hypothetical protein T15N24.100 - Arabidopsis
  misc_feature (148)..(224): Homolog of NCBI NO: 18416794 NR Description: heterogeneous nuclear ribonucleoprotein (hnRNP),
  misc_feature (60)..(141): Homolog of NCBI NO: 18416794 NR Description: heterogeneous nuclear ribonucleoprotein (hnRNP),
  misc_feature (61)..(224): Homolog of NCBI NO: 8778468 NR Description: F1L3.34 [Arabidopsis thaliana]
  misc_feature (58)..(224): Homolog of NCBI NO: 15220810 NR Description: RRM-containing RNA-binding protein, putative
  misc_feature (53)..(224): Homolog of NCBI NO: 15242719 NR Description: RRM-containing RNA-binding protein, putative
  misc_feature (54)..(224): Homolog of NCBI NO: 35215091 NR Description: putative heterogeneous nuclear ribonucleoprotein
  misc_feature (52)..(224): Homolog of NCBI NO: 30682553 NR Description: RNA recognition motif (RRM)-containing protein
  misc_feature (52)..(223): Homolog of NCBI NO: 30682550 NR Description: RNA recognition motif (RRM)-containing protein
  misc_feature (172)..(172): Xaa is any aa, unknown or other
HIIERNAVVIASESVASNSQAPTGNPSEAMGKAEARSRGRGGGGGGGGGGGGGGASGNPGKIFVGGLPRDTTDATFVRHFGQYGEIVDSVIMKDRHTSQPRGFGFITYSDPAVVDKVIEDNHVINGKQVEIKRTIPKGSVQSSSKDFKTKKIFVGGLPSTLTEDEFKSFFAXYGTVVDHQIMFDHETKRSRGFGFIVFASEQVVDDLLANGNMVDLAGSKVSLKFIIEMTPMVVSSIVDLWCKICKVVFCILLFQV

SEQ ID NO: 16415 - protein, 227 aa, Zea mays subsp. mays
  peptide (1)..(227): Ceres Seq. ID no. 12545913
  misc_feature (33)..(102): Pfam Name: RNA recognition motif. (a.k.a. RRM, RBD, or RNP domain) Pfam Description: RNA recognition motif. (a.k.a. RRM, RBD, or RNP
  misc_feature (119)..(195): Homolog of NCBI NO: 7487039 NR Description: hypothetical protein T15N24.100 - Arabidopsis
  misc_feature (31)..(112): Homolog of NCBI NO: 7487039 NR Description: hypothetical protein T15N24.100 - Arabidopsis
  misc_feature (119)..(195): Homolog of NCBI NO: 18416794 NR Description: heterogeneous nuclear ribonucleoprotein (hnRNP),
  misc_feature (31)..(112): Homolog of NCBI NO: 18416794 NR Description: heterogeneous nuclear ribonucleoprotein (hnRNP),
  misc_feature (32)..(195): Homolog of NCBI NO: 8778468 NR Description: F1L3.34 [Arabidopsis thaliana]
  misc_feature (29)..(195): Homolog of NCBI NO: 15220810 NR Description: RRM-containing RNA-binding protein, putative
  misc_feature (24)..(195): Homolog of NCBI NO: 15242719 NR Description: RRM-containing RNA-binding protein, putative
  misc_feature (25)..(195): Homolog of NCBI NO: 35215091 NR Description: putative heterogeneous nuclear ribonucleoprotein
  misc_feature (23)..(195): Homolog of NCBI NO: 30682553 NR Description: RNA recognition motif (RRM)-containing protein
  misc_feature (23)..(194): Homolog of NCBI NO: 30682550 NR Description: RNA recognition motif (RRM)-containing protein
  misc_feature (143)..(143): Xaa is any aa, unknown or other
MGKAEARSRGRGGGGGGGGGGGGGGASGNPGKIFVGGLPRDTTDATFVRHFGQYGEIVDSVIMKDRHTSQPRGFGFITYSDPAVVDKVIEDNHVINGKQVEIKRTIPKGSVQSSSKDFKTKKIFVGGLPSTLTEDEFKSFFAXYGTVVDHQIMFDHETKRSRGFGFIVFASEQVVDDLLANGNMVDLAGSKVSLKFIIEMTPMVVSSIVDLWCKICKVVFCILLFQV

SEQ ID NO: 16416 - protein, 165 aa, Zea mays subsp. mays
  peptide (1)..(165): Ceres Seq. ID no. 12545914
  misc_feature (61)..(132): Pfam Name: RNA recognition motif. (a.k.a. RRM, RBD, or RNP domain) Pfam Description: RNA recognition motif. (a.k.a. RRM, RBD, or RNP
  misc_feature (57)..(133): Homolog of NCBI NO: 7487039 NR Description: hypothetical protein T15N24.100 - Arabidopsis
  misc_feature (1)..(50): Homolog of NCBI NO: 7487039 NR Description: hypothetical protein T15N24.100 - Arabidopsis
  misc_feature (57)..(133): Homolog of NCBI NO: 18416794 NR Description: heterogeneous nuclear ribonucleoprotein (hnRNP),
  misc_feature (1)..(50): Homolog of NCBI NO: 18416794 NR Description: heterogeneous nuclear ribonucleoprotein (hnRNP),
  misc_feature (1)..(133): Homolog of NCBI NO: 8778468 NR Description: F1L3.34 [Arabidopsis thaliana]
  misc_feature (1)..(133): Homolog of NCBI NO: 15220810 NR Description: RRM-containing RNA-binding protein, putative
  misc_feature (1)..(133): Homolog of NCBI NO: 15242719 NR Description: RRM-containing RNA-binding protein, putative
  misc_feature (1)..(133): Homolog of NCBI NO: 35215091 NR Description: putative heterogeneous nuclear ribonucleoprotein
  misc_feature (1)..(133): Homolog of NCBI NO: 30682553 NR Description: RNA recognition motif (RRM)-containing protein
  misc_feature (1)..(132): Homolog of NCBI NO: 30682550 NR Description: RNA recognition motif (RRM)-containing protein
  misc_feature (81)..(81): Xaa is any aa, unknown or other
MKDRHTSQPRGFGFITYSDPAVVDKVIEDNHVINGKQVEIKRTIPKGSVQSSSKDFKTKKIFVGGLPSTLTEDEFKSFFAXYGTVVDHQIMFDHETKRSRGFGFIVFASEQVVDDLLANGNMVDLAGSKVSLKFIIEMTPMVVSSIVDLWCKICKVVFCILLFQV

SEQ ID NO: 16417 - DNA, 1644 bp, Zea mays subsp. mays
  misc_feature (1)..(1644): Ceres Seq. ID no. 12407466
  misc_feature: MA Experiment ID: 108515 Result: Up-regulated in Transcription
  misc_feature: MA Experiment 108515 PARAMETER Experiment Name: Zm_2mM_SA_P Parameter: Age (day) Value: 8
  misc_feature: MA Experiment 108515 PARAMETER Experiment Name: Zm_2mM_SA_P Parameter: Organism Value: Zea mays
  misc_feature: MA Experiment 108515 PARAMETER Experiment Name: Zm_2mM_SA_P Parameter: Plant Line Value: 35A19
  misc_feature: MA Experiment 108515 PARAMETER Experiment Name: Zm_2mM_SA_P Parameter: Timepoint (hr) Value: 12
  misc_feature: MA Experiment 108515 PARAMETER Experiment Name: Zm_2mM_SA_P Parameter: Tissue Value: Aerial
  misc_feature: MA Experiment 108515 PARAMETER Experiment Name: Zm_2mM_SA_P Parameter: Treatment Value: 2mM SA vs. No Treatment
  misc_feature: MA Experiment ID: 108526 Result: Up-regulated in Transcription
  misc_feature: MA Experiment 108526 PARAMETER Experiment Name: Zm_5mM_NO_P Parameter: Age (day) Value: 8
  misc_feature: MA Experiment 108526 PARAMETER Experiment Name: Zm_5mM_NO_P Parameter: Organism Value: Zea mays
  misc_feature: MA Experiment 108526 PARAMETER Experiment Name: Zm_5mM_NO_P Parameter: Plant Line Value: 35A19
  misc_feature: MA Experiment 108526 PARAMETER Experiment Name: Zm_5mM_NO_P Parameter: Timepoint (hr) Value: 1
  misc_feature: MA Experiment 108526 PARAMETER Experiment Name: Zm_5mM_NO_P Parameter: Tissue Value: Aerial
  misc_feature: MA Experiment 108526 PARAMETER Experiment Name: Zm_5mM_NO_P Parameter: Treatment Value: 5mM NO vs. No Treatment
  misc_feature: MA Experiment ID: 108527 Result: Up-regulated in Transcription
  misc_feature: MA Experiment 108527 PARAMETER Experiment Name: Zm_5mM_NO_P Parameter: Age (day) Value: 8
  misc_feature: MA Experiment 108527 PARAMETER Experiment Name: Zm_5mM_NO_P Parameter: Organism Value: Zea mays
  misc_feature: MA Experiment 108527 PARAMETER Experiment Name: Zm_5mM_NO_P Parameter: Plant Line Value: 35A19
  misc_feature: MA Experiment 108527 PARAMETER Experiment Name: Zm_5mM_NO_P Parameter: Timepoint (hr) Value: 6
  misc_feature: MA Experiment 108527 PARAMETER Experiment Name: Zm_5mM_NO_P Parameter: Tissue Value: Aerial
  misc_feature: MA Experiment 108527 PARAMETER Experiment Name: Zm_5mM_NO_P Parameter: Treatment Value: 5mM NO vs. No Treatment
  misc_feature: MA Experiment ID: 108559 Result: Up-regulated in Transcription
  misc_feature: MA Experiment 108559 PARAMETER Experiment Name: Zm_5mM_NO_P Parameter: Age (day) Value: 8
  misc_feature: MA Experiment 108559 PARAMETER Experiment Name: Zm_5mM_NO_P Parameter: Organism Value: Zea mays
  misc_feature: MA Experiment 108559 PARAMETER Experiment Name: Zm_5mM_NO_P Parameter: Plant Line Value: 35A19
  misc_feature: MA Experiment 108559 PARAMETER Experiment Name: Zm_5mM_NO_P Parameter: Timepoint (hr) Value: 12
  misc_feature: MA Experiment 108559 PARAMETER Experiment Name: Zm_5mM_NO_P Parameter: Tissue Value: Aerial
  misc_feature: MA Experiment 108559 PARAMETER Experiment Name: Zm_5mM_NO_P Parameter: Treatment Value: 5mM NO vs. No Treatment
  misc_feature: MA Experiment ID: 20000478 Result: Up-regulated in Transcription
  misc_feature: MA Experiment 20000478 PARAMETER Experiment Name: Zm_5mM_SA_P Parameter: Age (day) Value: 11
  misc_feature: MA Experiment 20000478 PARAMETER Experiment Name: Zm_5mM_SA_P Parameter: Organism Value: Zea mays
  misc_feature: MA Experiment 20000478 PARAMETER Experiment Name: Zm_5mM_SA_P Parameter: Plant Line Value: 35A19
  misc_feature: MA Experiment 20000478 PARAMETER Experiment Name: Zm_5mM_SA_P Parameter: Timepoint (hr) Value: 72
  misc_feature: MA Experiment 20000478 PARAMETER Experiment Name: Zm_5mM_SA_P Parameter: Tissue Value: Aerial
  misc_feature: MA Experiment 20000478 PARAMETER Experiment Name: Zm_5mM_SA_P Parameter: Treatment Value: 5mM SA vs. No Treatment
  misc_feature: MA Experiment ID: 20000487 Result: Up-regulated in Transcription
  misc_feature: MA Experiment 20000487 PARAMETER Experiment Name: Zm_50mM_NH4NO3_L_to_H_P Parameter: Organism Value: Zea mays
  misc_feature: MA Experiment 20000487 PARAMETER Experiment Name: Zm_50mM_NH4NO3_L_to_H_P Parameter: Timepoint (hr) Value: 4
  misc_feature: MA Experiment 20000487 PARAMETER Experiment Name: Zm_50mM_NH4NO3_L_to_H_P Parameter: Tissue Value: Leaves
  misc_feature: MA Experiment 20000487 PARAMETER Experiment Name: Zm_50mM_NH4NO3_L_to_H_P Parameter: Treatment Value: 50mM NH4NO3 vs. 100mM Mannitol
  misc_feature: MA Experiment ID: 20000492 Result: Up-regulated in Transcription
  misc_feature: MA Experiment 20000492 PARAMETER Experiment Name: Zm_Hybrid_Seed_Dev_P Parameter: DAP Value: 12
  misc_feature: MA Experiment 20000492 PARAMETER Experiment Name: Zm_Hybrid_Seed_Dev_P Parameter: Organism Value: Zea mays
  misc_feature: MA Experiment 20000492 PARAMETER Experiment Name: Zm_Hybrid_Seed_Dev_P Parameter: Plant Line Value: 35A19
  misc_feature: MA Experiment 20000492 PARAMETER Experiment Name: Zm_Hybrid_Seed_Dev_P Parameter: Tissue Value: Fert Kernel vs. Unfert Floret
  misc_feature: MA Experiment ID: 20000626 Result: Up-regulated in Transcription
  misc_feature: MA Experiment 20000626 PARAMETER Experiment Name: Zm_Herbicide-Treatments_P Parameter: Timepoint (hr) Value: 12
  misc_feature: MA Experiment 20000626 PARAMETER Experiment Name: Zm_Herbicide-Treatments_P Parameter: Tissue Value: Aerial
  misc_feature: MA Experiment 20000626 PARAMETER Experiment Name: Zm_Herbicide-Treatments_P Parameter: Treatment Value: Roundup vs. No Treatment
actcttcaccaccgccattcccccccccactcttcaccaccgcagcgccgccgcgtacaaggcgattaggcgaagctgcaccggaaggagaaggagagaagcgagagtctccccagccagagcaagccgaatccgaagctagcggagaggagagagggctgagtgaggatgccgacggttacctgcaacgcgtgcaacgcggggttcgacgacgaggagcagcagcggcttcactaccgctctgaatggcaccgttacaacctcaagcgcaaggtggctggagttcctggtgtcacagaggctctgtttctggctaggcaagctgctttggcggaggggagcaagcctgctagcaccccaatgctttacagctgtgctctttgtggaaaggagtacagaagctcgaaagctcacgagcagcatcttaactcgcgatcacatcttttgaaagcctctcaggagcccaatgcctctattgctggtatcacgatagtcaagccacttcctgaacgagtctcacgaagagctccatctgcagtagaggaggatcaagacgacgatgaggaagaagagtgggttgaagttgacccaagtgagatggagttggctgatgagtctacttcaaacatgcaagaagatgagcactcctcaaaatcagatgatgacatggatgaccttgaagagttggatatctcgtcgtgtttcatgtgtgacctcaagcatgacaccatagaagactgcatggtccatatgcataagaagcatgggtttttcatacctgacagtgaatacttgaaggatcccagtggtcttcttacttatgttggactgaaggtgaagcgtgattttatctgcctctactgcaatgacagatgccagtccttcttcagtctagaggctgtcaggaagcacatggatgcaaaggggcattgcaagttgcggtatggagatggtggagatgatgaagatgctgacctcgaggaattctatgattacagcagcagttatgttgattcagaaggcaagcagttgattgctgttgatgacttgaacaacaacattgagctgggaatcggtgggtctgagctagtaataacaaacaagagcgagaaaggcactcgggtcagaacccttggctctagggaatttatgcgctactatcgccagaaaccacggccttctgttgcaccagaccgtgcgcttgcactttcactagcttccagctacaagagcatgggtttggtgacagtgcagtctaaggagcagatggtgaggctgaaagttctccgtgctatgaacaggaccggggtcgagactatgcggaacaagatcggaatgaagagcaatgtgatccggaacctccctaagaattgcccgcactagacaacactgccttctcctgcaccctatctggagcttctcctggcatttatatggtgtcttatggtttcttgtctgtcgctgacaacgttggcgcttaagatatttggaataggactacaccttccatagtttttgttgaactctgtggtgcggaagcagctgttgccattatggcggaaattgctgacgcctcattgaacatgtttagtttttattttgttaaaaaattgggcaaaaaagtttgatgctcatattcatcgc

SEQ ID NO: 16418 - protein, 404 aa, Zea mays subsp. mays
  peptide (1)..(404): Ceres Seq. ID no. 12407467
  misc_feature (227)..(254): Pfam Name: Zinc finger, C2H2 type Pfam Description: Zinc finger, C2H2 type
  misc_feature (1)..(396): Homolog of NCBI NO: 18859899 NR Description: CG6769-PA [Drosophila melanogaster]
  misc_feature (1)..(103): Homolog of NCBI NO: 15529978 NR Description: zinc finger-like protein 9 [Homo sapiens]
  misc_feature (114)..(398): Homolog of NCBI NO: 15529978 NR Description: zinc finger-like protein 9 [Homo sapiens]
  misc_feature (160)..(325): Homolog of NCBI NO: 28207607 NR Description: putative C2H2-type zinc finger protein
  misc_feature (1)..(142): Homolog of NCBI NO: 21362307 NR Description: hypothetical protein D15Ertd806e [Mus musculus]
  misc_feature (125)..(398): Homolog of NCBI NO: 21362307 NR Description: hypothetical protein D15Ertd806e [Mus musculus]
  misc_feature (1)..(353): Homolog of NCBI NO: 7486672 NR Description: hypothetical protein F8F16.240 - Arabidopsis
  misc_feature (1)..(401): Homolog of NCBI NO: 15224153 NR Description: putative C2H2-type zinc finger protein
  misc_feature (1)..(404): Homolog of NCBI NO: 13878013 NR Description: putative zinc finger protein [Arabidopsis
  misc_feature (1)..(404): Homolog of NCBI NO: 18417803 NR Description: putative zinc finger protein
MPTVTCNACNAGFDDEEQQRLHYRSEWHRYNLKRKVAGVPGVTEALFLARQAALAEGSKPASTPMLYSCALCGKEYRSSKAHEQHLNSRSHLLKASQEPNASIAGITIVKPLPERVSRRAPSAVEEDQDDDEEEEWVEVDPSEMELADESTSNMQEDEHSSKSDDDMDDLEELDISSCFMCDLKHDTIEDCMVHMHKKHGFFIPDSEYLKDPSGLLTYVGLKVKRDFICLYCNDRCQSFFSLEAVRKHMDAKGHCKLRYGDGGDDEDADLEEFYDYSSSYVDSEGKQLIAVDDLNNNIELGIGGSELVITNKSEKGTRVRTLGSREFMRYYRQKPRPSVAPDRALALSLASSYKSMGLVTVQSKEQMVRLKVLRAMNRTGVETMRNKIGMKSNVIRNLPKNCPH

SEQ ID NO: 16419 - protein, 340 aa, Zea mays subsp. mays
  peptide (1)..(340): Ceres Seq. ID no. 12407468
  misc_feature (163)..(190): Pfam Name: Zinc finger, C2H2 type Pfam Description: Zinc finger, C2H2 type
  misc_feature (1)..(340): Homolog of NCBI NO: 13878013 NR Description: putative zinc finger protein [Arabidopsis
  misc_feature (1)..(332): Homolog of NCBI NO: 18859899 NR Description: CG6769-PA [Drosophila melanogaster]
  misc_feature (50)..(334): Homolog of NCBI NO: 15529978 NR Description: zinc finger-like protein 9 [Homo sapiens]
  misc_feature (1)..(78): Homolog of NCBI NO: 21362307 NR Description: hypothetical protein D15Ertd806e [Mus musculus]
  misc_feature (1)..(289): Homolog of NCBI NO: 7486672 NR Description: hypothetical protein F8F16.240 - Arabidopsis
  misc_feature (1)..(337): Homolog of NCBI NO: 15224153 NR Description: putative C2H2-type zinc finger protein
  misc_feature (61)..(334): Homolog of NCBI NO: 21362307 NR Description: hypothetical protein D15Ertd806e [Mus musculus]
  misc_feature (96)..(261): Homolog of NCBI NO: 28207607 NR Description: putative C2H2-type zinc finger protein
  misc_feature (1)..(39): Homolog of NCBI NO: 15529978 NR Description: zinc finger-like protein 9 [Homo sapiens]
  misc_feature (1)..(340): Homolog of NCBI NO: 18417803 NR Description: putative zinc finger protein
MLYSCALCGKEYRSSKAHEQHLNSRSHLLKASQEPNASIAGITIVKPLPERVSRRAPSAVEEDQDDDEEEEWVEVDPSEMELADESTSNMQEDEHSSKSDDDMDDLEELDISSCFMCDLKHDTIEDCMVHMHKKHGFFIPDSEYLKDPSGLLTYVGLKVKRDFICLYCNDRCQSFFSLEAVRKHMDAKGHCKLRYGDGGDDEDADLEEFYDYSSSYVDSEGKQLIAVDDLNNNIELGIGGSELVITNKSEKGTRVRTLGSREFMRYYRQKPRPSVAPDRALALSLASSYKSMGLVTVQSKEQMVRLKVLRAMNRTGVETMRNKIGMKSNVIRNLPKNCPH

SEQ ID NO: 16420 - protein, 261 aa, Zea mays subsp. mays
  peptide (1)..(261): Ceres Seq. ID no. 12407469
  misc_feature (84)..(111): Pfam Name: Zinc finger, C2H2 type Pfam Description: Zinc finger, C2H2 type
  misc_feature (1)..(238): Homolog of NCBI NO: 33286946 NR Description: Unknown (protein for IMAGE:6795513) [Danio rerio]
  misc_feature (1)..(255): Homolog of NCBI NO: 34854897 NR Description: similar to Ac1133 [Rattus norvegicus]
  misc_feature (1)..(253): Homolog of NCBI NO: 18859899 NR Description: CG6769-PA [Drosophila melanogaster]
  misc_feature (1)..(255): Homolog of NCBI NO: 15529978 NR Description: zinc finger-like protein 9 [Homo sapiens]
  misc_feature (17)..(182): Homolog of NCBI NO: 28207607 NR Description: putative C2H2-type zinc finger protein
  misc_feature (1)..(255): Homolog of NCBI NO: 21362307 NR Description: hypothetical protein D15Ertd806e [Mus musculus]
  misc_feature (1)..(210): Homolog of NCBI NO: 7486672 NR Description: hypothetical protein F8F16.240 - Arabidopsis
  misc_feature (1)..(258): Homolog of NCBI NO: 15224153 NR Description: putative C2H2-type zinc finger protein
  misc_feature (1)..(261): Homolog of NCBI NO: 13878013 NR Description: putative zinc finger protein [Arabidopsis
  misc_feature (1)..(261): Homolog of NCBI NO: 18417803 NR Description: putative zinc finger protein
MELADESTSNMQEDEHSSKSDDDMDDLEELDISSCFMCDLKHDTIEDCMVHMHKKHGFFIPDSEYLKDPSGLLTYVGLKVKRDFICLYCNDRCQSFFSLEAVRKHMDAKGHCKLRYGDGGDDEDADLEEFYDYSSSYVDSEGKQLIAVDDLNNNIELGIGGSELVITNKSEKGTRVRTLGSREFMRYYRQKPRPSVAPDRALALSLASSYKSMGLVTVQSKEQMVRLKVLRAMNRTGVETMRNKIGMKSNVIRNLPKNCPH

SEQ ID NO: 16421 - DNA, 2112 bp, Zea mays subsp. mays
  misc_feature (1)..(2112): Ceres Seq. ID no. 12405293
  misc_feature: MA Experiment ID: 20000534 Result: Up-regulated in Transcription
  misc_feature: MA Experiment 20000534 PARAMETER Experiment Name: Zm_Hybrid_Pollen_P Parameter: Age (day) Value: 8
  misc_feature: MA Experiment 20000534 PARAMETER Experiment Name: Zm_Hybrid_Pollen_P Parameter: Organism Value: Zea mays
  misc_feature: MA Experiment 20000534 PARAMETER Experiment Name: Zm_Hybrid_Pollen_P Parameter: Plant Line Value: 35A19
  misc_feature: MA Experiment 20000534 PARAMETER Experiment Name: Zm_Hybrid_Pollen_P Parameter: Tissue Value: Pollen vs. Aerial
atcaccaccagccagcaccacccctcctgcccctctgcgctggcgggccgagcgccgcgagcgagctgggccgcgggcggaggaggagtcgaggctgaccgaccccgcggccggcggcgacgagcggacgcagattcggcagccgtgcgcggaatgcccgtggaaggaggggagagagggagggcgcaggcgcagctgagctgagctgagcccgcgaggttcgcggtctgcggtgcggcggcagaggtctcgccagcgcgatggccagcggcggctcctccaggtacagctcgtacaaggcgccggggctgcgcggcgcgctgctggaggcggcgcacgtgtcgtgcctcgaggaccggtacgcgctgggcccgcagctggggtggggccagttcggcgtgatccggtcctgctccgacctggtcaccggcgaggcgctggcctgcaagtccatcgccaagggccggctcgtgtcccccgacgacgtgcgcggggtcaggctggagatcgacgtcatggcgcgcctggcgggccaccccaacgtcgtggggctcaaggccgtgtacgaggaccgcgactcggtgcacctcgtcatggagctctgcgccggcggcgagctcttccaccgcctccacgagcgcggctgcttccccgagcgcgaggccgccgcgctcttccgccacctcatggaggtcgtcgcgcactgccacgccaaggggatcgtgcaccgcgacctcaagcccgagaacatcctcctcgtcagcaggtcgccccagtcgccgatcaaactcgcggactttggactcgccacctacacccagcctggccgaagcttgagcggcatggtaggcagcccgttctacattgcgccggaggtgctctccggcgggtacaacgaggccgccgacgtctggagcgcgggggtcatactctacatcctcctcagcggcatcccacctttttggggcaagaccaagtccaagatcttcgactgcatcaggtccatggagctgcggttcccttctgacccatgggacagggtttctgattccgccaaggagctcgtcaccgggatgctgcggcgcgaccctaggctgcggctcacggccaagcaggttctagagcatccgtggatgcaggaacacgcggacccacaagactcgtgcgggcagtgccacgagaccggcctccaacgggagggcgccggctcgtgctccttctccacgccgttggcgtcgcggagcagggacgtgagctttgacacgcgtggccccatcgcgtggaggggtgggggcgaggacgaggcgacctgctgctcgcccacgttcgccgccgtctgcaggtcgtcgttctcggcgttcatcaccgacccggccccgccgccctgctcggcctcctccgccttgggtggctctggcttctcgttcggtgagccctgcgaaccacttgacggaggaggaggaggagggttcccgatgcccatggcttccatgccgagcttctcgttcttctgcgcgcgggacagcagcgagccagctgagccacagccggtcgctgcctcctcgactccgaggacggcgaggggatccacgccacggggcgtcaacggcaggcggaaccacacgatcggcggcggcgggcgggagcacctggacgtggcggtggagtctgtcatccgctgggcgtcgtgcaccaacttctccacggcgccctcacttcgggcctccctcgtatgctagcactagcaacgtcgttccgcgcgccggcgccgccaacgccgggctgagggtgaggaggagaattccgacgagacgagcggtagagagtgtgcagtagcctcgaattgtataatatatatacagacacagtgctgttatagtggtgatgatagattagagagtgaaggtgaagttgctacggagggatggatgcatggagatggagagcgagtggcagagctggaactgatgtgttttattcttcgctgtcacgctgctggtcagataagatttgggaacgctgctggtcagataagatttgggaacacacctggcgacggagagagaaggcgtctgataatttgatatgaacaagaagcaacaatgttcaggt

SEQ ID NO: 16422 - protein, 492 aa, Zea mays subsp. mays
  peptide (1)..(492): Ceres Seq. ID no. 12405294
  misc_feature (34)..(292): Pfam Name: Protein kinase domain Pfam Description: Protein kinase domain
  misc_feature (1)..(300): Homolog of NCBI NO: 15239716 NR Description: calcium-dependent protein kinase - like; protein
  misc_feature (30)..(292): Homolog of NCBI NO: 33146743 NR Description: putative calcium-dependent protein kinase 2
  misc_feature (16)..(293): Homolog of NCBI NO: 7434364 NR Description: calcium-dependent protein kinase (EC 2.7.1.-)
  misc_feature (1)..(300): Homolog of NCBI NO: 5162878 NR Description: calcium-dependent protein kinase [Marchantia
  misc_feature (1)..(300): Homolog of NCBI NO: 5162877 NR Description: calcium-dependent protein kinase [Marchantia
  misc_feature (396)..(492): Homolog of NCBI NO: 15222023 NR Description: calcium-dependent protein kinase, putative
  misc_feature (12)..(386): Homolog of NCBI NO: 15222023 NR Description: calcium-dependent protein kinase, putative
  misc_feature (1)..(492): Homolog of NCBI NO: 21064945 NR Description: CDPK-like protein [Solanum tuberosum]
  misc_feature (1)..(492): Homolog of NCBI NO: 25553562 NR Description: OSJNBa0038F22.11 [Oryza sativa (japonica
  misc_feature (1)..(492): Homolog of NCBI NO: 34898032 NR Description: ESTs AU030197(E50746),AU030196(E50746) correspond a region of the predicted gene.~Similar to calcium-dependent
MASGGSSRYSSYKAPGLRGALLEAAHVSCLEDRYALGPQLGWGQFGVIRSCSDLVTGEALACKSIAKGRLVSPDDVRGVRLEIDVMARLAGHPNVVGLKAVYEDRDSVHLVMELCAGGELFHRLHERGCFPEREAAALFRHLMEVVAHCHAKGIVHRDLKPENILLVSRSPQSPIKLADFGLATYTQPGRSLSGMVGSPFYIAPEVLSGGYNEAADVWSAGVILYILLSGIPPFWGKTKSKIFDCIRSMELRFPSDPWDRVSDSAKELVTGMLRRDPRLRLTAKQVLEHPWMQEHADPQDSCGQCHETGLQREGAGSCSFSTPLASRSRDVSFDTRGPIAWRGGGEDEATCCSPTFAAVCRSSFSAFITDPAPPPCSASSALGGSGFSFGEPCEPLDGGGGGGFPMPMASMPSFSFFCARDSSEPAEPQPVAASSTPRTARGSTPRGVNGRRNHTIGGGGREHLDVAVESVIRWASCTNFSTAPSLRASLVC

SEQ ID NO: 16423 - protein, 407 aa, Zea mays subsp. mays
  peptide (1)..(407): Ceres Seq. ID no. 12405295
  misc_feature (1)..(207): Pfam Name: Protein kinase domain Pfam Description: Protein kinase domain
  misc_feature (1)..(215): Homolog of NCBI NO: 15239716 NR Description: calcium-dependent protein kinase - like; protein
  misc_feature (1)..(207): Homolog of NCBI NO: 33146743 NR Description: putative calcium-dependent protein kinase 2
  misc_feature (1)..(208): Homolog of NCBI NO: 7434364 NR Description: calcium-dependent protein kinase (EC 2.7.1.-)
  misc_feature (1)..(215): Homolog of NCBI NO: 5162878 NR Description: calcium-dependent protein kinase [Marchantia
  misc_feature (1)..(215): Homolog of NCBI NO: 5162877 NR Description: calcium-dependent protein kinase [Marchantia
  misc_feature (311)..(407): Homolog of NCBI NO: 15222023 NR Description: calcium-dependent protein kinase, putative
  misc_feature (1)..(301): Homolog of NCBI NO: 15222023 NR Description: calcium-dependent protein kinase, putative
  misc_feature (1)..(407): Homolog of NCBI NO: 21064945 NR Description: CDPK-like protein [Solanum tuberosum]
  misc_feature (1)..(407): Homolog of NCBI NO: 25553562 NR Description: OSJNBa0038F22.11 [Oryza sativa (japonica
  misc_feature (1)..(407): Homolog of NCBI NO: 34898032 NR Description: ESTs AU030197(E50746),AU030196(E50746) correspond a region of the predicted gene.~Similar to calcium-dependent
MARLAGHPNVVGLKAVYEDRDSVHLVMELCAGGELFHRLHERGCFPEREAAALFRHLMEVVAHCHAKGIVHRDLKPENILLVSRSPQSPIKLADFGLATYTQPGRSLSGMVGSPFYIAPEVLSGGYNEAADVWSAGVILYILLSGIPPFWGKTKSKIFDCIRSMELRFPSDPWDRVSDSAKELVTGMLRRDPRLRLTAKQVLEHPWMQEHADPQDSCGQCHETGLQREGAGSCSFSTPLASRSRDVSFDTRGPIAWRGGGEDEATCCSPTFAAVCRSSFSAFITDPAPPPCSASSALGGSGFSFGEPCEPLDGGGGGGFPMPMASMPSFSFFCARDSSEPAEPQPVAASSTPRTARGSTPRGVNGRRNHTIGGGGREHLDVAVESVIRWASCTNFSTAPSLRASLVC

SEQ ID NO: 16424 - protein, 381 aa, Zea mays subsp. mays
  peptide (1)..(381): Ceres Seq. ID no. 12405296
  misc_feature (1)..(181): Pfam Name: Protein kinase domain Pfam Description: Protein kinase domain
  misc_feature (1)..(189): Homolog of NCBI NO: 15239716 NR Description: calcium-dependent protein kinase - like; protein
  misc_feature (1)..(181): Homolog of NCBI NO: 33146743 NR Description: putative calcium-dependent protein kinase 2
  misc_feature (1)..(182): Homolog of NCBI NO: 7434364 NR Description: calcium-dependent protein kinase (EC 2.7.1.-)
  misc_feature (1)..(189): Homolog of NCBI NO: 5162878 NR Description: calcium-dependent protein kinase [Marchantia
  misc_feature (1)..(189): Homolog of NCBI NO: 5162877 NR Description: calcium-dependent protein kinase [Marchantia
  misc_feature (285)..(381): Homolog of NCBI NO: 15222023 NR Description: calcium-dependent protein kinase, putative
  misc_feature (1)..(275): Homolog of NCBI NO: 15222023 NR Description: calcium-dependent protein kinase, putative
  misc_feature (1)..(381): Homolog of NCBI NO: 21064945 NR Description: CDPK-like protein [Solanum tuberosum]
  misc_feature (1)..(381): Homolog of NCBI NO: 25553562 NR Description: OSJNBa0038F22.11 [Oryza sativa (japonica
  misc_feature (1)..(381): Homolog of NCBI NO: 34898032 NR Description: ESTs AU030197(E50746),AU030196(E50746) correspond a region of the predicted gene.~Similar to calcium-dependent
MELCAGGELFHRLHERGCFPEREAAALFRHLMEVVAHCHAKGIVHRDLKPENILLVSRSPQSPIKLADFGLATYTQPGRSLSGMVGSPFYIAPEVLSGGYNEAADVWSAGVILYILLSGIPPFWGKTKSKIFDCIRSMELRFPSDPWDRVSDSAKELVTGMLRRDPRLRLTAKQVLEHPWMQEHADPQDSCGQCHETGLQREGAGSCSFSTPLASRSRDVSFDTRGPIAWRGGGEDEATCCSPTFAAVCRSSFSAFITDPAPPPCSASSALGGSGFSFGEPCEPLDGGGGGGFPMPMASMPSFSFFCARDSSEPAEPQPVAASSTPRTARGSTPRGVNGRRNHTIGGGGREHLDVAVESVIRWASCTNFSTAPSLRASLVC

SEQ ID NO: 16425 - DNA, 975 bp, Zea mays subsp. mays
  misc_feature (1)..(975): Ceres Seq. ID no. 12373004
  misc_feature: MA Experiment ID: 108504 Result: Down-regulated in Transcription
  misc_feature: MA Experiment 108504 PARAMETER Experiment Name: Zm_Drought_P Parameter: Age (day) Value: 8
  misc_feature: MA Experiment 108504 PARAMETER Experiment Name: Zm_Drought_P Parameter: Organism Value: Zea mays
  misc_feature: MA Experiment 108504 PARAMETER Experiment Name: Zm_Drought_P Parameter: Plant Line Value: 35A19
  misc_feature: MA Experiment 108504 PARAMETER Experiment Name: Zm_Drought_P Parameter: Timepoint (hr) Value: 12
  misc_feature: MA Experiment 108504 PARAMETER Experiment Name: Zm_Drought_P Parameter: Tissue Value: Aerial
  misc_feature: MA Experiment 108504 PARAMETER Experiment Name: Zm_Drought_P Parameter: Treatment Value: Drought vs. No Drought
  misc_feature: MA Experiment ID: 108535 Result: Up-regulated in Transcription
  misc_feature: MA Experiment 108535 PARAMETER Experiment Name: Zm_Meristem_P Parameter: Age (day) Value: 8
  misc_feature: MA Experiment 108535 PARAMETER Experiment Name: Zm_Meristem_P Parameter: Organism Value: Zea mays
  misc_feature: MA Experiment 108535 PARAMETER Experiment Name: Zm_Meristem_P Parameter: Plant Line Value: 35A19
  misc_feature: MA Experiment 108535 PARAMETER Experiment Name: Zm_Meristem_P Parameter: Tissue Value: Root Meristem vs. Above Root Meristem
  misc_feature: MA Experiment ID: 108540 Result: Down-regulated in Transcription
  misc_feature: MA Experiment 108540 PARAMETER Experiment Name: Zm_20percent_PEG_P Parameter: Age (day) Value: 8
  misc_feature: MA Experiment 108540 PARAMETER Experiment Name: Zm_20percent_PEG_P Parameter: Organism Value: Zea mays
  misc_feature: MA Experiment 108540 PARAMETER Experiment Name: Zm_20percent_PEG_P Parameter: Plant Line Value: 35A19
  misc_feature: MA Experiment 108540 PARAMETER Experiment Name: Zm_20percent_PEG_P Parameter: Timepoint (hr) Value: 6
  misc_feature: MA Experiment 108540 PARAMETER Experiment Name: Zm_20percent_PEG_P Parameter: Tissue Value: Aerial
  misc_feature: MA Experiment 108540 PARAMETER Experiment Name: Zm_20percent_PEG_P Parameter: Treatment Value: 20percent PEG vs. No Treatment
  misc_feature: MA Experiment ID: 108544 Result: Down-regulated in Transcription
  misc_feature: MA Experiment ID: 108556 Result: Down-regulated in Transcription
  misc_feature: MA Experiment 108556 PARAMETER Experiment Name: Zm_Drought_P Parameter: Age (day) Value: 9
  misc_feature: MA Experiment 108556 PARAMETER Experiment Name: Zm_Drought_P Parameter: Organism Value: Zea mays
  misc_feature: MA Experiment 108556 PARAMETER Experiment Name: Zm_Drought_P Parameter: Plant Line Value: 35A19
  misc_feature: MA Experiment 108556 PARAMETER Experiment Name: Zm_Drought_P Parameter: Timepoint (hr) Value: 24
  misc_feature: MA Experiment 108556 PARAMETER Experiment Name: Zm_Drought_P Parameter: Tissue Value: Aerial
  misc_feature: MA Experiment 108556 PARAMETER Experiment Name: Zm_Drought_P Parameter: Treatment Value: Drought vs. No Drought
  misc_feature: MA Experiment ID: 108597 Result: Down-regulated in Transcription
  misc_feature: MA Experiment 108597 PARAMETER Experiment Name: Zm_100uM_ABA_P Parameter: Age (day) Value: 9
  misc_feature: MA Experiment 108597 PARAMETER Experiment Name: Zm_100uM_ABA_P Parameter: Organism Value: Zea mays
  misc_feature: MA Experiment 108597 PARAMETER Experiment Name: Zm_100uM_ABA_P Parameter: Plant Line Value: 35A19
  misc_feature: MA Experiment 108597 PARAMETER Experiment Name: Zm_100uM_ABA_P Parameter: Timepoint (hr) Value: 24
  misc_feature: MA Experiment 108597 PARAMETER Experiment Name: Zm_100uM_ABA_P Parameter: Tissue Value: Aerial
  misc_feature: MA Experiment 108597 PARAMETER Experiment Name: Zm_100uM_ABA_P Parameter: Treatment Value: 100uM ABA vs. No Treatment
  misc_feature: MA Experiment ID: 108689 Result: Down-regulated in Transcription
  misc_feature: MA Experiment 108689 PARAMETER Experiment Name: Zm_Drought_Roots_P Parameter: Age (day) Value: 9
  misc_feature: MA Experiment 108689 PARAMETER Experiment Name: Zm_Drought_Roots_P Parameter: Organism Value: Zea mays
  misc_feature: MA Experiment 108689 PARAMETER Experiment Name: Zm_Drought_Roots_P Parameter: Plant Line Value: 35A19
  misc_feature: MA Experiment 108689 PARAMETER Experiment Name: Zm_Drought_Roots_P Parameter: Timepoint (hr) Value: 24
  misc_feature: MA Experiment 108689 PARAMETER Experiment Name: Zm_Drought_Roots_P Parameter: Tissue Value: Roots
  misc_feature: MA Experiment 108689 PARAMETER Experiment Name: Zm_Drought_Roots_P Parameter: Treatment Value: Drought vs. No Drought
  misc_feature: MA Experiment ID: 20000108 Result: Up-regulated in Transcription
  misc_feature: MA Experiment 20000108 PARAMETER Experiment Name: Zm_Root-Tips_P Parameter: Age (day) Value: 12
  misc_feature: MA Experiment 20000108 PARAMETER Experiment Name: Zm_Root-Tips_P Parameter: Organism Value: Zea mays
  misc_feature: MA Experiment 20000108 PARAMETER Experiment Name: Zm_Root-Tips_P Parameter: Tissue Value: Root tips vs. Root mid region    35
  misc_feature: MA Experiment 20000108 PARAMETER Experiment Name: Zm_Root-Tips_P Parameter: Tissue Value: Root tips vs. Root mid region   Sequence Listing-Misc Features (4)
  misc_feature: MA Experiment ID: 20000477 Result: Down-regulated in Transcription
  misc_feature: MA Experiment 20000477 PARAMETER Experiment Name: Zm_5mM_SA_P Parameter: Age (day) Value: 10
  misc_feature: MA Experiment 20000477 PARAMETER Experiment Name: Zm_5mM_SA_P Parameter: Organism Value: Zea mays
  misc_feature: MA Experiment 20000477 PARAMETER Experiment Name: Zm_5mM_SA_P Parameter: Plant Line Value: 35A19
  misc_feature: MA Experiment 20000477 PARAMETER Experiment Name: Zm_5mM_SA_P Parameter: Timepoint (hr) Value: 48
  misc_feature: MA Experiment 20000477 PARAMETER Experiment Name: Zm_5mM_SA_P Parameter: Tissue Value: Aerial
  misc_feature: MA Experiment 20000477 PARAMETER Experiment Name: Zm_5mM_SA_P Parameter: Treatment Value: 5mM SA vs. No Treatment
  misc_feature: MA Experiment ID: 20000478 Result: Down-regulated in Transcription
  misc_feature: MA Experiment 20000478 PARAMETER Experiment Name: Zm_5mM_SA_P Parameter: Age (day) Value: 11
  misc_feature: MA Experiment 20000478 PARAMETER Experiment Name: Zm_5mM_SA_P Parameter: Organism Value: Zea mays
  misc_feature: MA Experiment 20000478 PARAMETER Experiment Name: Zm_5mM_SA_P Parameter: Plant Line Value: 35A19
  misc_feature: MA Experiment 20000478 PARAMETER Experiment Name: Zm_5mM_SA_P Parameter: Timepoint (hr) Value: 72
  misc_feature: MA Experiment 20000478 PARAMETER Experiment Name: Zm_5mM_SA_P Parameter: Tissue Value: Aerial
  misc_feature: MA Experiment 20000478 PARAMETER Experiment Name: Zm_5mM_SA_P Parameter: Treatment Value: 5mM SA vs. No Treatment
  misc_feature: MA Experiment ID: 20000479 Result: Down-regulated in Transcription
  misc_feature: MA Experiment 20000479 PARAMETER Experiment Name: Zm_Drought_P Parameter: Age (day) Value: 10
  misc_feature: MA Experiment 20000479 PARAMETER Experiment Name: Zm_Drought_P Parameter: Organism Value: Zea mays
  misc_feature: MA Experiment 20000479 PARAMETER Experiment Name: Zm_Drought_P Parameter: Plant Line Value: 35A19
  misc_feature: MA Experiment 20000479 PARAMETER Experiment Name: Zm_Drought_P Parameter: Timepoint (hr) Value: 48
  misc_feature: MA Experiment 20000479 PARAMETER Experiment Name: Zm_Drought_P Parameter: Tissue Value: Aerial
  misc_feature: MA Experiment 20000479 PARAMETER Experiment Name: Zm_Drought_P Parameter: Treatment Value: Drought vs. No Drought
  misc_feature: MA Experiment ID: 20000480 Result: Down-regulated in Transcription
  misc_feature: MA Experiment 20000480 PARAMETER Experiment Name: Zm_Drought_P Parameter: Age (day) Value: 11
  misc_feature: MA Experiment 20000480 PARAMETER Experiment Name: Zm_Drought_P Parameter: Organism Value: Zea mays
  misc_feature: MA Experiment 20000480 PARAMETER Experiment Name: Zm_Drought_P Parameter: Plant Line Value: 35A19
  misc_feature: MA Experiment 20000480 PARAMETER Experiment Name: Zm_Drought_P Parameter: Timepoint (hr) Value: 72
  misc_feature: MA Experiment 20000480 PARAMETER Experiment Name: Zm_Drought_P Parameter: Tissue Value: Aerial
  misc_feature: MA Experiment 20000480 PARAMETER Experiment Name: Zm_Drought_P Parameter: Treatment Value: Drought vs. No Drought
  misc_feature: MA Experiment ID: 20000492 Result: Up-regulated in Transcription
  misc_feature: MA Experiment 20000492 PARAMETER Experiment Name: Zm_Hybrid_Seed_Dev_P Parameter: DAP Value: 12
  misc_feature: MA Experiment 20000492 PARAMETER Experiment Name: Zm_Hybrid_Seed_Dev_P Parameter: Organism Value: Zea mays
  misc_feature: MA Experiment 20000492 PARAMETER Experiment Name: Zm_Hybrid_Seed_Dev_P Parameter: Plant Line Value: 35A19
  misc_feature: MA Experiment 20000492 PARAMETER Experiment Name: Zm_Hybrid_Seed_Dev_P Parameter: Tissue Value: Fert Kernel vs. Unfert Floret
  misc_feature: MA Experiment ID: 20000626 Result: Down-regulated in Transcription
  misc_feature: MA Experiment 20000626 PARAMETER Experiment Name: Zm_Herbicide-Treatments_P Parameter: Timepoint (hr) Value: 12
  misc_feature: MA Experiment 20000626 PARAMETER Experiment Name: Zm_Herbicide-Treatments_P Parameter: Tissue Value: Aerial
  misc_feature: MA Experiment 20000626 PARAMETER Experiment Name: Zm_Herbicide-Treatments_P Parameter: Treatment Value: Roundup vs. No Treatment
  misc_feature: MA Experiment ID: 20000632 Result: Down-regulated in Transcription
  misc_feature: MA Experiment 20000632 PARAMETER Experiment Name: Zm_Herbicide-Treatments_P Parameter: Timepoint (hr) Value: 4
  misc_feature: MA Experiment 20000632 PARAMETER Experiment Name: Zm_Herbicide-Treatments_P Parameter: Tissue Value: Aerial
  misc_feature: MA Experiment 20000632 PARAMETER Experiment Name: Zm_Herbicide-Treatments_P Parameter: Treatment Value: Glean vs. No Treatment
agatcactggcagtcgcaagtagcaacccgcatcacgagttcacccacgctccccgcacagctcactagcgaccagggagttcaaacaagaggcaacaagaacgaacgccaccaccgcgctccggtcgctttgcttggttcgggccactgcaccgccattgttgatctgttctccttctccttggaggagaaagaagagggggagaggaatgatggggcggacgagcgtggcggcggcggcggccctgctggtgctggcggcgtgcgcggctctgccggcgagaacggcggcgaacaagatcagcatcaactggaagcccaacgtgaactacaccgactggctgaagcagcacagccccttctacaaggacgactggctggtgttctactacacggcggggcaggcggacgtggtgcaggtggacgaggtgggctacaacaagtgcgactccaccaacgccatctacaactacagcaaggggcgcagcttcgccttccagctcaacgagaccaagacctactacttcatctgcagctacggctactgcttcggcgggatgcgcctcgccatcaaggccgagaagttgccgccgccgtcgccgccgccgtccgccagcgaccgctccgccgccgccatcgccgccttcgccaggtcccacgcgcccgtcatctacgccgccgtcgccgtgctcgccgcgctgctcaggatggtctagctgggaagaatctacccgccggcccctttgttggttcgaattgggactccttttttttgttcgttcagcctctccatcttttccgtagtgtgcttgggctctcgagaggagcagtagctggtgctggagtgctgcgttgggttcattaattaattagcggtgtggatttgccgaagcgattgattgagctgagattgatttttcaagtgtgaagaactctagctgccttgctgaattaaagtaactccagccttttcgt

SEQ ID NO: 16426 - protein, 287 aa, Zea mays subsp. mays
  peptide (1)..(287): Ceres Seq. ID no. 12373005
DHWQSQVATRITSSPTLPAQLTSDQGVQTRGNKNERHHRAPVALLGSGHCTAIVDLFSFSLEEKEEGERNDGADERGGGGGPAGAGGVRGSAGENGGEQDQHQLEAQRELHRLAEAAQPLLQGRLAGVLLHGGAGGRGAGGRGGLQQVRLHQRHLQLQQGAQLRLPAQRDQDLLLHLQLRLLLRRDAPRHQGREVAAAVAAAVRQRPLRRRHRRLRQVPRARHLRRRRRARRAAQDGLAGKNLPAGPFVGSNWDSFFLFVQPLHLFRSVLGLSRGAVAGAGVLRWVH

SEQ ID NO: 16427 - protein, 168 aa, Zea mays subsp. mays
  peptide (1)..(168): Ceres Seq. ID no. 12373006
  misc_feature (35)..(117): Pfam Name: Plastocyanin-like domain Pfam Description: Plastocyanin-like domain
  misc_feature (2)..(130): Homolog of NCBI NO: 2129631 NR Description: blue copper-binding protein, 15K - Arabidopsis
  misc_feature (2)..(135): Homolog of NCBI NO: 15235520 NR Description: blue copper-binding protein, 15K (lamin)
  misc_feature (2)..(144): Homolog of NCBI NO: 25282797 NR Description: blue copper-binding protein lamin - wild cabbage
  misc_feature (2)..(144): Homolog of NCBI NO: 24417322 NR Description: unknown [Arabidopsis thaliana]
  misc_feature (2)..(167): Homolog of NCBI NO: 15242279 NR Description: putative protein
  misc_feature (2)..(158): Homolog of NCBI NO: 15232035 NR Description: putative lamin; protein id: At3g01070.1,
  misc_feature (2)..(158): Homolog of NCBI NO: 21594180 NR Description: putative lamin [Arabidopsis thaliana]
  misc_feature (14)..(168): Homolog of NCBI NO: 34915266 NR Description: contains EST AU197337(E30403)~similar to blue
  misc_feature (14)..(168): Homolog of NCBI NO: 38175738 NR Description: blue copper-binding protein-like
  misc_feature (11)..(167): Homolog of NCBI NO: 13236660 NR Description: putative blue copper-binding protein [Oryza
MMGRTSVAAAAALLVLAACAALPARTAANKISINWKPNVNYTDWLKQHSPFYKDDWLVFYYTAGQADVVQVDEVGYNKCDSTNAIYNYSKGRSFAFQLNETKTYYFICSYGYCFGGMRLAIKAEKLPPPSPPPSASDRSAAAIAAFARSHAPVIYAAVAVLAALLRMV

SEQ ID NO: 16428 - protein, 167 aa, Zea mays subsp. mays
  peptide (1)..(167): Ceres Seq. ID no. 12373007
  misc_feature (34)..(116): Pfam Name: Plastocyanin-like domain Pfam Description: Plastocyanin-like domain
  misc_feature (1)..(129): Homolog of NCBI NO: 2129631 NR Description: blue copper-binding protein, 15K - Arabidopsis
  misc_feature (1)..(134): Homolog of NCBI NO: 15235520 NR Description: blue copper-binding protein, 15K (lamin)
  misc_feature (1)..(143): Homolog of NCBI NO: 25282797 NR Description: blue copper-binding protein lamin - wild cabbage
  misc_feature (1)..(143): Homolog of NCBI NO: 24417322 NR Description: unknown [Arabidopsis thaliana]
  misc_feature (1)..(166): Homolog of NCBI NO: 15242279 NR Description: putative protein
  misc_feature (1)..(157): Homolog of NCBI NO: 15232035 NR Description: putative lamin; protein id: At3g01070.1,
  misc_feature (1)..(157): Homolog of NCBI NO: 21594180 NR Description: putative lamin [Arabidopsis thaliana]
  misc_feature (13)..(167): Homolog of NCBI NO: 34915266 NR Description: contains EST AU197337(E30403)~similar to blue
  misc_feature (13)..(167): Homolog of NCBI NO: 38175738 NR Description: blue copper-binding protein-like
  misc_feature (10)..(166): Homolog of NCBI NO: 13236660 NR Description: putative blue copper-binding protein [Oryza
MGRTSVAAAAALLVLAACAALPARTAANKISINWKPNVNYTDWLKQHSPFYKDDWLVFYYTAGQADVVQVDEVGYNKCDSTNAIYNYSKGRSFAFQLNETKTYYFICSYGYCFGGMRLAIKAEKLPPPSPPPSASDRSAAAIAAFARSHAPVIYAAVAVLAALLRMV

SEQ ID NO: 16429 - DNA, 1685 bp, Zea mays subsp. mays
  misc_feature (1)..(1685): Ceres Seq. ID no. 12350656
  misc_feature: MA Experiment ID: 108528 Result: Down-regulated in Transcription
  misc_feature: MA Experiment 108528 PARAMETER Experiment Name: Zm_Imbibed_Seeds_P Parameter: Age (day) Value: 5 vs. 2
  misc_feature: MA Experiment 108528 PARAMETER Experiment Name: Zm_Imbibed_Seeds_P Parameter: Organism Value: Zea mays
  misc_feature: MA Experiment 108528 PARAMETER Experiment Name: Zm_Imbibed_Seeds_P Parameter: Plant Line Value: 35A19
  misc_feature: MA Experiment 108528 PARAMETER Experiment Name: Zm_Imbibed_Seeds_P Parameter: Tissue Value: Aerial vs. Embryo
  misc_feature: MA Experiment ID: 108543 Result: Up-regulated in Transcription
  misc_feature: MA Experiment ID: 20000477 Result: Up-regulated in Transcription
  misc_feature: MA Experiment 20000477 PARAMETER Experiment Name: Zm_5mM_SA_P Parameter: Age (day) Value: 10
  misc_feature: MA Experiment 20000477 PARAMETER Experiment Name: Zm_5mM_SA_P Parameter: Organism Value: Zea mays
  misc_feature: MA Experiment 20000477 PARAMETER Experiment Name: Zm_5mM_SA_P Parameter: Plant Line Value: 35A19
  misc_feature: MA Experiment 20000477 PARAMETER Experiment Name: Zm_5mM_SA_P Parameter: Timepoint (hr) Value: 48
  misc_feature: MA Experiment 20000477 PARAMETER Experiment Name: Zm_5mM_SA_P Parameter: Tissue Value: Aerial
  misc_feature: MA Experiment 20000477 PARAMETER Experiment Name: Zm_5mM_SA_P Parameter: Treatment Value: 5mM SA vs. No Treatment
  misc_feature: MA Experiment ID: 20000492 Result: Down-regulated in Transcription
  misc_feature: MA Experiment 20000492 PARAMETER Experiment Name: Zm_Hybrid_Seed_Dev_P Parameter: DAP Value: 12
  misc_feature: MA Experiment 20000492 PARAMETER Experiment Name: Zm_Hybrid_Seed_Dev_P Parameter: Organism Value: Zea mays
  misc_feature: MA Experiment 20000492 PARAMETER Experiment Name: Zm_Hybrid_Seed_Dev_P Parameter: Plant Line Value: 35A19
  misc_feature: MA Experiment 20000492 PARAMETER Experiment Name: Zm_Hybrid_Seed_Dev_P Parameter: Tissue Value: Fert Kernel vs. Unfert Floret
atagtcattttagcttgtgcacgctttgctgctctaaggtttaccgggcaaacactggacgacaggtgaacggggatgcacagttaggagattgagggagcgagaagggagggaggcaaaggagacagcatatgggatgtatttacagatgacaaagaacatgtcttagacagaagcaatggagaaattgcagttgatcactaccatcgatacaaggaagacattgagctcatggcaagtctaggttttagcgcatacagattttctatatcttgggcgcgtatatttcctgatggcttggggggaaaggtcaatgatcaaggagtcgccttctataatgacctcatcaactttatgatttcgaaaggtattgagccttacgcaactctatatcattgggatcttccaaacaatcttcagaagactctggggggctggatttctgacaagattgtggagtactttgcattgtatgcagaagcttgctttgcaaattttggagacagagtaaagcattggataacaatcaatgaacctctccaaactgcaatcaatggttatgggattggaatttttgcacctggaggatgccaaggtgaaactgctagatgttacttggctgcccatcaccaaatcttggctcatgctgctgctgttgatgtttatagaagaaaattcaaggctgcacaaggtggtgaagtagggttggttgttgattgtgaatgggcagagccattttctgaaaatgtggaagaccaaattgctgcacagcggaggcttgactttcaacttggatggtacttagatccaatatattttggtgattacccagaaagcatgcgtcaacgactgggcagtgatcttccaaccttctcagagaaagataaagagttcatgaggaacaaaattgattttgttggagtaaatcattatacttcaagactcattgctcatctccaaaatccaaacgatgtttatttctaccaagtgcaacaaatggagcgaatagaaaaatggaatagtggtgaaaaaattggtgaaagggctgcatctgaatggcttttcatagttccttggggccttcataagtcacttaattatatagcgaagaagtacaataatccagcaatttatgttactgagaatggcatggatgaagaggacgatcaatccgcaacgcttgaccaggtcctaaacgacacgacgagggtcggttacttcaaagggtacctcaattcagttgcgcaagcgatcaaggacggagctgatgtccgcgggtactttgcgtggtcgttcctggacaacttcgagtgggcaatgggctacaccaagaggttcggcatagtctacgtggactacaagaaggggctgtccaggcacccgaaagcatcggcgctgtggttctcgcgcttgctcaagggcgaggctggcactggcacaagctgagcgaactgcacgcagcatgcaagcacagaacgtcgtcgttattacaatataaatattccacacaactagacgttttctcctgttgttgtatcgtactactgtacagtaagcgccaataagctagcctcagatgtgtgctgcctgcctatacctctagtggctgccattgatccagcactagctgaaatgtacccggcctccaagaatcagcaccagaatatatgctttgaattgaactc

SEQ ID NO: 16430 - protein, 404 aa, Zea mays subsp. mays
  peptide (1)..(404): Ceres Seq. ID no. 12350657
  misc_feature (1)..(396): Homolog of NCBI NO: 7435445 NR Description: beta-glucosidase (EC 3.2.1.21) precursor isoform
  misc_feature (1)..(396): Homolog of NCBI NO: 18875458 NR Description: beta-glucosidase [Oryza sativa]
  misc_feature (1)..(396): Homolog of NCBI NO: 16757966 NR Description: amygdalin hydrolase isoform AH I precursor
  misc_feature (1)..(396): Homolog of NCBI NO: 15229584 NR Description: glycosyl hydrolase family 1
  misc_feature (1)..(401): Homolog of NCBI NO: 6979913 NR Description: prunasin hydrolase isoform PHA precursor [Prunus
  misc_feature (1)..(401): Homolog of NCBI NO: 15778431 NR Description: prunasin hydrolase isoform PH A precursor [Prunus
  misc_feature (1)..(396): Homolog of NCBI NO: 22658440 NR Description: beta-glucosidase [Oryza sativa (japonica
  misc_feature (1)..(398): Homolog of NCBI NO: 22327412 NR Description: glycosyl hydrolase family 1; protein id:
  misc_feature (1)..(400): Homolog of NCBI NO: 31580730 NR Description: latex cyanogenic beta glucosidase [Hevea
  misc_feature (1)..(398): Homolog of NCBI NO: 34907636 NR Description: putative beta-glucosidase
MASLGFSAYRFSISWARIFPDGLGGKVNDQGVAFYNDLINFMISKGIEPYATLYHWDLPNNLQKTLGGWISDKIVEYFALYAEACFANFGDRVKHWITINEPLQTAINGYGIGIFAPGGCQGETARCYLAAHHQILAHAAAVDVYRRKFKAAQGGEVGLVVDCEWAEPFSENVEDQIAAQRRLDFQLGWYLDPIYFGDYPESMRQRLGSDLPTFSEKDKEFMRNKIDFVGVNHYTSRLIAHLQNPNDVYFYQVQQMERIEKWNSGEKIGERAASEWLFIVPWGLHKSLNYIAKKYNNPAIYVTENGMDEEDDQSATLDQVLNDTTRVGYFKGYLNSVAQAIKDGADVRGYFAWSFLDNFEWAMGYTKRFGIVYVDYKKGLSRHPKASALWFSRLLKGEAGTGTS

SEQ ID NO: 16431 - protein, 363 aa, Zea mays subsp. mays
  peptide (1)..(363): Ceres Seq. ID no. 12350658
  misc_feature (1)..(359): Homolog of NCBI NO: 31580730 NR Description: latex cyanogenic beta glucosidase [Hevea
  misc_feature (1)..(357): Homolog of NCBI NO: 34907636 NR Description: putative beta-glucosidase
  misc_feature (1)..(355): Homolog of NCBI NO: 7435445 NR Description: beta-glucosidase (EC 3.2.1.21) precursor isoform
  misc_feature (1)..(355): Homolog of NCBI NO: 18875458 NR Description: beta-glucosidase [Oryza sativa]
  misc_feature (1)..(355): Homolog of NCBI NO: 16757966 NR Description: amygdalin hydrolase isoform AH I precursor
  misc_feature (1)..(355): Homolog of NCBI NO: 15229584 NR Description: glycosyl hydrolase family 1
  misc_feature (1)..(360): Homolog of NCBI NO: 6979913 NR Description: prunasin hydrolase isoform PHA precursor [Prunus
  misc_feature (1)..(360): Homolog of NCBI NO: 15778431 NR Description: prunasin hydrolase isoform PH A precursor [Prunus
  misc_feature (1)..(355): Homolog of NCBI NO: 22658440 NR Description: beta-glucosidase [Oryza sativa (japonica
  misc_feature (1)..(357): Homolog of NCBI NO: 22327412 NR Description: glycosyl hydrolase family 1; protein id:
MISKGIEPYATLYHWDLPNNLQKTLGGWISDKIVEYFALYAEACFANFGDRVKHWITINEPLQTAINGYGIGIFAPGGCQGETARCYLAAHHQILAHAAAVDVYRRKFKAAQGGEVGLVVDCEWAEPFSENVEDQIAAQRRLDFQLGWYLDPIYFGDYPESMRQRLGSDLPTFSEKDKEFMRNKIDFVGVNHYTSRLIAHLQNPNDVYFYQVQQMERIEKWNSGEKIGERAASEWLFIVPWGLHKSLNYIAKKYNNPAIYVTENGMDEEDDQSATLDQVLNDTTRVGYFKGYLNSVAQAIKDGADVRGYFAWSFLDNFEWAMGYTKRFGIVYVDYKKGLSRHPKASALWFSRLLKGEAGTGTS

SEQ ID NO: 16432 - protein, 202 aa, Zea mays subsp. mays
  peptide (1)..(202): Ceres Seq. ID no. 12350659
  misc_feature (1)..(194): Homolog of NCBI NO: 7435445 NR Description: beta-glucosidase (EC 3.2.1.21) precursor isoform
  misc_feature (1)..(194): Homolog of NCBI NO: 18875458 NR Description: beta-glucosidase [Oryza sativa]
  misc_feature (1)..(194): Homolog of NCBI NO: 16757966 NR Description: amygdalin hydrolase isoform AH I precursor
  misc_feature (1)..(194): Homolog of NCBI NO: 15229584 NR Description: glycosyl hydrolase family 1
  misc_feature (1)..(199): Homolog of NCBI NO: 6979913 NR Description: prunasin hydrolase isoform PHA precursor [Prunus
  misc_feature (1)..(199): Homolog of NCBI NO: 15778431 NR Description: prunasin hydrolase isoform PH A precursor [Prunus
  misc_feature (1)..(194): Homolog of NCBI NO: 22658440 NR Description: beta-glucosidase [Oryza sativa (japonica
  misc_feature (1)..(196): Homolog of NCBI NO: 22327412 NR Description: glycosyl hydrolase family 1; protein id:
  misc_feature (1)..(198): Homolog of NCBI NO: 31580730 NR Description: latex cyanogenic beta glucosidase [Hevea
  misc_feature (1)..(196): Homolog of NCBI NO: 34907636 NR Description: putative beta-glucosidase
MRQRLGSDLPTFSEKDKEFMRNKIDFVGVNHYTSRLIAHLQNPNDVYFYQVQQMERIEKWNSGEKIGERAASEWLFIVPWGLHKSLNYIAKKYNNPAIYVTENGMDEEDDQSATLDQVLNDTTRVGYFKGYLNSVAQAIKDGADVRGYFAWSFLDNFEWAMGYTKRFGIVYVDYKKGLSRHPKASALWFSRLLKGEAGTGTS

SEQ ID NO: 16433 - DNA, 1253 bp, Zea mays subsp. mays
  misc_feature (1)..(1253): Ceres Seq. ID no. 12354559
  misc_feature: MA Experiment ID: 108527 Result: Up-regulated in Transcription
  misc_feature: MA Experiment 108527 PARAMETER Experiment Name: Zm_5mM_NO_P Parameter: Age (day) Value: 8
  misc_feature: MA Experiment 108527 PARAMETER Experiment Name: Zm_5mM_NO_P Parameter: Organism Value: Zea mays
  misc_feature: MA Experiment 108527 PARAMETER Experiment Name: Zm_5mM_NO_P Parameter: Plant Line Value: 35A19
  misc_feature: MA Experiment 108527 PARAMETER Experiment Name: Zm_5mM_NO_P Parameter: Timepoint (hr) Value: 6
  misc_feature: MA Experiment 108527 PARAMETER Experiment Name: Zm_5mM_NO_P Parameter: Tissue Value: Aerial
  misc_feature: MA Experiment 108527 PARAMETER Experiment Name: Zm_5mM_NO_P Parameter: Treatment Value: 5mM NO vs. No Treatment
  misc_feature: MA Experiment ID: 108528 Result: Down-regulated in Transcription
  misc_feature: MA Experiment 108528 PARAMETER Experiment Name: Zm_Imbibed_Seeds_P Parameter: Age (day) Value: 5 vs. 2
  misc_feature: MA Experiment 108528 PARAMETER Experiment Name: Zm_Imbibed_Seeds_P Parameter: Organism Value: Zea mays
  misc_feature: MA Experiment 108528 PARAMETER Experiment Name: Zm_Imbibed_Seeds_P Parameter: Plant Line Value: 35A19
  misc_feature: MA Experiment 108528 PARAMETER Experiment Name: Zm_Imbibed_Seeds_P Parameter: Tissue Value: Aerial vs. Embryo
  misc_feature: MA Experiment ID: 108536 Result: Up-regulated in Transcription
  misc_feature: MA Experiment 108536 PARAMETER Experiment Name: Zm_Meristem_P Parameter: Age (day) Value: 8
  misc_feature: MA Experiment 108536 PARAMETER Experiment Name: Zm_Meristem_P Parameter: Organism Value: Zea mays
  misc_feature: MA Experiment 108536 PARAMETER Experiment Name: Zm_Meristem_P Parameter: Plant Line Value: 35A19
  misc_feature: MA Experiment 108536 PARAMETER Experiment Name: Zm_Meristem_P Parameter: Tissue Value: Shoot Meristem vs. Above Shoot Meristem
  misc_feature: MA Experiment ID: 108544 Result: Up-regulated in Transcription
  misc_feature: MA Experiment ID: 108545 Result: Down-regulated in Transcription
  misc_feature: MA Experiment 108545 PARAMETER Experiment Name: Zm_Imbibed_Seeds_P Parameter: Age (day) Value: 3 vs. 2
  misc_feature: MA Experiment 108545 PARAMETER Experiment Name: Zm_Imbibed_Seeds_P Parameter: Organism Value: Zea mays
  misc_feature: MA Experiment 108545 PARAMETER Experiment Name: Zm_Imbibed_Seeds_P Parameter: Plant Line Value: 35A19
  misc_feature: MA Experiment 108545 PARAMETER Experiment Name: Zm_Imbibed_Seeds_P Parameter: Tissue Value: Aerial vs. Embryo
  misc_feature: MA Experiment ID: 108547 Result: Down-regulated in Transcription
  misc_feature: MA Experiment 108547 PARAMETER Experiment Name: Zm_Imbibed_Seeds_P Parameter: Age (day) Value: 4 vs. 2
  misc_feature: MA Experiment 108547 PARAMETER Experiment Name: Zm_Imbibed_Seeds_P Parameter: Organism Value: Zea mays
  misc_feature: MA Experiment 108547 PARAMETER Experiment Name: Zm_Imbibed_Seeds_P Parameter: Plant Line Value: 35A19
  misc_feature: MA Experiment 108547 PARAMETER Experiment Name: Zm_Imbibed_Seeds_P Parameter: Tissue Value: Aerial vs. Embryo
  misc_feature: MA Experiment ID: 108559 Result: Up-regulated in Transcription
  misc_feature: MA Experiment 108559 PARAMETER Experiment Name: Zm_5mM_NO_P Parameter: Age (day) Value: 8
  misc_feature: MA Experiment 108559 PARAMETER Experiment Name: Zm_5mM_NO_P Parameter: Organism Value: Zea mays
  misc_feature: MA Experiment 108559 PARAMETER Experiment Name: Zm_5mM_NO_P Parameter: Plant Line Value: 35A19
  misc_feature: MA Experiment 108559 PARAMETER Experiment Name: Zm_5mM_NO_P Parameter: Timepoint (hr) Value: 12
  misc_feature: MA Experiment 108559 PARAMETER Experiment Name: Zm_5mM_NO_P Parameter: Tissue Value: Aerial
  misc_feature: MA Experiment 108559 PARAMETER Experiment Name: Zm_5mM_NO_P Parameter: Treatment Value: 5mM NO vs. No Treatment
  misc_feature: MA Experiment ID: 20000492 Result: Up-regulated in Transcription
  misc_feature: MA Experiment 20000492 PARAMETER Experiment Name: Zm_Hybrid_Seed_Dev_P Parameter: DAP Value: 12
  misc_feature: MA Experiment 20000492 PARAMETER Experiment Name: Zm_Hybrid_Seed_Dev_P Parameter: Organism Value: Zea mays
  misc_feature: MA Experiment 20000492 PARAMETER Experiment Name: Zm_Hybrid_Seed_Dev_P Parameter: Plant Line Value: 35A19
  misc_feature: MA Experiment 20000492 PARAMETER Experiment Name: Zm_Hybrid_Seed_Dev_P Parameter: Tissue Value: Fert Kernel vs. Unfert Floret
atgaaggcgccgcgccggcgtgggggcatcgatagccgcgccggtgatacggcgcaccgccctgctcgcccagcggattcggtgcggcagacgtacgcggacagccggacccggacgcgatgcgaagtgcgaacccccaaaatattccacttgtcttcccccctcgtcgacccacggaaccttcgactcctcgccactggagtggctggctacctccaattcagcacgtaaagaaagcaaaccgcccgcagttccgttccgcaagaccagatcgcccgcttttctcctccggtcctctcctccctccccttgagccctgatcgaatcgatccacggtgccggcggacgcctcgcccccttcagttccatccaatccacgagtgaacagatggcgtcgcagtgggctgctccgccgccgggctactcggccgggcacgggcaggcgtacggcgaccagcagctggccacgccgccgcctcaggcagcgacggccgtggccgtgacggcggcgagcaacggcgtgggcaacccctacgtcgtcgtcacccccgcgtctgccgcaccgtccacctgccagaccgtcaggaaggcgctgggccgctacggcaagctgctcgaggacggaacccgcaaggccgccgacgccaccggcaacatctggcaccacctccggacggcgccgaacatggcggacgcggcggtggcgcggctgacgcaggggaccaaggtgtacgcggagggcggccacgacagggtgttctacccagacgttcggcgccatgcccggggagcagctccgcaaggcctacgcctgctacctctccacctcctcgggccccgtcatcggcacgctctacctctccacggcgcgcctcgccttctgcagcgacagcccgctctgctaccagggccctgccggccagccgcacgagtgcatgtactacaaggtggtgcttcctctgagccaggtgacatccgtgaacccttcttccagcatgcgcaaccgggcagaaaggtacattcagatcaggaccatggataaccacgagttctggttcatggggttcgtgaactacgacaaggccctcaagaatctcaacgaggccctgcagcaccgcgatgtcagcggccaccagcgctgctgatgctgatcaggcttcggttaggcactacagtcctactgctacttatttagttcatgatgaactgtgatacctttatcttatttgatgttcttgatgaataagagaacc

SEQ ID NO: 16434 - protein, 217 aa, Zea mays subsp. mays
  peptide (1)..(217): Ceres Seq. ID no. 12354560
  misc_feature (51)..(124): Homolog of NCBI NO: 20271007 NR Description: putative ABA-binding protein [Arabidopsis lyrata
  misc_feature (1)..(124): Homolog of NCBI NO: 11281146 NR Description: ABA-responsive protein - barley
  misc_feature (33)..(124): Homolog of NCBI NO: 15234255 NR Description: putative ABA-repsonsive protein; protein id:
  misc_feature (8)..(124): Homolog of NCBI NO: 15240044 NR Description: ABA-responsive protein - like; protein id:
  misc_feature (1)..(125): Homolog of NCBI NO: 34906818 NR Description: contains EST C91668(E31216)~similar to FH protein
  misc_feature (40)..(124): Homolog of NCBI NO: 26452129 NR Description: unknown protein [Arabidopsis thaliana]
  misc_feature (40)..(124): Homolog of NCBI NO: 21592789 NR Description: unknown [Arabidopsis thaliana]
  misc_feature (40)..(124): Homolog of NCBI NO: 18399985 NR Description: Expressed protein
  misc_feature (6)..(124): Homolog of NCBI NO: 15217869 NR Description: FH protein interacting protein FIP1
  misc_feature (1)..(124): Homolog of NCBI NO: 29788871 NR Description: putative ABA-responsive protein
MASQWAAPPPGYSAGHGQAYGDQQLATPPPQAATAVAVTAASNGVGNPYVVVTPASAAPSTCQTVRKALGRYGKLLEDGTRKAADATGNIWHHLRTAPNMADAAVARLTQGTKVYAEGGHDRVFYPDVRRHARGAAPQGLRLLPLHLLGPRHRHALPLHGAPRLLQRQPALLPGPCRPAARVHVLQGGASSEPGDIREPFFQHAQPGRKVHSDQDHG

SEQ ID NO: 16435 - protein, 121 aa, Zea mays subsp. mays
  peptide (1)..(121): Ceres Seq. ID no. 12354561
  misc_feature (1)..(71): Pfam Name: GRAM domain Pfam Description: GRAM domain
  misc_feature (1)..(118): Homolog of NCBI NO: 33146631 NR Description: putative FH protein interacting protein FIP1
  misc_feature (1)..(111): Homolog of NCBI NO: 34902414 NR Description: Putative FH protein interacting protein FIP1
  misc_feature (1)..(110): Homolog of NCBI NO: 15234255 NR Description: putative ABA-repsonsive protein; protein id:
  misc_feature (1)..(117): Homolog of NCBI NO: 15240044 NR Description: ABA-responsive protein - like; protein id:
  misc_feature (1)..(118): Homolog of NCBI NO: 34906818 NR Description: contains EST C91668(E31216)~similar to FH protein
  misc_feature (1)..(111): Homolog of NCBI NO: 26452129 NR Description: unknown protein [Arabidopsis thaliana]
  misc_feature (1)..(111): Homolog of NCBI NO: 21592789 NR Description: unknown [Arabidopsis thaliana]
  misc_feature (1)..(111): Homolog of NCBI NO: 18399985 NR Description: Expressed protein
  misc_feature (1)..(111): Homolog of NCBI NO: 15217869 NR Description: FH protein interacting protein FIP1
  misc_feature (1)..(113): Homolog of NCBI NO: 29788871 NR Description: putative ABA-responsive protein
MPGEQLRKAYACYLSTSSGPVIGTLYLSTARLAFCSDSPLCYQGPAGQPHECMYYKVVLPLSQVTSVNPSSSMRNRAERYIQIRTMDNHEFWFMGFVNYDKALKNLNEALQHRDVSGHQRC

SEQ ID NO: 16436 - protein, 118 aa, Zea mays subsp. mays
  peptide (1)..(118): Ceres Seq. ID no. 12354562
  misc_feature (1)..(25): Homolog of NCBI NO: 20271007 NR Description: putative ABA-binding protein [Arabidopsis lyrata
  misc_feature (1)..(25): Homolog of NCBI NO: 11281146 NR Description: ABA-responsive protein - barley
  misc_feature (1)..(25): Homolog of NCBI NO: 15234255 NR Description: putative ABA-repsonsive protein; protein id:
  misc_feature (1)..(25): Homolog of NCBI NO: 15240044 NR Description: ABA-responsive protein - like; protein id:
  misc_feature (1)..(26): Homolog of NCBI NO: 34906818 NR Description: contains EST C91668(E31216)~similar to FH protein
  misc_feature (1)..(25): Homolog of NCBI NO: 26452129 NR Description: unknown protein [Arabidopsis thaliana]
  misc_feature (1)..(25): Homolog of NCBI NO: 21592789 NR Description: unknown [Arabidopsis thaliana]
  misc_feature (1)..(25): Homolog of NCBI NO: 18399985 NR Description: Expressed protein
  misc_feature (1)..(25): Homolog of NCBI NO: 15217869 NR Description: FH protein interacting protein FIP1
  misc_feature (1)..(25): Homolog of NCBI NO: 29788871 NR Description: putative ABA-responsive protein
MADAAVARLTQGTKVYAEGGHDRVFYPDVRRHARGAAPQGLRLLPLHLLGPRHRHALPLHGAPRLLQRQPALLPGPCRPAARVHVLQGGASSEPGDIREPFFQHAQPGRKVHSDQDHG

SEQ ID NO: 16437 - DNA, 1208 bp, Zea mays subsp. mays
  misc_feature (1)..(1208): Ceres Seq. ID no. 12351544
  misc_feature: MA Experiment ID: 108527 Result: Up-regulated in Transcription
  misc_feature: MA Experiment 108527 PARAMETER Experiment Name: Zm_5mM_NO_P Parameter: Age (day) Value: 8
  misc_feature: MA Experiment 108527 PARAMETER Experiment Name: Zm_5mM_NO_P Parameter: Organism Value: Zea mays
  misc_feature: MA Experiment 108527 PARAMETER Experiment Name: Zm_5mM_NO_P Parameter: Plant Line Value: 35A19
  misc_feature: MA Experiment 108527 PARAMETER Experiment Name: Zm_5mM_NO_P Parameter: Timepoint (hr) Value: 6
  misc_feature: MA Experiment 108527 PARAMETER Experiment Name: Zm_5mM_NO_P Parameter: Tissue Value: Aerial
  misc_feature: MA Experiment 108527 PARAMETER Experiment Name: Zm_5mM_NO_P Parameter: Treatment Value: 5mM NO vs. No Treatment
gcagcagcccaggaagcaacacccagccgcctaatcccgcaacaactcgccctcttctacccccatcggctcctctgcatccgcataccggtggcctacaggtttgctggagtgcagtgcacgggcggtggagcagcaaatctgcaactgattcaggatggatcaggaggcgaaggactctaggccctcaaggtctcccagcgagccaaacctcttcccaatggggtagccgtaagaggctgcgatgtgtcaagacgcgtgatgacggctcaccatcgccgtcgccgtctcaaggtcttaggcgtgccataccccgttctactcggcccctccttggagcagacattgcagcatttcgttcaccgcggcgccctagcacccttaaccgcaggaaatccgatttgctggtgaatgagtacaagcacacgatggcgctatcgccagagaaggacaagtattacacaacgaggggttcaccatttccctttgaaggaaatgggtttgactttggtaccataacagaggataagggaaccacatcgttgccgagattcttcattgcattgtcaaacaaggagaaggaggaggacttcatggcgatgaagggctccaagctgccacagaggccaaagaagaggcccaagctgatgcagaagtgcttgcttatggtgagcccaggagcttggttatcagatctatctcatgagagatatgaagttagagagaagaagagttctaaaaagagggctagaggcttgaaggctttgagcatggcgagtgattcagaatagagtttgaggcgaatggatttttggacttgactttagctggtggcaagaatctgtagttaggtggcactgccttctgcctgtcagacaaacctctgcatctaatttggtgctatgagtgctctgatcaaggtctattgatgtcaacagcaaagatgatattagattcctgatctagtgaggtgcagctccatctttctgggtagtgggcgcctttgtgggagagaaaatggagggtgggatacaatagatggtttctcaaaaccacaggaggaagtaatgttcaactgttgggaaacattgaaagctggatgttgggctgagaaccaatgaatcatgatgtttaatcgtcataaacttgtagctgtaagacttatggtgaccattctgtccattcaatcaagactgaccaaaattttc

SEQ ID NO: 16438 - protein, 262 aa, Zea mays subsp. mays
  peptide (1)..(262): Ceres Seq. ID no. 12351545
  misc_feature (88)..(247): Homolog of NCBI NO: 30685055 NR Description: expressed protein [Arabidopsis thaliana]
  misc_feature (88)..(262): Homolog of NCBI NO: 21553974 NR Description: unknown [Arabidopsis thaliana]
  misc_feature (88)..(262): Homolog of NCBI NO: 30685058 NR Description: expressed protein [Arabidopsis thaliana]
  misc_feature (88)..(262): Homolog of NCBI NO: 7485821 NR Description: hypothetical protein F1C12.211 - Arabidopsis
  misc_feature (222)..(262): Homolog of NCBI NO: 6006854 NR Description: hypothetical protein [Arabidopsis thaliana]
  misc_feature (73)..(221): Homolog of NCBI NO: 6006854 NR Description: hypothetical protein [Arabidopsis thaliana]
  misc_feature (73)..(262): Homolog of NCBI NO: 30678969 NR Description: expressed protein [Arabidopsis thaliana]
  misc_feature (73)..(250): Homolog of NCBI NO: 25405821 NR Description: unknown protein, 25817-24837 [imported] -
  misc_feature (73)..(262): Homolog of NCBI NO: 30695924 NR Description: expressed protein [Arabidopsis thaliana]
  misc_feature (73)..(262): Homolog of NCBI NO: 30103017 NR Description: unknown protein [Oryza sativa (japonica
SSPGSNTQPPNPATTRPLLPPSAPLHPHTGGLQVCWSAVHGRWSSKSATDSGWIRRRRTLGPQGLPASQTSSQWGSRKRLRCVKTRDDGSPSPSPSQGLRRAIPRSTRPLLGADIAAFRSPRRPSTLNRRKSDLLVNEYKHTMALSPEKDKYYTTRGSPFPFEGNGFDFGTITEDKGTTSLPRFFIALSNKEKEEDFMAMKGSKLPQRPKKRPKLMQKCLLMVSPGAWLSDLSHERYEVREKKSSKKRARGLKALSMASDSE

SEQ ID NO: 16439 - DNA, 1252 bp, Zea mays subsp. mays
  misc_feature (1)..(1252): Ceres Seq. ID no. 12434879
  misc_feature: MA Experiment ID: 108534 Result: Down-regulated in Transcription
  misc_feature: MA Experiment 108534 PARAMETER Experiment Name: Zm_4deg_Cold_P Parameter: Age (hr) Value: 8
  misc_feature: MA Experiment 108534 PARAMETER Experiment Name: Zm_4deg_Cold_P Parameter: Organism Value: Zea mays
  misc_feature: MA Experiment 108534 PARAMETER Experiment Name: Zm_4deg_Cold_P Parameter: Plant Line Value: 35A19
  misc_feature: MA Experiment 108534 PARAMETER Experiment Name: Zm_4deg_Cold_P Parameter: Temperature (deg C) Value: 4 vs. 22
  misc_feature: MA Experiment 108534 PARAMETER Experiment Name: Zm_4deg_Cold_P Parameter: Timepoint (hr) Value: 6
  misc_feature: MA Experiment 108534 PARAMETER Experiment Name: Zm_4deg_Cold_P Parameter: Tissue Value: Aerial
  misc_feature: MA Experiment ID: 108544 Result: Up-regulated in Transcription
  misc_feature: MA Experiment ID: 108556 Result: Down-regulated in Transcription
  misc_feature: MA Experiment 108556 PARAMETER Experiment Name: Zm_Drought_P Parameter: Age (day) Value: 9
  misc_feature: MA Experiment 108556 PARAMETER Experiment Name: Zm_Drought_P Parameter: Organism Value: Zea mays
  misc_feature: MA Experiment 108556 PARAMETER Experiment Name: Zm_Drought_P Parameter: Plant Line Value: 35A19
  misc_feature: MA Experiment 108556 PARAMETER Experiment Name: Zm_Drought_P Parameter: Timepoint (hr) Value: 24
  misc_feature: MA Experiment 108556 PARAMETER Experiment Name: Zm_Drought_P Parameter: Tissue Value: Aerial
  misc_feature: MA Experiment 108556 PARAMETER Experiment Name: Zm_Drought_P Parameter: Treatment Value: Drought vs. No Drought
  misc_feature: MA Experiment ID: 108689 Result: Down-regulated in Transcription
  misc_feature: MA Experiment 108689 PARAMETER Experiment Name: Zm_Drought_Roots_P Parameter: Age (day) Value: 9
  misc_feature: MA Experiment 108689 PARAMETER Experiment Name: Zm_Drought_Roots_P Parameter: Organism Value: Zea mays
  misc_feature: MA Experiment 108689 PARAMETER Experiment Name: Zm_Drought_Roots_P Parameter: Plant Line Value: 35A19
  misc_feature: MA Experiment 108689 PARAMETER Experiment Name: Zm_Drought_Roots_P Parameter: Timepoint (hr) Value: 24
  misc_feature: MA Experiment 108689 PARAMETER Experiment Name: Zm_Drought_Roots_P Parameter: Tissue Value: Roots
  misc_feature: MA Experiment 108689 PARAMETER Experiment Name: Zm_Drought_Roots_P Parameter: Treatment Value: Drought vs. No Drought
  misc_feature: MA Experiment ID: 20000477 Result: Down-regulated in Transcription
  misc_feature: MA Experiment 20000477 PARAMETER Experiment Name: Zm_5mM_SA_P Parameter: Age (day) Value: 10
  misc_feature: MA Experiment 20000477 PARAMETER Experiment Name: Zm_5mM_SA_P Parameter: Organism Value: Zea mays
  misc_feature: MA Experiment 20000477 PARAMETER Experiment Name: Zm_5mM_SA_P Parameter: Plant Line Value: 35A19
  misc_feature: MA Experiment 20000477 PARAMETER Experiment Name: Zm_5mM_SA_P Parameter: Timepoint (hr) Value: 48
  misc_feature: MA Experiment 20000477 PARAMETER Experiment Name: Zm_5mM_SA_P Parameter: Tissue Value: Aerial
  misc_feature: MA Experiment 20000477 PARAMETER Experiment Name: Zm_5mM_SA_P Parameter: Treatment Value: 5mM SA vs. No Treatment
  misc_feature: MA Experiment ID: 20000478 Result: Down-regulated in Transcription
  misc_feature: MA Experiment 20000478 PARAMETER Experiment Name: Zm_5mM_SA_P Parameter: Age (day) Value: 11
  misc_feature: MA Experiment 20000478 PARAMETER Experiment Name: Zm_5mM_SA_P Parameter: Organism Value: Zea mays
  misc_feature: MA Experiment 20000478 PARAMETER Experiment Name: Zm_5mM_SA_P Parameter: Plant Line Value: 35A19
  misc_feature: MA Experiment 20000478 PARAMETER Experiment Name: Zm_5mM_SA_P Parameter: Timepoint (hr) Value: 72
  misc_feature: MA Experiment 20000478 PARAMETER Experiment Name: Zm_5mM_SA_P Parameter: Tissue Value: Aerial
  misc_feature: MA Experiment 20000478 PARAMETER Experiment Name: Zm_5mM_SA_P Parameter: Treatment Value: 5mM SA vs. No Treatment
  misc_feature: MA Experiment ID: 20000479 Result: Down-regulated in Transcription
  misc_feature: MA Experiment 20000479 PARAMETER Experiment Name: Zm_Drought_P Parameter: Age (day) Value: 10
  misc_feature: MA Experiment 20000479 PARAMETER Experiment Name: Zm_Drought_P Parameter: Organism Value: Zea mays
  misc_feature: MA Experiment 20000479 PARAMETER Experiment Name: Zm_Drought_P Parameter: Plant Line Value: 35A19
  misc_feature: MA Experiment 20000479 PARAMETER Experiment Name: Zm_Drought_P Parameter: Timepoint (hr) Value: 48
  misc_feature: MA Experiment 20000479 PARAMETER Experiment Name: Zm_Drought_P Parameter: Tissue Value: Aerial
  misc_feature: MA Experiment 20000479 PARAMETER Experiment Name: Zm_Drought_P Parameter: Treatment Value: Drought vs. No Drought
  misc_feature: MA Experiment ID: 20000480 Result: Down-regulated in Transcription
  misc_feature: MA Experiment 20000480 PARAMETER Experiment Name: Zm_Drought_P Parameter: Age (day) Value: 11
  misc_feature: MA Experiment 20000480 PARAMETER Experiment Name: Zm_Drought_P Parameter: Organism Value: Zea mays
  misc_feature: MA Experiment 20000480 PARAMETER Experiment Name: Zm_Drought_P Parameter: Plant Line Value: 35A19
  misc_feature: MA Experiment 20000480 PARAMETER Experiment Name: Zm_Drought_P Parameter: Timepoint (hr) Value: 72
  misc_feature: MA Experiment 20000480 PARAMETER Experiment Name: Zm_Drought_P Parameter: Tissue Value: Aerial
  misc_feature: MA Experiment 20000480 PARAMETER Experiment Name: Zm_Drought_P Parameter: Treatment Value: Drought vs. No Drought
  misc_feature: MA Experiment ID: 20000487 Result: Down-regulated in Transcription
  misc_feature: MA Experiment 20000487 PARAMETER Experiment Name: Zm_50mM_NH4NO3_L_to_H_P Parameter: Organism Value: Zea mays
  misc_feature: MA Experiment 20000487 PARAMETER Experiment Name: Zm_50mM_NH4NO3_L_to_H_P Parameter: Timepoint (hr) Value: 4
  misc_feature: MA Experiment 20000487 PARAMETER Experiment Name: Zm_50mM_NH4NO3_L_to_H_P Parameter: Tissue Value: Leaves
  misc_feature: MA Experiment 20000487 PARAMETER Experiment Name: Zm_50mM_NH4NO3_L_to_H_P Parameter: Treatment Value: 50mM NH4NO3 vs. 100mM Mannitol
aagaatccagcctccactacccccagccgggccagcccccccaagccaagcagaatcctcgccccgcaatgcagcacctggccgccgtgctcctcgtcctggcggctaccaccgcgctgccgcccggcgcggcggcgtggcgcccgtggccgccgcgcgacaacgcgacggctgcggcgggccttggcgcgtccaagaggctggagggctcgtcggagttcgtgaagctggagtaccacatgggcccggtcctggcgtcggccatcacggtgcacccgatctggtacgggccctggccggcggcgcaggaagcgcacgatccgcgcgttcctccgctccctgtcgccttctgccgccatcccttcgccgtccgtgtcggcgtggtggcgcacggtgcggctgtaccgcggaccagacctcggccaacgtgtcggcgtcggtgtcgctgggcgcggagaagtcggacgcgcgcatgtcccgcggcgcgcggctgtcgcgcatggacatccaggcagtggtccgcgacgccgtgacggcgcgcacccggcccctgcccgtggacgccagcggcggcgtgtacctggtgctcacgtccccggacgtcgccgtggacgacttctgcgggcaggtgtgcggcttccactacttcaccttcgcgtcggtggtcgggtccacgctgccgtacgcgtgggtgggcaactcggcgcgcaggtgccccgaggtgtgcgcgtacccgttcgcggtcccggcgtacgtgcgcgggcgcaggcccgagtcccccgcccaacggcgacgtcggggtggacggcatggtcagcgtcatcgcgcacgagctcgcggagatggcgtccaacccgctcgccaacgcctggtacgccggcggcgacccgtcgttccccacggagatcgcagacctctgcgagggcatctacggcaccggcgggggaggggcgtacacggggcagctgctcacggacgcgcgctccggcgcggcctacaacgtgaacggcgtcggcgggcgcaggttcctcgtgcagtgggtgtggaaccccgtgctcagctactgctccggccccaacgcgctcgaccagtagctgtttgatttcggtttcgtttcatttcgtttcatctacgtaccaatgaatcgaatcctctagcgcatttggattttcctctcctctccccggggaaatccatgggatgcttctgtatagagttgttattatcaattaattaatgccactttcggtgg

SEQ ID NO: 16440 - protein, 366 aa, Zea mays subsp. mays
  peptide (1)..(366): Ceres Seq. ID no. 12434880
  misc_feature (137)..(260): Pfam Name: Phosphate-induced protein 1 conserved region Pfam Description: Phosphate-induced protein 1 conserved region
  misc_feature (146)..(260): Homolog of NCBI NO: 15219504 NR Description: phosphate-induced (phi-1) protein, putative
  misc_feature (136)..(254): Homolog of NCBI NO: 34901824 NR Description: putative phi-1(phosphate-induced protein 1)
  misc_feature (137)..(249): Homolog of NCBI NO: 25408357 NR Description: hypothetical protein At2g35150 [imported] -
  misc_feature (137)..(249): Homolog of NCBI NO: 18403760 NR Description: Expressed protein
  misc_feature (137)..(271): Homolog of NCBI NO: 21594010 NR Description: unknown [Arabidopsis thaliana]
  misc_feature (137)..(271): Homolog of NCBI NO: 18398352 NR Description: expressed protein
  misc_feature (137)..(260): Homolog of NCBI NO: 21592873 NR Description: unknown [Arabidopsis thaliana]
  misc_feature (137)..(260): Homolog of NCBI NO: 16604527 NR Description: AT5g51550/K17N15_10 [Arabidopsis thaliana]
  misc_feature (137)..(260): Homolog of NCBI NO: 15242118 NR Description: putative protein
  misc_feature (137)..(260): Homolog of NCBI NO: 11875173 NR Description: contains ESTs
RIQPPLPPAGPAPPSQAESSPRNAAPGRRAPRPGGYHRAAARRGGVAPVAAARQRDGCGGPWRVQEAGGLVGVREAGVPHGPGPGVGHHGAPDLVRALAGGAGSARSARSSAPCRLLPPSLRRPCRRGGARCGCTADQTSANVSASVSLGAEKSDARMSRGARLSRMDIQAVVRDAVTARTRPLPVDASGGVYLVLTSPDVAVDDFCGQVCGFHYFTFASVVGSTLPYAWVGNSARRCPEVCAYPFAVPAYVRGRRPESPAQRRRRGGRHGQRHRARARGDGVQPARQRLVRRRRPVVPHGDRRPLRGHLRHRRGRGVHGAAAHGRALRRGLQRERRRRAQVPRAVGVEPRAQLLLRPQRARPVAV

SEQ ID NO: 16441 - protein, 209 aa, Zea mays subsp. mays
  peptide (1)..(209): Ceres Seq. ID no. 12434881
  misc_feature (1)..(103): Pfam Name: Phosphate-induced protein 1 conserved region Pfam Description: Phosphate-induced protein 1 conserved region
  misc_feature (1)..(103): Homolog of NCBI NO: 15219504 NR Description: phosphate-induced (phi-1) protein, putative
  misc_feature (1)..(97): Homolog of NCBI NO: 34901824 NR Description: putative phi-1(phosphate-induced protein 1)
  misc_feature (1)..(92): Homolog of NCBI NO: 25408357 NR Description: hypothetical protein At2g35150 [imported] -
  misc_feature (1)..(92): Homolog of NCBI NO: 18403760 NR Description: Expressed protein
  misc_feature (1)..(114): Homolog of NCBI NO: 21594010 NR Description: unknown [Arabidopsis thaliana]
  misc_feature (1)..(114): Homolog of NCBI NO: 18398352 NR Description: expressed protein
  misc_feature (1)..(103): Homolog of NCBI NO: 21592873 NR Description: unknown [Arabidopsis thaliana]
  misc_feature (1)..(103): Homolog of NCBI NO: 16604527 NR Description: AT5g51550/K17N15_10 [Arabidopsis thaliana]
  misc_feature (1)..(103): Homolog of NCBI NO: 15242118 NR Description: putative protein
  misc_feature (1)..(103): Homolog of NCBI NO: 11875173 NR Description: contains ESTs
MSRGARLSRMDIQAVVRDAVTARTRPLPVDASGGVYLVLTSPDVAVDDFCGQVCGFHYFTFASVVGSTLPYAWVGNSARRCPEVCAYPFAVPAYVRGRRPESPAQRRRRGGRHGQRHRARARGDGVQPARQRLVRRRRPVVPHGDRRPLRGHLRHRRGRGVHGAAAHGRALRRGLQRERRRRAQVPRAVGVEPRAQLLLRPQRARPVAV

SEQ ID NO: 16442 - protein, 200 aa, Zea mays subsp. mays
  peptide (1)..(200): Ceres Seq. ID no. 12434882
  misc_feature (1)..(94): Pfam Name: Phosphate-induced protein 1 conserved region Pfam Description: Phosphate-induced protein 1 conserved region
  misc_feature (1)..(88): Homolog of NCBI NO: 34901824 NR Description: putative phi-1(phosphate-induced protein 1)
  misc_feature (1)..(83): Homolog of NCBI NO: 25408357 NR Description: hypothetical protein At2g35150 [imported] -
  misc_feature (1)..(83): Homolog of NCBI NO: 18403760 NR Description: Expressed protein
  misc_feature (1)..(105): Homolog of NCBI NO: 21594010 NR Description: unknown [Arabidopsis thaliana]
  misc_feature (1)..(105): Homolog of NCBI NO: 18398352 NR Description: expressed protein
  misc_feature (1)..(94): Homolog of NCBI NO: 15219504 NR Description: phosphate-induced (phi-1) protein, putative
  misc_feature (1)..(94): Homolog of NCBI NO: 21592873 NR Description: unknown [Arabidopsis thaliana]
  misc_feature (1)..(94): Homolog of NCBI NO: 16604527 NR Description: AT5g51550/K17N15_10 [Arabidopsis thaliana]
  misc_feature (1)..(94): Homolog of NCBI NO: 15242118 NR Description: putative protein
  misc_feature (1)..(94): Homolog of NCBI NO: 11875173 NR Description: contains ESTs
MDIQAVVRDAVTARTRPLPVDASGGVYLVLTSPDVAVDDFCGQVCGFHYFTFASVVGSTLPYAWVGNSARRCPEVCAYPFAVPAYVRGRRPESPAQRRRRGGRHGQRHRARARGDGVQPARQRLVRRRRPVVPHGDRRPLRGHLRHRRGRGVHGAAAHGRALRRGLQRERRRRAQVPRAVGVEPRAQLLLRPQRARPVAV

SEQ ID NO: 16443 - DNA, 2024 bp, Zea mays subsp. mays
  misc_feature (1)..(2024): Ceres Seq. ID no. 12362351
  misc_feature: MA Experiment ID: 108535 Result: Down-regulated in Transcription
  misc_feature: MA Experiment 108535 PARAMETER Experiment Name: Zm_Meristem_P Parameter: Age (day) Value: 8
  misc_feature: MA Experiment 108535 PARAMETER Experiment Name: Zm_Meristem_P Parameter: Organism Value: Zea mays
  misc_feature: MA Experiment 108535 PARAMETER Experiment Name: Zm_Meristem_P Parameter: Plant Line Value: 35A19
  misc_feature: MA Experiment 108535 PARAMETER Experiment Name: Zm_Meristem_P Parameter: Tissue Value: Root Meristem vs. Above Root Meristem
  misc_feature: MA Experiment ID: 108544 Result: Up-regulated in Transcription
  misc_feature: MA Experiment ID: 108556 Result: Up-regulated in Transcription
  misc_feature: MA Experiment 108556 PARAMETER Experiment Name: Zm_Drought_P Parameter: Age (day) Value: 9
  misc_feature: MA Experiment 108556 PARAMETER Experiment Name: Zm_Drought_P Parameter: Organism Value: Zea mays
  misc_feature: MA Experiment 108556 PARAMETER Experiment Name: Zm_Drought_P Parameter: Plant Line Value: 35A19
  misc_feature: MA Experiment 108556 PARAMETER Experiment Name: Zm_Drought_P Parameter: Timepoint (hr) Value: 24
  misc_feature: MA Experiment 108556 PARAMETER Experiment Name: Zm_Drought_P Parameter: Tissue Value: Aerial
  misc_feature: MA Experiment 108556 PARAMETER Experiment Name: Zm_Drought_P Parameter: Treatment Value: Drought vs. No Drought
  misc_feature: MA Experiment ID: 108597 Result: Up-regulated in Transcription
  misc_feature: MA Experiment 108597 PARAMETER Experiment Name: Zm_100uM_ABA_P Parameter: Age (day) Value: 9
  misc_feature: MA Experiment 108597 PARAMETER Experiment Name: Zm_100uM_ABA_P Parameter: Organism Value: Zea mays
  misc_feature: MA Experiment 108597 PARAMETER Experiment Name: Zm_100uM_ABA_P Parameter: Plant Line Value: 35A19
  misc_feature: MA Experiment 108597 PARAMETER Experiment Name: Zm_100uM_ABA_P Parameter: Timepoint (hr) Value: 24
  misc_feature: MA Experiment 108597 PARAMETER Experiment Name: Zm_100uM_ABA_P Parameter: Tissue Value: Aerial
  misc_feature: MA Experiment 108597 PARAMETER Experiment Name: Zm_100uM_ABA_P Parameter: Treatment Value: 100uM ABA vs. No Treatment
  misc_feature: MA Experiment ID: 108689 Result: Up-regulated in Transcription
  misc_feature: MA Experiment 108689 PARAMETER Experiment Name: Zm_Drought_Roots_P Parameter: Age (day) Value: 9
  misc_feature: MA Experiment 108689 PARAMETER Experiment Name: Zm_Drought_Roots_P Parameter: Organism Value: Zea mays
  misc_feature: MA Experiment 108689 PARAMETER Experiment Name: Zm_Drought_Roots_P Parameter: Plant Line Value: 35A19
  misc_feature: MA Experiment 108689 PARAMETER Experiment Name: Zm_Drought_Roots_P Parameter: Timepoint (hr) Value: 24
  misc_feature: MA Experiment 108689 PARAMETER Experiment Name: Zm_Drought_Roots_P Parameter: Tissue Value: Roots
  misc_feature: MA Experiment 108689 PARAMETER Experiment Name: Zm_Drought_Roots_P Parameter: Treatment Value: Drought vs. No Drought
  misc_feature: MA Experiment ID: 20000479 Result: Up-regulated in Transcription
  misc_feature: MA Experiment 20000479 PARAMETER Experiment Name: Zm_Drought_P Parameter: Age (day) Value: 10
  misc_feature: MA Experiment 20000479 PARAMETER Experiment Name: Zm_Drought_P Parameter: Organism Value: Zea mays
  misc_feature: MA Experiment 20000479 PARAMETER Experiment Name: Zm_Drought_P Parameter: Plant Line Value: 35A19
  misc_feature: MA Experiment 20000479 PARAMETER Experiment Name: Zm_Drought_P Parameter: Timepoint (hr) Value: 48
  misc_feature: MA Experiment 20000479 PARAMETER Experiment Name: Zm_Drought_P Parameter: Tissue Value: Aerial
  misc_feature: MA Experiment 20000479 PARAMETER Experiment Name: Zm_Drought_P Parameter: Treatment Value: Drought vs. No Drought
  misc_feature: MA Experiment ID: 20000480 Result: Up-regulated in Transcription
  misc_feature: MA Experiment 20000480 PARAMETER Experiment Name: Zm_Drought_P Parameter: Age (day) Value: 11
  misc_feature: MA Experiment 20000480 PARAMETER Experiment Name: Zm_Drought_P Parameter: Organism Value: Zea mays
  misc_feature: MA Experiment 20000480 PARAMETER Experiment Name: Zm_Drought_P Parameter: Plant Line Value: 35A19
  misc_feature: MA Experiment 20000480 PARAMETER Experiment Name: Zm_Drought_P Parameter: Timepoint (hr) Value: 72
  misc_feature: MA Experiment 20000480 PARAMETER Experiment Name: Zm_Drought_P Parameter: Tissue Value: Aerial
  misc_feature: MA Experiment 20000480 PARAMETER Experiment Name: Zm_Drought_P Parameter: Treatment Value: Drought vs. No Drought
  misc_feature: MA Experiment ID: 20000487 Result: Up-regulated in Transcription
  misc_feature: MA Experiment 20000487 PARAMETER Experiment Name: Zm_50mM_NH4NO3_L_to_H_P Parameter: Organism Value: Zea mays
  misc_feature: MA Experiment 20000487 PARAMETER Experiment Name: Zm_50mM_NH4NO3_L_to_H_P Parameter: Timepoint (hr) Value: 4
  misc_feature: MA Experiment 20000487 PARAMETER Experiment Name: Zm_50mM_NH4NO3_L_to_H_P Parameter: Tissue Value: Leaves
  misc_feature: MA Experiment 20000487 PARAMETER Experiment Name: Zm_50mM_NH4NO3_L_to_H_P Parameter: Treatment Value: 50mM NH4NO3 vs. 100mM Mannitol
  misc_feature: MA Experiment ID: 20000535 Result: Up-regulated in Transcription
  misc_feature: MA Experiment 20000535 PARAMETER Experiment Name: Zm_Hybrid_Seed_Dev_P Parameter: DAP Value: 30 vs. 12
  misc_feature: MA Experiment 20000535 PARAMETER Experiment Name: Zm_Hybrid_Seed_Dev_P Parameter: Organism Value: Zea mays
  misc_feature: MA Experiment 20000535 PARAMETER Experiment Name: Zm_Hybrid_Seed_Dev_P Parameter: Plant Line Value: 35A19
  misc_feature: MA Experiment 20000535 PARAMETER Experiment Name: Zm_Hybrid_Seed_Dev_P Parameter: Tissue Value: Embryo vs. Unfert Floret
attttgggggctctaaaatagcctcgccctcctcgtgccttatcttcatctcacctcctctttctcctccgtgctgatcggcagtctctaagctttgcaacaactgatagccgaattccgcgcgccggtccctaaaaaaatgcaagtactaggtagtagataagatgcatttcccagtaatttttcgttattatatatacgcagcacgggaaggaggggagacactctgttcaaccaccagccgagttcgcagcggcactccaggtccagcagtctcttcggctcttcgttggtggtgcgtggacaccggaaattacctcggggattgcgttcctgatctaagcccggcatgaagtgctgctcagagcgtttgctgctcctgctcctgctgctgctggcatcgtcgtcgttactgtccgtcgtggttgccgcgcagcagacttgccctgccgacctcgacagcaaatgcgacggtggtgcgcctgatgactgggagggggaattcttccccggcgtcccgaaaatcaagtatgagggtccaacaagcaagaaccctcttgcttataagtggtataacaaggaggaagtcattctcggaaagaagatgaaggactggatgcgcttcagtgttgcgttctggcacacgttccgtggtactggcgccgatccttttggtgcgcctacaaaggtttggccttgggaggacggcacaaattcgttggccatggctaagagaagaatgagagctcactttgagttcatggagaagctgggggttgacaaatggtgcttccatgatagggatattgcccctgatgggaaaactctcgaagaaacaaatgctaacttggatgagatagttgagctggcaaagcagctccagggtgagaccaatataaagccattgtggggtactgcacagctctttatgcatcctcgttacatgcacggagctgctactagcccagaggttaaagtatatgcatatgcggctgcacaagttaagaaagctttggaggtcactcactacctaggtggtgaaaactatgtgttttggggtggaagagagggttaccaaactcttctgaacactgatcttaagagagaacttgaccatttggctaactttcttcaagctgctgttgactacaagaagaagattggattcaacggaacactgttgatagagcctaaaccacaggaacctacaaaacaccagtatgactgggatgttgcaactacgtttgcttttctacagaagtatggtcttaccggagagttcaagattaatgttgagtgcaaccatgctactctatctggacatagctgccatcatgaactggagactgcacgcattaatgggctgcttgggaacattgatgcaaacactggtgatcctcaagttggctgggacacggatcagttcatgacagacattgcagaggctactttggttatgtcaactgtggttaagaatggtggacttgcacctggtggcttcaactttgacgccaaattgcggagggaaagcactgatgttgaggacttgtttcttgctcatatctccggaatggacaccctggcccgtggcctccgcaacgccgccaagctgatcgaggatggttccctagatgctctcgtccgcaagcggtaccggagctttgatagtgagatgggtgccttgatcgaggctgggaaaggagactttgaggcgctggagaagaaggtccttgagtggggtgagcccactgttccgtccggcaagcaggaactggcggagattctgttccactctgctctatagatggcgccatgtccgtagcggtagctcctggaataagcaagcactgagcctgcgcccctcctaacgcgcgcggtcgtcctcaccaccacgggaatgtttctggttgcgcgcgatgaaccatgtacaatacaccgtggaactgaaatagctagtcagaatttttagaagtgttgcgtcttttgtttggaacggaataaaactgaactttgtggttagtttg

SEQ ID NO: 16444 - protein, 484 aa, Zea mays subsp. mays
  peptide (1)..(484): Ceres Seq. ID no. 12362352
  misc_feature (78)..(484): Pfam Name: Xylose isomerase Pfam Description: Xylose isomerase
  misc_feature (51)..(484): Homolog of NCBI NO: 17433692 NR Description: Xylose isomerase
  misc_feature (51)..(482): Homolog of NCBI NO: 15644415 NR Description: xylose isomerase [Thermotoga maritima]
  misc_feature (51)..(482): Homolog of NCBI NO: 3319057 NR Description: Chain A, Xylose Isomerase From Thermotoga
  misc_feature (51)..(482): Homolog of NCBI NO: 1175034 NR Description: Xylose isomerase
  misc_feature (10)..(473): Homolog of NCBI NO: 17433690 NR Description: Xylose isomerase
  misc_feature (10)..(484): Homolog of NCBI NO: 21537178 NR Description: xylose isomerase [Arabidopsis thaliana]
  misc_feature (10)..(484): Homolog of NCBI NO: 30696904 NR Description: expressed protein [Arabidopsis thaliana]
  misc_feature (11)..(484): Homolog of NCBI NO: 2130051 NR Description: xylose isomerase (EC 5.3.1.5) - barley
  misc_feature (11)..(484): Homolog of NCBI NO: 6175480 NR Description: Xylose isomerase
  misc_feature (11)..(484): Homolog of NCBI NO: 34899308 NR Description: putative xylose isomerase [Oryza sativa (japonica
MKCCSERLLLLLLLLLASSSLLSVVVAAQQTCPADLDSKCDGGAPDDWEGEFFPGVPKIKYEGPTSKNPLAYKWYNKEEVILGKKMKDWMRFSVAFWHTFRGTGADPFGAPTKVWPWEDGTNSLAMAKRRMRAHFEFMEKLGVDKWCFHDRDIAPDGKTLEETNANLDEIVELAKQLQGETNIKPLWGTAQLFMHPRYMHGAATSPEVKVYAYAAAQVKKALEVTHYLGGENYVFWGGREGYQTLLNTDLKRELDHLANFLQAAVDYKKKIGFNGTLLIEPKPQEPTKHQYDWDVATTFAFLQKYGLTGEFKINVECNHATLSGHSCHHELETARINGLLGNIDANTGDPQVGWDTDQFMTDIAEATLVMSTVVKNGGLAPGGFNFDAKLRRESTDVEDLFLAHISGMDTLARGLRNAAKLIEDGSLDALVRKRYRSFDSEMGALIEAGKGDFEALEKKVLEWGEPTVPSGKQELAEILFHSAL

SEQ ID NO: 16445 - protein, 399 aa, Zea mays subsp. mays
  peptide (1)..(399): Ceres Seq. ID no. 12362353
  misc_feature (1)..(399): Pfam Name: Xylose isomerase Pfam Description: Xylose isomerase
  misc_feature (1)..(399): Homolog of NCBI NO: 17433692 NR Description: Xylose isomerase
  misc_feature (1)..(397): Homolog of NCBI NO: 15644415 NR Description: xylose isomerase [Thermotoga maritima]
  misc_feature (1)..(397): Homolog of NCBI NO: 3319057 NR Description: Chain A, Xylose Isomerase From Thermotoga
  misc_feature (1)..(397): Homolog of NCBI NO: 1175034 NR Description: Xylose isomerase
  misc_feature (1)..(388): Homolog of NCBI NO: 17433690 NR Description: Xylose isomerase
  misc_feature (1)..(399): Homolog of NCBI NO: 21537178 NR Description: xylose isomerase [Arabidopsis thaliana]
  misc_feature (1)..(399): Homolog of NCBI NO: 30696904 NR Description: expressed protein [Arabidopsis thaliana]
  misc_feature (1)..(399): Homolog of NCBI NO: 2130051 NR Description: xylose isomerase (EC 5.3.1.5) - barley
  misc_feature (1)..(399): Homolog of NCBI NO: 6175480 NR Description: Xylose isomerase
  misc_feature (1)..(399): Homolog of NCBI NO: 34899308 NR Description: putative xylose isomerase [Oryza sativa (japonica
MKDWMRFSVAFWHTFRGTGADPFGAPTKVWPWEDGTNSLAMAKRRMRAHFEFMEKLGVDKWCFHDRDIAPDGKTLEETNANLDEIVELAKQLQGETNIKPLWGTAQLFMHPRYMHGAATSPEVKVYAYAAAQVKKALEVTHYLGGENYVFWGGREGYQTLLNTDLKRELDHLANFLQAAVDYKKKIGFNGTLLIEPKPQEPTKHQYDWDVATTFAFLQKYGLTGEFKINVECNHATLSGHSCHHELETARINGLLGNIDANTGDPQVGWDTDQFMTDIAEATLVMSTVVKNGGLAPGGFNFDAKLRRESTDVEDLFLAHISGMDTLARGLRNAAKLIEDGSLDALVRKRYRSFDSEMGALIEAGKGDFEALEKKVLEWGEPTVPSGKQELAEILFHSAL

SEQ ID NO: 16446 - protein, 395 aa, Zea mays subsp. mays
  peptide (1)..(395): Ceres Seq. ID no. 12362354
  misc_feature (1)..(395): Pfam Name: Xylose isomerase Pfam Description: Xylose isomerase
  misc_feature (1)..(395): Homolog of NCBI NO: 17433692 NR Description: Xylose isomerase
  misc_feature (1)..(393): Homolog of NCBI NO: 15644415 NR Description: xylose isomerase [Thermotoga maritima]
  misc_feature (1)..(393): Homolog of NCBI NO: 3319057 NR Description: Chain A, Xylose Isomerase From Thermotoga
  misc_feature (1)..(393): Homolog of NCBI NO: 1175034 NR Description: Xylose isomerase
  misc_feature (1)..(384): Homolog of NCBI NO: 17433690 NR Description: Xylose isomerase
  misc_feature (1)..(395): Homolog of NCBI NO: 21537178 NR Description: xylose isomerase [Arabidopsis thaliana]
  misc_feature (1)..(395): Homolog of NCBI NO: 30696904 NR Description: expressed protein [Arabidopsis thaliana]
  misc_feature (1)..(395): Homolog of NCBI NO: 2130051 NR Description: xylose isomerase (EC 5.3.1.5) - barley
  misc_feature (1)..(395): Homolog of NCBI NO: 6175480 NR Description: Xylose isomerase
  misc_feature (1)..(395): Homolog of NCBI NO: 34899308 NR Description: putative xylose isomerase [Oryza sativa (japonica
MRFSVAFWHTFRGTGADPFGAPTKVWPWEDGTNSLAMAKRRMRAHFEFMEKLGVDKWCFHDRDIAPDGKTLEETNANLDEIVELAKQLQGETNIKPLWGTAQLFMHPRYMHGAATSPEVKVYAYAAAQVKKALEVTHYLGGENYVFWGGREGYQTLLNTDLKRELDHLANFLQAAVDYKKKIGFNGTLLIEPKPQEPTKHQYDWDVATTFAFLQKYGLTGEFKINVECNHATLSGHSCHHELETARINGLLGNIDANTGDPQVGWDTDQFMTDIAEATLVMSTVVKNGGLAPGGFNFDAKLRRESTDVEDLFLAHISGMDTLARGLRNAAKLIEDGSLDALVRKRYRSFDSEMGALIEAGKGDFEALEKKVLEWGEPTVPSGKQELAEILFHSAL

SEQ ID NO: 16447 - DNA, 1368 bp, Zea mays subsp. mays
  misc_feature (1)..(1368): Ceres Seq. ID no. 12357062
  misc_feature: MA Experiment ID: 108530 Result: Up-regulated in Transcription
  misc_feature: MA Experiment 108530 PARAMETER Experiment Name: Zm_Imbibed_Seeds_P Parameter: Age (day) Value: 6 vs. 2
  misc_feature: MA Experiment 108530 PARAMETER Experiment Name: Zm_Imbibed_Seeds_P Parameter: Organism Value: Zea mays
  misc_feature: MA Experiment 108530 PARAMETER Experiment Name: Zm_Imbibed_Seeds_P Parameter: Plant Line Value: 35A19
  misc_feature: MA Experiment 108530 PARAMETER Experiment Name: Zm_Imbibed_Seeds_P Parameter: Tissue Value: Aerial vs. Embryo
aaaaaagaaaaaaaccacaaagagattcctctcaccaccaccaaccctagacgatcctcctccgccatgatgcgggacggcgtgcctccgtcggtggccggctccggcggcgcggcgggcggcgacgggcccaggcgatgctcgcagtgcgggcaccacgggcacaacgcgcgaacctgcacggcgcggcccgtcaagctcttcggcgtgcgcatcggggacaagcccatccggaagagcgccagcatggggaacatcgcgcacctcgccgcggagggcagcggcggcagggaggaagggtacggctccgacggggagcgcccgcacaagaagcgaggtgaggcatggactgaagaggagcacaagaagtttctgcttgggttgaataagctagggaaaggcgattggcgtggtatatcccgtaaatatgttgtttcaaggacacctactcaagtggctagccatgcgcaaaagtatttcaatcgccaaacaaatgtgcatagaagaaagagaagatcaagcctattcgatatggtgattgatgacccgtctgatcaacttccgctctcgcgttcatcttcacaagaaatggagcagcaacatttagatgatccacagcctgttgcagccctgcctgcacctgtggtctctccagctactgtggtacctcctgtgcctgtggaagtgtctgcttcagttccatcgccagttcaggtcccagttccagtttcagccccagtgatgacatctcagcctatggaacaggactcagataccacaagttcaattgctggagaggcaggaacggtgatgccaggagccatgcccccctatctttatccaatgatgattcctcctccatactaccatactgcttttgtaccaatgccctgctacggttatgttcctttttactgtgagccacaaggtgctgcacaggctccgcatgaggttgtcaagccagtggctgttcattcaacgcctccactgaatgccaaagacctttacaacatgtctgaattgagcctgaagggcgactcgaatgcaaacggtggtgtgcctgcttcccccttgcctccgaagccgatcggtagaccagagaggcaatctgctttccatggcaaaggacctacacctaccggtggctcgtcaggtggactgattcctgcagtcaagtgaattcgattatgctcctaaacatgccttcatgtgtatgtaatactagaaatagccaaatcgtaatagccgcctgtgctgctaaaatggtggtgtgttttctagcaaaatatctatactgctcattttagccttcaccagtttggaagtcatgatccgagggtaaatatattgttagcttgttgtttttgt

SEQ ID NO: 16448 - protein, 392 aa, Zea mays subsp. mays
  peptide (1)..(392): Ceres Seq. ID no. 12357063
  misc_feature (113)..(160): Pfam Name: Myb-like DNA-binding domain Pfam Description: Myb-like DNA-binding domain
  misc_feature (87)..(257): Homolog of NCBI NO: 24850307 NR Description: transcription factor MYBS3
  misc_feature (45)..(60): Homolog of NCBI NO: 15222521 NR Description: DNA binding protein MybSt1, putative; protein id:
  misc_feature (63)..(214): Homolog of NCBI NO: 15222521 NR Description: DNA binding protein MybSt1, putative; protein id:
  misc_feature (45)..(63): Homolog of NCBI NO: 15228185 NR Description: putative MYB family transcription factor; protein
  misc_feature (72)..(207): Homolog of NCBI NO: 15228185 NR Description: putative MYB family transcription factor; protein
  misc_feature (45)..(108): Homolog of NCBI NO: 34906364 NR Description: unnamed protein product [Oryza sativa (japonica
  misc_feature (93)..(269): Homolog of NCBI NO: 34906364 NR Description: unnamed protein product [Oryza sativa (japonica
  misc_feature (82)..(384): Homolog of NCBI NO: 15238083 NR Description: Myb-related transcription activator-like
  misc_feature (45)..(104): Homolog of NCBI NO: 37536856 NR Description: putative Myb-related protein
  misc_feature (87)..(257): Homolog of NCBI NO: 37536856 NR Description: putative Myb-related protein
KKEKNHKEIPLTTTNPRRSSSAMMRDGVPPSVAGSGGAAGGDGPRRCSQCGHHGHNARTCTARPVKLFGVRIGDKPIRKSASMGNIAHLAAEGSGGREEGYGSDGERPHKKRGEAWTEEEHKKFLLGLNKLGKGDWRGISRKYVVSRTPTQVASHAQKYFNRQTNVHRRKRRSSLFDMVIDDPSDQLPLSRSSSQEMEQQHLDDPQPVAALPAPVVSPATVVPPVPVEVSASVPSPVQVPVPVSAPVMTSQPMEQDSDTTSSIAGEAGTVMPGAMPPYLYPMMIPPPYYHTAFVPMPCYGYVPFYCEPQGAAQAPHEVVKPVAVHSTPPLNAKDLYNMSELSLKGDSNANGGVPASPLPPKPIGRPERQSAFHGKGPTPTGGSSGGLIPAVK

SEQ ID NO: 16449 - protein, 370 aa, Zea mays subsp. mays
  peptide (1)..(370): Ceres Seq. ID no. 12357064
  misc_feature (91)..(138): Pfam Name: Myb-like DNA-binding domain Pfam Description: Myb-like DNA-binding domain
  misc_feature (65)..(235): Homolog of NCBI NO: 24850307 NR Description: transcription factor MYBS3
  misc_feature (23)..(38): Homolog of NCBI NO: 15222521 NR Description: DNA binding protein MybSt1, putative; protein id:
  misc_feature (41)..(192): Homolog of NCBI NO: 15222521 NR Description: DNA binding protein MybSt1, putative; protein id:
  misc_feature (23)..(41): Homolog of NCBI NO: 15228185 NR Description: putative MYB family transcription factor; protein
  misc_feature (50)..(185): Homolog of NCBI NO: 15228185 NR Description: putative MYB family transcription factor; protein
  misc_feature (23)..(86): Homolog of NCBI NO: 34906364 NR Description: unnamed protein product [Oryza sativa (japonica
  misc_feature (71)..(247): Homolog of NCBI NO: 34906364 NR Description: unnamed protein product [Oryza sativa (japonica
  misc_feature (60)..(362): Homolog of NCBI NO: 15238083 NR Description: Myb-related transcription activator-like
  misc_feature (23)..(82): Homolog of NCBI NO: 37536856 NR Description: putative Myb-related protein
  misc_feature (65)..(235): Homolog of NCBI NO: 37536856 NR Description: putative Myb-related protein
MMRDGVPPSVAGSGGAAGGDGPRRCSQCGHHGHNARTCTARPVKLFGVRIGDKPIRKSASMGNIAHLAAEGSGGREEGYGSDGERPHKKRGEAWTEEEHKKFLLGLNKLGKGDWRGISRKYVVSRTPTQVASHAQKYFNRQTNVHRRKRRSSLFDMVIDDPSDQLPLSRSSSQEMEQQHLDDPQPVAALPAPVVSPATVVPPVPVEVSASVPSPVQVPVPVSAPVMTSQPMEQDSDTTSSIAGEAGTVMPGAMPPYLYPMMIPPPYYHTAFVPMPCYGYVPFYCEPQGAAQAPHEVVKPVAVHSTPPLNAKDLYNMSELSLKGDSNANGGVPASPLPPKPIGRPERQSAFHGKGPTPTGGSSGGLIPAVK

SEQ ID NO: 16450 - protein, 369 aa, Zea mays subsp. mays
  peptide (1)..(369): Ceres Seq. ID no. 12357065
  misc_feature (90)..(137): Pfam Name: Myb-like DNA-binding domain Pfam Description: Myb-like DNA-binding domain
  misc_feature (64)..(234): Homolog of NCBI NO: 24850307 NR Description: transcription factor MYBS3
  misc_feature (22)..(37): Homolog of NCBI NO: 15222521 NR Description: DNA binding protein MybSt1, putative; protein id:
  misc_feature (40)..(191): Homolog of NCBI NO: 15222521 NR Description: DNA binding protein MybSt1, putative; protein id:
  misc_feature (22)..(40): Homolog of NCBI NO: 15228185 NR Description: putative MYB family transcription factor; protein
  misc_feature (49)..(184): Homolog of NCBI NO: 15228185 NR Description: putative MYB family transcription factor; protein
  misc_feature (22)..(85): Homolog of NCBI NO: 34906364 NR Description: unnamed protein product [Oryza sativa (japonica
  misc_feature (70)..(246): Homolog of NCBI NO: 34906364 NR Description: unnamed protein product [Oryza sativa (japonica
  misc_feature (59)..(361): Homolog of NCBI NO: 15238083 NR Description: Myb-related transcription activator-like
  misc_feature (22)..(81): Homolog of NCBI NO: 37536856 NR Description: putative Myb-related protein
  misc_feature (64)..(234): Homolog of NCBI NO: 37536856 NR Description: putative Myb-related protein
MRDGVPPSVAGSGGAAGGDGPRRCSQCGHHGHNARTCTARPVKLFGVRIGDKPIRKSASMGNIAHLAAEGSGGREEGYGSDGERPHKKRGEAWTEEEHKKFLLGLNKLGKGDWRGISRKYVVSRTPTQVASHAQKYFNRQTNVHRRKRRSSLFDMVIDDPSDQLPLSRSSSQEMEQQHLDDPQPVAALPAPVVSPATVVPPVPVEVSASVPSPVQVPVPVSAPVMTSQPMEQDSDTTSSIAGEAGTVMPGAMPPYLYPMMIPPPYYHTAFVPMPCYGYVPFYCEPQGAAQAPHEVVKPVAVHSTPPLNAKDLYNMSELSLKGDSNANGGVPASPLPPKPIGRPERQSAFHGKGPTPTGGSSGGLIPAVK

SEQ ID NO: 16451 - DNA, 1564 bp, Zea mays subsp. mays
  misc_feature (1)..(1564): Ceres Seq. ID no. 12369286
  misc_feature: MA Experiment ID: 108534 Result: Down-regulated in Transcription
  misc_feature: MA Experiment 108534 PARAMETER Experiment Name: Zm_4deg_Cold_P Parameter: Age (hr) Value: 8
  misc_feature: MA Experiment 108534 PARAMETER Experiment Name: Zm_4deg_Cold_P Parameter: Organism Value: Zea mays
  misc_feature: MA Experiment 108534 PARAMETER Experiment Name: Zm_4deg_Cold_P Parameter: Plant Line Value: 35A19
  misc_feature: MA Experiment 108534 PARAMETER Experiment Name: Zm_4deg_Cold_P Parameter: Temperature (deg C) Value: 4 vs. 22
  misc_feature: MA Experiment 108534 PARAMETER Experiment Name: Zm_4deg_Cold_P Parameter: Timepoint (hr) Value: 6
  misc_feature: MA Experiment 108534 PARAMETER Experiment Name: Zm_4deg_Cold_P Parameter: Tissue Value: Aerial
  misc_feature: MA Experiment ID: 108544 Result: Down-regulated in Transcription
  misc_feature: MA Experiment ID: 108689 Result: Up-regulated in Transcription
  misc_feature: MA Experiment 108689 PARAMETER Experiment Name: Zm_Drought_Roots_P Parameter: Age (day) Value: 9
  misc_feature: MA Experiment 108689 PARAMETER Experiment Name: Zm_Drought_Roots_P Parameter: Organism Value: Zea mays
  misc_feature: MA Experiment 108689 PARAMETER Experiment Name: Zm_Drought_Roots_P Parameter: Plant Line Value: 35A19
  misc_feature: MA Experiment 108689 PARAMETER Experiment Name: Zm_Drought_Roots_P Parameter: Timepoint (hr) Value: 24
  misc_feature: MA Experiment 108689 PARAMETER Experiment Name: Zm_Drought_Roots_P Parameter: Tissue Value: Roots
  misc_feature: MA Experiment 108689 PARAMETER Experiment Name: Zm_Drought_Roots_P Parameter: Treatment Value: Drought vs. No Drought
  misc_feature: MA Experiment ID: 20000626 Result: Down-regulated in Transcription
  misc_feature: MA Experiment 20000626 PARAMETER Experiment Name: Zm_Herbicide-Treatments_P Parameter: Timepoint (hr) Value: 12
  misc_feature: MA Experiment 20000626 PARAMETER Experiment Name: Zm_Herbicide-Treatments_P Parameter: Tissue Value: Aerial
  misc_feature: MA Experiment 20000626 PARAMETER Experiment Name: Zm_Herbicide-Treatments_P Parameter: Treatment Value: Roundup vs. No Treatment
cgcccactaccctctccggctctccgctaacaaaatctagaaccctctgaaccctccacattcctccagatcgaataataacctagctctgcacaccgcccagccaccagtggcagcaggagcaggggtcggaacaagatggtggtgacggcggccggcagcgcggaggaggctgtgcggcggtgggtggacgccgccggaggacgcctcgtcctcgacggcgggctggccacggagctcgaggccaacggcgccgacctcaacgacccgctctggagcgctaagtgcctcctctcctccccgcacctcatccgcaaggtccacatggactatctggaagctggcgcaaacattataatcacagcatcgtatcaggccactattcaagggtttgaatcaaagggtttttcaaaagaacagagtgaaaacttactaacaaagagtgtcgagattgcactggaagctcgtgagatgttcttgaaggaacatctggagaagtccactcctatacagcacccggttctggtcgcagcgtctttagggagttatggagcttatcttgccgatggctccgagtacagtggggattatggtgaagctggtacgaaagagttcctgaaagatttccatcggcggaggctccaggttcttgcggaagcaggccccgatttgattgctttcgaaacgattcccaacaaactggaagctgaggcgtatgtcgaacttctcgaggagtgcaacatcaatatccctgcatggttttccttcaactcaaaagatggagtgcatattgtgagcggtgactcgttaatcgaatgcactactattgctgacaagtgtgcaaaggttggtgcggtcgggataaactgcacacctccaagatttatccatggactgatactctccattcgaaaggtcacggacaagcccattctgatatatcccaacagtggcgaaagatacgatggtgaaaaaaaggagtgggtggaatccactggtgtgtcagatggtgattttgtttcttatgtgaacgagtggtgcaaagacggggctgtgcttatcggtggctgctgcaggacaactccaaacactatcagggccatacacagaactctgaacaaaagccccaacaagcagcagttacctgctgtagaataagagctgtgctctactctgatgcgcccgccttcctcctagcagtacctcgaggctataactccatgattccgtaaccgtacgtgttcgttctcttgcaaacgagatgtttgtaaataacgctgtatttctgggttctgagatatgcaacttggatggaggtacaaccggtgaaggggggtgaggaagcagcaacaatggtaagagttctactactgagtgggggaaaaacaacttgcggctgggttagtgaagcttagtagctaccactattcaagagttaaagggagttcgtatgacagttcctctggagatgttatcttcaaagtcttatatcactgctacttgtgagctgtgttaaaacctatatatataagttttgtttgacgtgactgcattaaagatagtg

SEQ ID NO: 16452 - protein, 339 aa, Zea mays subsp. mays
  peptide (1)..(339): Ceres Seq. ID no. 12369287
  misc_feature (24)..(328): Pfam Name: Homocysteine S-methyltransferase Pfam Description: Homocysteine S-methyltransferase
  misc_feature (1)..(200): Homolog of NCBI NO: 34909958 NR Description: putative homocysteine S-methyltransferase-4
  misc_feature (20)..(330): Homolog of NCBI NO: 6094303 NR Description: Selenocysteine methyltransferase
  misc_feature (16)..(336): Homolog of NCBI NO: 21593147 NR Description: putative selenocysteine methyltransferase
  misc_feature (16)..(336): Homolog of NCBI NO: 18403505 NR Description: putative selenocysteine methyltransferase
  misc_feature (9)..(338): Homolog of NCBI NO: 10732791 NR Description: homocysteine S-methyltransferase-4 [Zea mays]
  misc_feature (7)..(326): Homolog of NCBI NO: 25453566 NR Description: homocysteine S-methyltransferase (EC 2.1.1.10)
  misc_feature (7)..(326): Homolog of NCBI NO: 15229396 NR Description: homocysteine S-methyltransferase AtHMT-2
  misc_feature (11)..(327): Homolog of NCBI NO: 37534456 NR Description: putative homocysteine S-methyltransferase-2
  misc_feature (1)..(336): Homolog of NCBI NO: 10732789 NR Description: homocysteine S-methyltransferase-3 [Zea mays]
  misc_feature (1)..(339): Homolog of NCBI NO: 10732787 NR Description: homocysteine S-methyltransferase-2 [Zea mays]
MVVTAAGSAEEAVRRWVDAAGGRLVLDGGLATELEANGADLNDPLWSAKCLLSSPHLIRKVHMDYLEAGANIIITASYQATIQGFESKGFSKEQSENLLTKSVEIALEAREMFLKEHLEKSTPIQHPVLVAASLGSYGAYLADGSEYSGDYGEAGTKEFLKDFHRRRLQVLAEAGPDLIAFETIPNKLEAEAYVELLEECNINIPAWFSFNSKDGVHIVSGDSLIECTTIADKCAKVGAVGINCTPPRFIHGLILSIRKVTDKPILIYPNSGERYDGEKKEWVESTGVSDGDFVSYVNEWCKDGAVLIGGCCRTTPNTIRAIHRTLNKSPNKQQLPAVE

SEQ ID NO: 16453 - protein, 277 aa, Zea mays subsp. mays
  peptide (1)..(277): Ceres Seq. ID no. 12369288
  misc_feature (1)..(266): Pfam Name: Homocysteine S-methyltransferase Pfam Description: Homocysteine S-methyltransferase
  misc_feature (1)..(274): Homolog of NCBI NO: 10732789 NR Description: homocysteine S-methyltransferase-3 [Zea mays]
  misc_feature (1)..(277): Homolog of NCBI NO: 10732787 NR Description: homocysteine S-methyltransferase-2 [Zea mays]
  misc_feature (1)..(138): Homolog of NCBI NO: 34909958 NR Description: putative homocysteine S-methyltransferase-4
  misc_feature (1)..(268): Homolog of NCBI NO: 6094303 NR Description: Selenocysteine methyltransferase
  misc_feature (1)..(274): Homolog of NCBI NO: 21593147 NR Description: putative selenocysteine methyltransferase
  misc_feature (1)..(274): Homolog of NCBI NO: 18403505 NR Description: putative selenocysteine methyltransferase
  misc_feature (1)..(276): Homolog of NCBI NO: 10732791 NR Description: homocysteine S-methyltransferase-4 [Zea mays]
  misc_feature (1)..(264): Homolog of NCBI NO: 25453566 NR Description: homocysteine S-methyltransferase (EC 2.1.1.10)
  misc_feature (1)..(264): Homolog of NCBI NO: 15229396 NR Description: homocysteine S-methyltransferase AtHMT-2
  misc_feature (1)..(265): Homolog of NCBI NO: 37534456 NR Description: putative homocysteine S-methyltransferase-2
MDYLEAGANIIITASYQATIQGFESKGFSKEQSENLLTKSVEIALEAREMFLKEHLEKSTPIQHPVLVAASLGSYGAYLADGSEYSGDYGEAGTKEFLKDFHRRRLQVLAEAGPDLIAFETIPNKLEAEAYVELLEECNINIPAWFSFNSKDGVHIVSGDSLIECTTIADKCAKVGAVGINCTPPRFIHGLILSIRKVTDKPILIYPNSGERYDGEKKEWVESTGVSDGDFVSYVNEWCKDGAVLIGGCCRTTPNTIRAIHRTLNKSPNKQQLPAVE

SEQ ID NO: 16454 - protein, 228 aa, Zea mays subsp. mays
  peptide (1)..(228): Ceres Seq. ID no. 12369289
  misc_feature (1)..(217): Pfam Name: Homocysteine S-methyltransferase Pfam Description: Homocysteine S-methyltransferase
  misc_feature (1)..(89): Homolog of NCBI NO: 34909958 NR Description: putative homocysteine S-methyltransferase-4
  misc_feature (1)..(219): Homolog of NCBI NO: 6094303 NR Description: Selenocysteine methyltransferase
  misc_feature (1)..(225): Homolog of NCBI NO: 21593147 NR Description: putative selenocysteine methyltransferase
  misc_feature (1)..(225): Homolog of NCBI NO: 18403505 NR Description: putative selenocysteine methyltransferase
  misc_feature (1)..(227): Homolog of NCBI NO: 10732791 NR Description: homocysteine S-methyltransferase-4 [Zea mays]
  misc_feature (1)..(215): Homolog of NCBI NO: 25453566 NR Description: homocysteine S-methyltransferase (EC 2.1.1.10)
  misc_feature (1)..(215): Homolog of NCBI NO: 15229396 NR Description: homocysteine S-methyltransferase AtHMT-2
  misc_feature (1)..(216): Homolog of NCBI NO: 37534456 NR Description: putative homocysteine S-methyltransferase-2
  misc_feature (1)..(225): Homolog of NCBI NO: 10732789 NR Description: homocysteine S-methyltransferase-3 [Zea mays]
  misc_feature (1)..(228): Homolog of NCBI NO: 10732787 NR Description: homocysteine S-methyltransferase-2 [Zea mays]
MFLKEHLEKSTPIQHPVLVAASLGSYGAYLADGSEYSGDYGEAGTKEFLKDFHRRRLQVLAEAGPDLIAFETIPNKLEAEAYVELLEECNINIPAWFSFNSKDGVHIVSGDSLIECTTIADKCAKVGAVGINCTPPRFIHGLILSIRKVTDKPILIYPNSGERYDGEKKEWVESTGVSDGDFVSYVNEWCKDGAVLIGGCCRTTPNTIRAIHRTLNKSPNKQQLPAVE

SEQ ID NO: 16455 - DNA, 1460 bp, Zea mays subsp. mays
  misc_feature (1)..(1460): Ceres Seq. ID no. 12350660
  misc_feature: MA Experiment ID: 20000534 Result: Down-regulated in Transcription
  misc_feature: MA Experiment 20000534 PARAMETER Experiment Name: Zm_Hybrid_Pollen_P Parameter: Age (day) Value: 8
  misc_feature: MA Experiment 20000534 PARAMETER Experiment Name: Zm_Hybrid_Pollen_P Parameter: Organism Value: Zea mays
  misc_feature: MA Experiment 20000534 PARAMETER Experiment Name: Zm_Hybrid_Pollen_P Parameter: Plant Line Value: 35A19
  misc_feature: MA Experiment 20000534 PARAMETER Experiment Name: Zm_Hybrid_Pollen_P Parameter: Tissue Value: Pollen vs. Aerial
  misc_feature: MA Experiment ID: 20000626 Result: Up-regulated in Transcription
  misc_feature: MA Experiment 20000626 PARAMETER Experiment Name: Zm_Herbicide-Treatments_P Parameter: Timepoint (hr) Value: 12
  misc_feature: MA Experiment 20000626 PARAMETER Experiment Name: Zm_Herbicide-Treatments_P Parameter: Tissue Value: Aerial
  misc_feature: MA Experiment 20000626 PARAMETER Experiment Name: Zm_Herbicide-Treatments_P Parameter: Treatment Value: Roundup vs. No Treatment
gactagctattagggttttgtttgcaaaccccaattcgattcccaaccacatcagccgccgccgtcccgtcaccaccaccaaccttggtagcagccgccgtccggtcatcaccaccaccttggtagccgccgccgaagcgcgccgcgggcgcgggcgctcgcgatggctaaccgcacggaccccctcgcgaagagcatccatgggacgaacccacaaaacctggtggagaagatcgtgcgctccaagatctatcagagcacctactggaaggagcaatgcttcggcctcaccgcagagacgctagtcgacaaggccatggagctcgaccacaccggcggaacctacggcggcaaccgcaagcccacccctttcctctgcctcgcgctcaagatgctgcagatccaaccagacaaggacatcgtagtcgagttcatcaagaacgaggattacaagtatgttcgtgttctcggggccttctacctgcgtctcactggcacaattgctgacgtctaccagtatcttgagccgctctacaacgactaccgcaagatcaggcacaagctcagcgatggacagttcacacttacccatgttgatgagttcattgatgagttgctgaccaaggattactcctgtgatacagccatgcctcgcatccagaaaagatgggttcttgaagcgtctggaactctggaaccgagaagaagtgcacttgaggacgattttgaggaagaagaggaagacaaggaggaacagcctatggaaattgatgaaccgaatggtcgtgaaaatgataatcatcgtggaaggagccttgccagggaacgggatagggactgggaccatgacaggaaacatgaaaggcataacagggacaaagattatgatagagatcgggattatgatagggactatgggagagggcgggaaagacaccgagatagagatcgtgaaagagacagaaaccgggatagggatagagaccgtcaccgcctgcgagatgatgattacaatcgcaacagggatagggacagggagagggatggtagggaaagggagcgccgagacagagaccgtggcaggcacaggagccgctcaaggagcagagatcgacgggacagagaccgtgaagatggagagtaccgcaggaggcgtggtcgtggcagtgtaagtcctcgaggacgtggtgaagacggtggcccaagagaggaacctaagaggaagaaggaaaagaaagagaagggtgaaggaaatgctccggacccgaatgaccctgagatcatagaaatgaacaagctacgggcctcactggggttgaaaccactaaagtagtttacacgagtaatgttcaacttgacctgcatccaaccttttttgtgctggactttttcagcttgatgtaactaaacttttgtattgatgtggttatatattcatcagggcttccatttctgtctgc

SEQ ID NO: 16456 - protein, 389 aa, Zea mays subsp. mays
  peptide (1)..(389): Ceres Seq. ID no. 12350661
  misc_feature (1)..(177): Pfam Name: PRP38 family Pfam Description: PRP38 family
  misc_feature (1)..(389): Homolog of NCBI NO: 23508527 NR Description: hypothetical protein, conserved [Plasmodium
  misc_feature (10)..(370): Homolog of NCBI NO: 28829361 NR Description: similar to Arabidopsis thaliana (Mouse-ear
  misc_feature (1)..(305): Homolog of NCBI NO: 39593428 NR Description: Hypothetical protein CBG09713 [Caenorhabditis
  misc_feature (1)..(302): Homolog of NCBI NO: 17559118 NR Description: PRP38 family (38.2 kD) [Caenorhabditis elegans]
  misc_feature (1)..(309): Homolog of NCBI NO: 27370014 NR Description: RIKEN cDNA 2410002M20 [Mus musculus]
  misc_feature (1)..(309): Homolog of NCBI NO: 24762236 NR Description: hypothetical protein FLJ14936 [Homo sapiens]
  misc_feature (1)..(322): Homolog of NCBI NO: 22024089 NR Description: CG30342-PA [Drosophila melanogaster]
  misc_feature (1)..(332): Homolog of NCBI NO: 31248148 NR Description: ENSANGP00000012048 [Anopheles gambiae]
  misc_feature (1)..(352): Homolog of NCBI NO: 25408716 NR Description: hypothetical protein At2g40650 [imported] -
  misc_feature (1)..(352): Homolog of NCBI NO: 18405463 NR Description: expressed protein
MANRTDPLAKSIHGTNPQNLVEKIVRSKIYQSTYWKEQCFGLTAETLVDKAMELDHTGGTYGGNRKPTPFLCLALKMLQIQPDKDIVVEFIKNEDYKYVRVLGAFYLRLTGTIADVYQYLEPLYNDYRKIRHKLSDGQFTLTHVDEFIDELLTKDYSCDTAMPRIQKRWVLEASGTLEPRRSALEDDFEEEEEDKEEQPMEIDEPNGRENDNHRGRSLARERDRDWDHDRKHERHNRDKDYDRDRDYDRDYGRGRERHRDRDRERDRNRDRDRDRHRLRDDDYNRNRDRDRERDGRERERRDRDRGRHRSRSRSRDRRDRDREDGEYRRRRGRGSVSPRGRGEDGGPREEPKRKKEKKEKGEGNAPDPNDPEIIEMNKLRASLGLKPLK

SEQ ID NO: 16457 - protein, 338 aa, Zea mays subsp. mays
  peptide (1)..(338): Ceres Seq. ID no. 12350662
  misc_feature (1)..(126): Pfam Name: PRP38 family Pfam Description: PRP38 family
  misc_feature (1)..(338): Homolog of NCBI NO: 23508527 NR Description: hypothetical protein, conserved [Plasmodium
  misc_feature (1)..(319): Homolog of NCBI NO: 28829361 NR Description: similar to Arabidopsis thaliana (Mouse-ear
  misc_feature (1)..(254): Homolog of NCBI NO: 39593428 NR Description: Hypothetical protein CBG09713 [Caenorhabditis
  misc_feature (1)..(251): Homolog of NCBI NO: 17559118 NR Description: PRP38 family (38.2 kD) [Caenorhabditis elegans]
  misc_feature (1)..(258): Homolog of NCBI NO: 27370014 NR Description: RIKEN cDNA 2410002M20 [Mus musculus]
  misc_feature (1)..(258): Homolog of NCBI NO: 24762236 NR Description: hypothetical protein FLJ14936 [Homo sapiens]
  misc_feature (1)..(271): Homolog of NCBI NO: 22024089 NR Description: CG30342-PA [Drosophila melanogaster]
  misc_feature (1)..(281): Homolog of NCBI NO: 31248148 NR Description: ENSANGP00000012048 [Anopheles gambiae]
  misc_feature (1)..(301): Homolog of NCBI NO: 25408716 NR Description: hypothetical protein At2g40650 [imported] -
  misc_feature (1)..(301): Homolog of NCBI NO: 18405463 NR Description: expressed protein
MELDHTGGTYGGNRKPTPFLCLALKMLQIQPDKDIVVEFIKNEDYKYVRVLGAFYLRLTGTIADVYQYLEPLYNDYRKIRHKLSDGQFTLTHVDEFIDELLTKDYSCDTAMPRIQKRWVLEASGTLEPRRSALEDDFEEEEEDKEEQPMEIDEPNGRENDNHRGRSLARERDRDWDHDRKHERHNRDKDYDRDRDYDRDYGRGRERHRDRDRERDRNRDRDRDRHRLRDDDYNRNRDRDRERDGRERERRDRDRGRHRSRSRSRDRRDRDREDGEYRRRRGRGSVSPRGRGEDGGPREEPKRKKEKKEKGEGNAPDPNDPEIIEMNKLRASLGLKPLK

SEQ ID NO: 16458 - protein, 313 aa, Zea mays subsp. mays
  peptide (1)..(313): Ceres Seq. ID no. 12350663
  misc_feature (1)..(101): Pfam Name: PRP38 family Pfam Description: PRP38 family
  misc_feature (1)..(313): Homolog of NCBI NO: 23508527 NR Description: hypothetical protein, conserved [Plasmodium
  misc_feature (1)..(294): Homolog of NCBI NO: 28829361 NR Description: similar to Arabidopsis thaliana (Mouse-ear
  misc_feature (1)..(229): Homolog of NCBI NO: 39593428 NR Description: Hypothetical protein CBG09713 [Caenorhabditis
  misc_feature (1)..(226): Homolog of NCBI NO: 17559118 NR Description: PRP38 family (38.2 kD) [Caenorhabditis elegans]
  misc_feature (1)..(233): Homolog of NCBI NO: 27370014 NR Description: RIKEN cDNA 2410002M20 [Mus musculus]
  misc_feature (1)..(233): Homolog of NCBI NO: 24762236 NR Description: hypothetical protein FLJ14936 [Homo sapiens]
  misc_feature (1)..(246): Homolog of NCBI NO: 22024089 NR Description: CG30342-PA [Drosophila melanogaster]
  misc_feature (1)..(256): Homolog of NCBI NO: 31248148 NR Description: ENSANGP00000012048 [Anopheles gambiae]
  misc_feature (1)..(276): Homolog of NCBI NO: 25408716 NR Description: hypothetical protein At2g40650 [imported] -
  misc_feature (1)..(276): Homolog of NCBI NO: 18405463 NR Description: expressed protein
MLQIQPDKDIVVEFIKNEDYKYVRVLGAFYLRLTGTIADVYQYLEPLYNDYRKIRHKLSDGQFTLTHVDEFIDELLTKDYSCDTAMPRIQKRWVLEASGTLEPRRSALEDDFEEEEEDKEEQPMEIDEPNGRENDNHRGRSLARERDRDWDHDRKHERHNRDKDYDRDRDYDRDYGRGRERHRDRDRERDRNRDRDRDRHRLRDDDYNRNRDRDRERDGRERERRDRDRGRHRSRSRSRDRRDRDREDGEYRRRRGRGSVSPRGRGEDGGPREEPKRKKEKKEKGEGNAPDPNDPEIIEMNKLRASLGLKPLK

SEQ ID NO: 16459 - DNA, 1692 bp, Zea mays subsp. mays
  misc_feature (1)..(1692): Ceres Seq. ID no. 12367838
  misc_feature: MA Experiment ID: 108527 Result: Down-regulated in Transcription
  misc_feature: MA Experiment 108527 PARAMETER Experiment Name: Zm_5mM_NO_P Parameter: Age (day) Value: 8
  misc_feature: MA Experiment 108527 PARAMETER Experiment Name: Zm_5mM_NO_P Parameter: Organism Value: Zea mays
  misc_feature: MA Experiment 108527 PARAMETER Experiment Name: Zm_5mM_NO_P Parameter: Plant Line Value: 35A19
  misc_feature: MA Experiment 108527 PARAMETER Experiment Name: Zm_5mM_NO_P Parameter: Timepoint (hr) Value: 6
  misc_feature: MA Experiment 108527 PARAMETER Experiment Name: Zm_5mM_NO_P Parameter: Tissue Value: Aerial
  misc_feature: MA Experiment 108527 PARAMETER Experiment Name: Zm_5mM_NO_P Parameter: Treatment Value: 5mM NO vs. No Treatment
  misc_feature: MA Experiment ID: 108535 Result: Down-regulated in Transcription
  misc_feature: MA Experiment 108535 PARAMETER Experiment Name: Zm_Meristem_P Parameter: Age (day) Value: 8
  misc_feature: MA Experiment 108535 PARAMETER Experiment Name: Zm_Meristem_P Parameter: Organism Value: Zea mays
  misc_feature: MA Experiment 108535 PARAMETER Experiment Name: Zm_Meristem_P Parameter: Plant Line Value: 35A19
  misc_feature: MA Experiment 108535 PARAMETER Experiment Name: Zm_Meristem_P Parameter: Tissue Value: Root Meristem vs. Above Root Meristem
  misc_feature: MA Experiment ID: 108543 Result: Up-regulated in Transcription
  misc_feature: MA Experiment ID: 108687 Result: Down-regulated in Transcription
  misc_feature: MA Experiment 108687 PARAMETER Experiment Name: Zm_Embryos-Flowers__P Parameter: Tissue Value: Embryo vs. Aerial+
  misc_feature: MA Experiment ID: 108689 Result: Up-regulated in Transcription
  misc_feature: MA Experiment 108689 PARAMETER Experiment Name: Zm_Drought_Roots_P Parameter: Age (day) Value: 9
  misc_feature: MA Experiment 108689 PARAMETER Experiment Name: Zm_Drought_Roots_P Parameter: Organism Value: Zea mays
  misc_feature: MA Experiment 108689 PARAMETER Experiment Name: Zm_Drought_Roots_P Parameter: Plant Line Value: 35A19
  misc_feature: MA Experiment 108689 PARAMETER Experiment Name: Zm_Drought_Roots_P Parameter: Timepoint (hr) Value: 24
  misc_feature: MA Experiment 108689 PARAMETER Experiment Name: Zm_Drought_Roots_P Parameter: Tissue Value: Roots
  misc_feature: MA Experiment 108689 PARAMETER Experiment Name: Zm_Drought_Roots_P Parameter: Treatment Value: Drought vs. No Drought
  misc_feature: MA Experiment ID: 20000480 Result: Down-regulated in Transcription
  misc_feature: MA Experiment 20000480 PARAMETER Experiment Name: Zm_Drought_P Parameter: Age (day) Value: 11
  misc_feature: MA Experiment 20000480 PARAMETER Experiment Name: Zm_Drought_P Parameter: Organism Value: Zea mays
  misc_feature: MA Experiment 20000480 PARAMETER Experiment Name: Zm_Drought_P Parameter: Plant Line Value: 35A19
  misc_feature: MA Experiment 20000480 PARAMETER Experiment Name: Zm_Drought_P Parameter: Timepoint (hr) Value: 72
  misc_feature: MA Experiment 20000480 PARAMETER Experiment Name: Zm_Drought_P Parameter: Tissue Value: Aerial
  misc_feature: MA Experiment 20000480 PARAMETER Experiment Name: Zm_Drought_P Parameter: Treatment Value: Drought vs. No Drought
  misc_feature: MA Experiment ID: 20000535 Result: Down-regulated in Transcription
  misc_feature: MA Experiment 20000535 PARAMETER Experiment Name: Zm_Hybrid_Seed_Dev_P Parameter: DAP Value: 30 vs. 12
  misc_feature: MA Experiment 20000535 PARAMETER Experiment Name: Zm_Hybrid_Seed_Dev_P Parameter: Organism Value: Zea mays
  misc_feature: MA Experiment 20000535 PARAMETER Experiment Name: Zm_Hybrid_Seed_Dev_P Parameter: Plant Line Value: 35A19
  misc_feature: MA Experiment 20000535 PARAMETER Experiment Name: Zm_Hybrid_Seed_Dev_P Parameter: Tissue Value: Embryo vs. Unfert Floret
agcactcactcacgcccggccctgcactgcacgcgcgcggcgggagatcgagaagagactttgctcggttttggtaggcatccgcgcggagcgtgaccagacggtgtagagactacatagatcggaagggggtcggaaggggatctagacatagagactagagagcgaggaggatgaccggcgttgttgcaggcgccggagggggcaacaaggcggcgcccgccacgctgcggctgcaccactaccttgtgatggccggggtggcggcggcggtcgtcctcgcctgcctccggtacgcgccggaccccgcggggtacggcttcctggccgtggcgccgcggccggtggaggccgatgctggtgcccggcgggacaccactcctccaccgcgcccgtcgtcgtcgtcggtggtcatcttcaacttcggtgactccaactccgacacgggcggcatggcggcggtcaacgggatgaacattaacctgcccgagggacgcaccttcttccgccgccccaccggaaggctctccgacggccgcctcgtcatcgacttcatctgtgagagcctgcacacgcctttcctgagcccatacctcaaggcgctgggcgcggatttcagcaacggcgtgaacttcgccatcggcgggtccacggcgacgccggggggctctcccttctcgctggacgtgcagctccatcagtggctctacttcagggccaggtccatggagatgatcaacctaggacagaggcctcccatcgatcgcgaaggattccgaaaggccatctacaccatcgacatcgggcaaaacgacgtgtctgcttacatgcacctgccctacgaccaagtgcttgccaagatccccggatttgttgctcagatcaagtacaccatcgagacgctgtactcgcacggggcccgcaagttctggatccacggcacgggcgcgctgggctgcctgccgcagaagctggccatcccgcgggacgccgacgacggcgaccagctggacgcccacggctgcctcaagacctacaacaacgccgccaagcgcttcaacgcgctgctcggcgacgcctgcgcccagctccggcgccggatggtggacgcggcgctcgtcttcgtcgacatgtacgccgtcaagtacgacctggtggccaaccacacgacgcacgggatcgagaaacctctcatggcgtgctgcggctacggcgggccgccgtacaactacaaccacttcaaggcgtgcatgtcggcggagatgcagctgtgcgacgtgggcacgcgcttcatcagctgggacggcgtgcacttcaccgaggccgccaacgccatcgtcgccgccaaggtgctcaccggcgactactccacgcccagggtcaccatcgccaaactcgtcaactccacgctgcccaacgacgactagctggctggccgatcgatcgatcgtcgcgtcgtcattctgataaacatactgcaggcaggcttcatcgatccatatccaattgtccgtagaaatctacgactagctcattgtagatccgtaatgtgggctaagagatgcatcatgcatggcgatcgactagctgcccaactcgtcaagagctggttcaccgctctcgtcatgatcgagctagtttggacgagcaaattccatggcaccgagtaacacaattgatatcctcattggc

SEQ ID NO: 16460 - protein, 417 aa, Zea mays subsp. mays
  peptide (1)..(417): Ceres Seq. ID no. 12367839
  misc_feature (81)..(393): Pfam Name: GDSL-like Lipase/Acylhydrolase Pfam Description: GDSL-like Lipase/Acylhydrolase
  misc_feature (82)..(401): Homolog of NCBI NO: 21537184 NR Description: early nodule-specific protein, putative
  misc_feature (82)..(401): Homolog of NCBI NO: 18405064 NR Description: early nodule-specific protein, putative
  misc_feature (74)..(401): Homolog of NCBI NO: 25405771 NR Description: hypothetical protein T22H22.20 [imported] -
  misc_feature (85)..(382): Homolog of NCBI NO: 25336281 NR Description: lipase-like protein Lip-4
  misc_feature (130)..(403): Homolog of NCBI NO: 34894844 NR Description: putative lipase homolog [Oryza sativa (japonica
  misc_feature (71)..(401): Homolog of NCBI NO: 15223585 NR Description: nodule-specific protein, putative; protein id:
  misc_feature (80)..(401): Homolog of NCBI NO: 15217506 NR Description: putative lipase; protein id: At1g09390.1
  misc_feature (51)..(403): Homolog of NCBI NO: 34894866 NR Description: putative lipase homolog [Oryza sativa (japonica
  misc_feature (4)..(68): Homolog of NCBI NO: 34894838 NR Description: putative lipase homolog [Oryza sativa (japonica
  misc_feature (75)..(416): Homolog of NCBI NO: 34894838 NR Description: putative lipase homolog [Oryza sativa (japonica
MTGVVAGAGGGNKAAPATLRLHHYLVMAGVAAAVVLACLRYAPDPAGYGFLAVAPRPVEADAGARRDTTPPPRPSSSSVVIFNFGDSNSDTGGMAAVNGMNINLPEGRTFFRRPTGRLSDGRLVIDFICESLHTPFLSPYLKALGADFSNGVNFAIGGSTATPGGSPFSLDVQLHQWLYFRARSMEMINLGQRPPIDREGFRKAIYTIDIGQNDVSAYMHLPYDQVLAKIPGFVAQIKYTIETLYSHGARKFWIHGTGALGCLPQKLAIPRDADDGDQLDAHGCLKTYNNAAKRFNALLGDACAQLRRRMVDAALVFVDMYAVKYDLVANHTTHGIEKPLMACCGYGGPPYNYNHFKACMSAEMQLCDVGTRFISWDGVHFTEAANAIVAAKVLTGDYSTPRVTIAKLVNSTLPNDD

SEQ ID NO: 16461 - protein, 391 aa, Zea mays subsp. mays
  peptide (1)..(391): Ceres Seq. ID no. 12367840
  misc_feature (55)..(367): Pfam Name: GDSL-like Lipase/Acylhydrolase Pfam Description: GDSL-like Lipase/Acylhydrolase
  misc_feature (56)..(375): Homolog of NCBI NO: 21537184 NR Description: early nodule-specific protein, putative
  misc_feature (56)..(375): Homolog of NCBI NO: 18405064 NR Description: early nodule-specific protein, putative
  misc_feature (48)..(375): Homolog of NCBI NO: 25405771 NR Description: hypothetical protein T22H22.20 [imported] -
  misc_feature (59)..(356): Homolog of NCBI NO: 25336281 NR Description: lipase-like protein Lip-4
  misc_feature (104)..(377): Homolog of NCBI NO: 34894844 NR Description: putative lipase homolog [Oryza sativa (japonica
  misc_feature (45)..(375): Homolog of NCBI NO: 15223585 NR Description: nodule-specific protein, putative; protein id:
  misc_feature (54)..(375): Homolog of NCBI NO: 15217506 NR Description: putative lipase; protein id: At1g09390.1
  misc_feature (25)..(377): Homolog of NCBI NO: 34894866 NR Description: putative lipase homolog [Oryza sativa (japonica
  misc_feature (1)..(42): Homolog of NCBI NO: 34894838 NR Description: putative lipase homolog [Oryza sativa (japonica
  misc_feature (49)..(390): Homolog of NCBI NO: 34894838 NR Description: putative lipase homolog [Oryza sativa (japonica
MAGVAAAVVLACLRYAPDPAGYGFLAVAPRPVEADAGARRDTTPPPRPSSSSVVIFNFGDSNSDTGGMAAVNGMNINLPEGRTFFRRPTGRLSDGRLVIDFICESLHTPFLSPYLKALGADFSNGVNFAIGGSTATPGGSPFSLDVQLHQWLYFRARSMEMINLGQRPPIDREGFRKAIYTIDIGQNDVSAYMHLPYDQVLAKIPGFVAQIKYTIETLYSHGARKFWIHGTGALGCLPQKLAIPRDADDGDQLDAHGCLKTYNNAAKRFNALLGDACAQLRRRMVDAALVFVDMYAVKYDLVANHTTHGIEKPLMACCGYGGPPYNYNHFKACMSAEMQLCDVGTRFISWDGVHFTEAANAIVAAKVLTGDYSTPRVTIAKLVNSTLPNDD

SEQ ID NO: 16462 - protein, 324 aa, Zea mays subsp. mays
  peptide (1)..(324): Ceres Seq. ID no. 12367841
  misc_feature (1)..(300): Pfam Name: GDSL-like Lipase/Acylhydrolase Pfam Description: GDSL-like Lipase/Acylhydrolase
  misc_feature (1)..(308): Homolog of NCBI NO: 15223585 NR Description: nodule-specific protein, putative; protein id:
  misc_feature (1)..(308): Homolog of NCBI NO: 15217506 NR Description: putative lipase; protein id: At1g09390.1
  misc_feature (1)..(149): Homolog of NCBI NO: 15228721 NR Description: putative protein; protein id: At3g62280.1
  misc_feature (1)..(308): Homolog of NCBI NO: 18405064 NR Description: early nodule-specific protein, putative
  misc_feature (1)..(289): Homolog of NCBI NO: 25336281 NR Description: lipase-like protein Lip-4
  misc_feature (37)..(310): Homolog of NCBI NO: 34894844 NR Description: putative lipase homolog [Oryza sativa (japonica
  misc_feature (1)..(308): Homolog of NCBI NO: 25405771 NR Description: hypothetical protein T22H22.20 [imported] -
  misc_feature (1)..(308): Homolog of NCBI NO: 21537184 NR Description: early nodule-specific protein, putative
  misc_feature (1)..(310): Homolog of NCBI NO: 34894866 NR Description: putative lipase homolog [Oryza sativa (japonica
  misc_feature (1)..(323): Homolog of NCBI NO: 34894838 NR Description: putative lipase homolog [Oryza sativa (japonica
MAAVNGMNINLPEGRTFFRRPTGRLSDGRLVIDFICESLHTPFLSPYLKALGADFSNGVNFAIGGSTATPGGSPFSLDVQLHQWLYFRARSMEMINLGQRPPIDREGFRKAIYTIDIGQNDVSAYMHLPYDQVLAKIPGFVAQIKYTIETLYSHGARKFWIHGTGALGCLPQKLAIPRDADDGDQLDAHGCLKTYNNAAKRFNALLGDACAQLRRRMVDAALVFVDMYAVKYDLVANHTTHGIEKPLMACCGYGGPPYNYNHFKACMSAEMQLCDVGTRFISWDGVHFTEAANAIVAAKVLTGDYSTPRVTIAKLVNSTLPNDD

SEQ ID NO: 16463 - DNA, 1073 bp, Zea mays subsp. mays
  misc_feature (1)..(1073): Ceres Seq. ID no. 12405278
  misc_feature: MA Experiment ID: 108522 Result: Up-regulated in Transcription
  misc_feature: MA Experiment 108522 PARAMETER Experiment Name: Zm_42deg_Heat_P Parameter: Age (day) Value: 8
  misc_feature: MA Experiment 108522 PARAMETER Experiment Name: Zm_42deg_Heat_P Parameter: Organism Value: Zea mays
  misc_feature: MA Experiment 108522 PARAMETER Experiment Name: Zm_42deg_Heat_P Parameter: Plant Line Value: 35A19
  misc_feature: MA Experiment 108522 PARAMETER Experiment Name: Zm_42deg_Heat_P Parameter: Temperature (deg C) Value: 42 vs. 22
  misc_feature: MA Experiment 108522 PARAMETER Experiment Name: Zm_42deg_Heat_P Parameter: Timepoint (hr) Value: 1
  misc_feature: MA Experiment 108522 PARAMETER Experiment Name: Zm_42deg_Heat_P Parameter: Tissue Value: Aerial
aatccccacccgcaacaaaccaaacccaaccgcaactgcaacacagaggcatctctctccgcctccacgccgccgcccccagaccctcctcgatccaggcggtgattcgccgggctcccggcccggccatggatttgctggcgtccttggccgccgaggagcggtggctgttcccggcgttcctcgccatgtacgccgccatctactgcgccggccagctcgtcgtgttccggcggtgggcgccgcggcagaggctcgacggcgccagctgcctcatctcgctattccacggcacccccgccgcgctggccgccgcgggggccatcctcgcgcttcccgcggagtcccgctccttcgccgcgcccaacgcgcgcctccaggaccacgtcctcgactacagcgtcgcctacttcaccatggacctgctccactacctcgcctttctgccgggcgacgtcctcttcatcgcgcaccacctcgccacgctcttcgtcttcctgacctgccgctacctcgtccgccacggcgcctacgcgctcctcgtcctcctcgtcctcgccgaggtcaccagcctgctgcagaacgtctggacgctcgccgggatctggcgggaccagtcccccgccgccgcccgcgtcctacggcgccctctcgccgcccttctacgcgctctacacgctcgtcaggggcgtcgccggcccgctcttcctcctcaagatggccgccttctacctgtccggccaggccgtcgacgtcattccgtggtgggtgcggatctcctggatcctggaggaactgagcggtggggcccgcgcggccaagttatcctgttcgctaccgtgatgtttaccctagtccagagggtttatcttcgttcgtgtcgtgtttgttgttgcccatctgtgtttttgattgcaaggtcgctctgtgtcagttgttagtgctgtgttcatcctcggtttcagcagacccatgcatcaaacagcatggactgcggatcgatggatgctgttacccccgtcaggctttatttctaagttaatcttaaggnaaaaatggtgcttcttggtgct

SEQ ID NO: 16464 - protein, 312 aa, Zea mays subsp. mays
  peptide (1)..(312): Ceres Seq. ID no. 12405279
  misc_feature (58)..(214): Homolog of NCBI NO: 15232128 NR Description: unknown protein; protein id: At3g27270.1
  misc_feature (58)..(207): Homolog of NCBI NO: 26450181 NR Description: unknown protein [Arabidopsis thaliana]
  misc_feature (58)..(207): Homolog of NCBI NO: 15241364 NR Description: putative protein; protein id: At5g14280.1
  misc_feature (57)..(218): Homolog of NCBI NO: 15230950 NR Description: hypothetical protein; protein id: At3g25950.1
  misc_feature (57)..(218): Homolog of NCBI NO: 9279600 NR Description: gene_id:MPE11.12~unknown protein [Arabidopsis
  misc_feature (58)..(214): Homolog of NCBI NO: 15232128 NR Description: unknown protein; protein id: At3g27270.1
  misc_feature (58)..(207): Homolog of NCBI NO: 26450181 NR Description: unknown protein [Arabidopsis thaliana]
  misc_feature (58)..(207): Homolog of NCBI NO: 15241364 NR Description: putative protein; protein id: At5g14280.1
  misc_feature (57)..(218): Homolog of NCBI NO: 15230950 NR Description: hypothetical protein; protein id: At3g25950.1
  misc_feature (57)..(218): Homolog of NCBI NO: 9279600 NR Description: gene_id:MPE11.12~unknown protein [Arabidopsis
SPPATNQTQPQLQHRGISLRLHAAAPRPSSIQAVIRRAPGPAMDLLASLAAEERWLFPAFLAMYAAIYCAGQLVVFRRWAPRQRLDGASCLISLFHGTPAALAAAGAILALPAESRSFAAPNARLQDHVLDYSVAYFTMDLLHYLAFLPGDVLFIAHHLATLFVFLTCRYLVRHGAYALLVLLVLAEVTSLLQNVWTLAGIWRDQSPAAARVLRRPLAALLRALHARQGRRRPALPPQDGRLLPVRPGRRRHSVVGADLLDPGGTERWGPRGQVILFATVMFTLVQRVYLRSCRVCCCPSVFLIARSLCVSC

SEQ ID NO: 16465 - protein, 270 aa, Zea mays subsp. mays
  peptide (1)..(270): Ceres Seq. ID no. 12405280
  misc_feature (16)..(172): Homolog of NCBI NO: 15232128 NR Description: unknown protein; protein id: At3g27270.1
  misc_feature (16)..(165): Homolog of NCBI NO: 26450181 NR Description: unknown protein [Arabidopsis thaliana]
  misc_feature (16)..(165): Homolog of NCBI NO: 15241364 NR Description: putative protein; protein id: At5g14280.1
  misc_feature (15)..(176): Homolog of NCBI NO: 15230950 NR Description: hypothetical protein; protein id: At3g25950.1
  misc_feature (15)..(176): Homolog of NCBI NO: 9279600 NR Description: gene_id:MPE11.12~unknown protein [Arabidopsis
  misc_feature (16)..(172): Homolog of NCBI NO: 15232128 NR Description: unknown protein; protein id: At3g27270.1
  misc_feature (16)..(165): Homolog of NCBI NO: 26450181 NR Description: unknown protein [Arabidopsis thaliana]
  misc_feature (16)..(165): Homolog of NCBI NO: 15241364 NR Description: putative protein; protein id: At5g14280.1
  misc_feature (15)..(176): Homolog of NCBI NO: 15230950 NR Description: hypothetical protein; protein id: At3g25950.1
  misc_feature (15)..(176): Homolog of NCBI NO: 9279600 NR Description: gene_id:MPE11.12~unknown protein [Arabidopsis
MDLLASLAAEERWLFPAFLAMYAAIYCAGQLVVFRRWAPRQRLDGASCLISLFHGTPAALAAAGAILALPAESRSFAAPNARLQDHVLDYSVAYFTMDLLHYLAFLPGDVLFIAHHLATLFVFLTCRYLVRHGAYALLVLLVLAEVTSLLQNVWTLAGIWRDQSPAAARVLRRPLAALLRALHARQGRRRPALPPQDGRLLPVRPGRRRHSVVGADLLDPGGTERWGPRGQVILFATVMFTLVQRVYLRSCRVCCCPSVFLIARSLCVSC

SEQ ID NO: 16466 - protein, 265 aa, Zea mays subsp. mays
  peptide (1)..(265): Ceres Seq. ID no. 12405281
  misc_feature (72)..(248): Homolog of NCBI NO: 15219287 NR Description: arginine/serine-rich protein, putative
  misc_feature (62)..(265): Homolog of NCBI NO: 25143299 NR Description: pre-mRNA splicing SR protein related RSR-1 (68.2
  misc_feature (4)..(265): Homolog of NCBI NO: 23018055 NR Description: hypothetical protein [Thermobifida fusca]
  misc_feature (13)..(252): Homolog of NCBI NO: 29247944 NR Description: GLP_26_54603_52153 [Giardia lamblia ATCC 50803]
  misc_feature (72)..(248): Homolog of NCBI NO: 15219287 NR Description: arginine/serine-rich protein, putative
  misc_feature (62)..(265): Homolog of NCBI NO: 25143299 NR Description: pre-mRNA splicing SR protein related RSR-1 (68.2
  misc_feature (4)..(265): Homolog of NCBI NO: 23018055 NR Description: hypothetical protein [Thermobifida fusca]
  misc_feature (13)..(252): Homolog of NCBI NO: 29247944 NR Description: GLP_26_54603_52153 [Giardia lamblia ATCC 50803]
IPTRNKPNPTATATQRHLSPPPRRRPQTLLDPGGDSPGSRPGHGFAGVLGRRGAVAVPGVPRHVRRHLLRRPARRVPAVGAAAEARRRQLPHLAIPRHPRRAGRRGGHPRASRGVPLLRRAQRAPPGPRPRLQRRLLHHGPAPLPRLSAGRRPLHRAPPRHALRLPDLPLPRPPRRLRAPRPPRPRRGHQPAAERLDARRDLAGPVPRRRPRPTAPSRRPSTRSTRSSGASPARSSSSRWPPSTCPARPSTSFRGGCGSPGSWRN

SEQ ID NO: 16467 - DNA, 1891 bp, Zea mays subsp. mays
  misc_feature (1)..(1891): Ceres Seq. ID no. 12366083
  misc_feature: MA Experiment ID: 108529 Result: Up-regulated in Transcription
  misc_feature: MA Experiment 108529 PARAMETER Experiment Name: Zm_Imbibed_Seeds_P Parameter: Age (day) Value: 5 vs. 2
  misc_feature: MA Experiment 108529 PARAMETER Experiment Name: Zm_Imbibed_Seeds_P Parameter: Organism Value: Zea mays
  misc_feature: MA Experiment 108529 PARAMETER Experiment Name: Zm_Imbibed_Seeds_P Parameter: Plant Line Value: 35A19
  misc_feature: MA Experiment 108529 PARAMETER Experiment Name: Zm_Imbibed_Seeds_P Parameter: Tissue Value: Roots vs. Embryo
  misc_feature: MA Experiment ID: 108535 Result: Down-regulated in Transcription
  misc_feature: MA Experiment 108535 PARAMETER Experiment Name: Zm_Meristem_P Parameter: Age (day) Value: 8
  misc_feature: MA Experiment 108535 PARAMETER Experiment Name: Zm_Meristem_P Parameter: Organism Value: Zea mays
  misc_feature: MA Experiment 108535 PARAMETER Experiment Name: Zm_Meristem_P Parameter: Plant Line Value: 35A19
  misc_feature: MA Experiment 108535 PARAMETER Experiment Name: Zm_Meristem_P Parameter: Tissue Value: Root Meristem vs. Above Root Meristem
atatattaaccgcgcaccttttgtcctctccttgttcccaaacctctgctagcttcgcttccaaccccatcgatacttcccagcaagctacactacaagctcatccgcctagtcctttcatggccgatcaccagcctcaggtcgaggtcctgaccgagtcagtgcgggtcaacggcaccaaggcggaggccacgctcgtgggaggcgagctggcgtggcgccccgccgccggcggcaacggagaggggcaggagcggcggctggagctggagtcggaggtgctcgggttccagatggacgggaggcagctcaaattcgcgacctttgccgcgagcggcggcggtaatgggaaagggggaggaggggatgggaatcggaggagaggggaggtggagatggagatggagaacgaggccaccgcggtgcggtggggggacgtaatcagtgatcgcctagcctcgctcggccggccaaagaaattgttcattatagtgaacccttatggtggaaagagaagcggaccgagtattttccagaatgaagtcctccccctcattgaagcttctggcgtgctttatacgatgcaagaaaccaagcatcgccttcatgctcaagagattgcacattcacttgatcttaggaagtatgacggcatcatttgtgtcagtggagatggtgtgatggtagaggttgtcaatggtctcctgcaaagggaggactgggaagcagcaataaaagtgccccttgggatcattccagcaggtactggaaatggaatggcacgatctctactgcatgctgctggtgaaccattctctatatctaatgctgtgttcgcaatcatcagaggtcataaacgtgcccttgatgttacttctgttgtgcagggaaaggcgaggttctttagtgtcctgatgcttacatggggtctggtggctgatgttgatattgaatcagagaagtataggtggatgggaagtgctcgccttgatttttatcttctactccgcattctgaacctgcgacggtacaatgggcgtatcctttttgttccagcaccaggatacgaagaagttggtgatcctgtggaccaagctaccggttacgaaacaaacgggtttagcacgggatttcaagacgacggaagaaccggcagtaatggtgagacgtgtggctatgtgggcccatcgtcgatcaaagaagctggtcttagatggagatcactggatgggccattcgtttcagtctggctcggcaatgttcctttcgctagcgaagatgccatggcagcaccaaaagctgagtttgcggatggctacttggatgctgctataatcaaggattgtcctcggtgggatgtcctcgggctcgtgttccagatgaaggacggcagctacgtgaactcgccatgcgtggagtacttcaaggtgaaggcgatccggatcgagccgggcctgcgcgtgggcagcagcaccgagggcggtatcatcgactcggacggggaggtgatcgcgaggggcgacgagtccgattcccgcgccggcgacgacgagccggggcacctgatggcgtacggcccgcccatccagctgacggtggaccaggggctggccaccatcttctccccgagatgacgatccttctctcagttctcctccaccgcctgcgagtaatttgcttcgtctagccctgcctgccattctctcgcgtaggatcatgtgcttctgtatgtaaatattgctcacagcccaccccagttggatgagcgatgagccaagagggacggatactggctggatctccgtctatagattgttttatttccctgcccacatggctgccgcttttagtgctagcttgagaaatgagagctgggcagttcataagcttc

SEQ ID NO: 16468 - protein, 543 aa, Zea mays subsp. mays
  peptide (1)..(543): Ceres Seq. ID no. 12366084
  misc_feature (159)..(254): Pfam Name: Diacylglycerol kinase catalytic domain (presumed) Pfam Description: Diacylglycerol kinase catalytic domain
  misc_feature (125)..(352): Homolog of NCBI NO: 28828335 NR Description: similar to Homo sapiens (Human). Hypothetical
  misc_feature (316)..(456): Homolog of NCBI NO: 34910090 NR Description: B1100D10.20 [Oryza sativa (japonica
  misc_feature (228)..(364): Homolog of NCBI NO: 34910090 NR Description: B1100D10.20 [Oryza sativa (japonica
  misc_feature (67)..(230): Homolog of NCBI NO: 34910090 NR Description: B1100D10.20 [Oryza sativa (japonica
  misc_feature (475)..(542): Homolog of NCBI NO: 15234501 NR Description: putative protein; protein id: At4g21540.1
  misc_feature (42)..(434): Homolog of NCBI NO: 15234501 NR Description: putative protein; protein id: At4g21540.1
  misc_feature (48)..(534): Homolog of NCBI NO: 15234501 NR Description: putative protein; protein id: At4g21540.1
  misc_feature (42)..(509): Homolog of NCBI NO: 22136030 NR Description: putative protein [Arabidopsis thaliana]
  misc_feature (44)..(253): Homolog of NCBI NO: 34898712 NR Description: putative sphingosine kinase
  misc_feature (280)..(543): Homolog of NCBI NO: 34898712 NR Description: putative sphingosine kinase
ILTAHLLSSPCSQTSASFASNPIDTSQQATLQAHPPSPFMADHQPQVEVLTESVRVNGTKAEATLVGGELAWRPAAGGNGEGQERRLELESEVLGFQMDGRQLKFATFAASGGGNGKGGGGDGNRRRGEVEMEMENEATAVRWGDVISDRLASLGRPKKLFIIVNPYGGKRSGPSIFQNEVLPLIEASGVLYTMQETKHRLHAQEIAHSLDLRKYDGIICVSGDGVMVEVVNGLLQREDWEAAIKVPLGIIPAGTGNGMARSLLHAAGEPFSISNAVFAIIRGHKRALDVTSVVQGKARFFSVLMLTWGLVADVDIESEKYRWMGSARLDFYLLLRILNLRRYNGRILFVPAPGYEEVGDPVDQATGYETNGFSTGFQDDGRTGSNGETCGYVGPSSIKEAGLRWRSLDGPFVSVWLGNVPFASEDAMAAPKAEFADGYLDAAIIKDCPRWDVLGLVFQMKDGSYVNSPCVEYFKVKAIRIEPGLRVGSSTEGGIIDSDGEVIARGDESDSRAGDDEPGHLMAYGPPIQLTVDQGLATIFSPR

SEQ ID NO: 16469 - protein, 504 aa, Zea mays subsp. mays
  peptide (1)..(504): Ceres Seq. ID no. 12366085
  misc_feature (120)..(215): Pfam Name: Diacylglycerol kinase catalytic domain (presumed) Pfam Description: Diacylglycerol kinase catalytic domain
  misc_feature (86)..(313): Homolog of NCBI NO: 28828335 NR Description: similar to Homo sapiens (Human). Hypothetical
  misc_feature (277)..(417): Homolog of NCBI NO: 34910090 NR Description: B1100D10.20 [Oryza sativa (japonica
  misc_feature (189)..(325): Homolog of NCBI NO: 34910090 NR Description: B1100D10.20 [Oryza sativa (japonica
  misc_feature (28)..(191): Homolog of NCBI NO: 34910090 NR Description: B1100D10.20 [Oryza sativa (japonica
  misc_feature (436)..(503): Homolog of NCBI NO: 15234501 NR Description: putative protein; protein id: At4g21540.1
  misc_feature (3)..(395): Homolog of NCBI NO: 15234501 NR Description: putative protein; protein id: At4g21540.1
  misc_feature (9)..(495): Homolog of NCBI NO: 15234501 NR Description: putative protein; protein id: At4g21540.1
  misc_feature (3)..(470): Homolog of NCBI NO: 22136030 NR Description: putative protein [Arabidopsis thaliana]
  misc_feature (5)..(214): Homolog of NCBI NO: 34898712 NR Description: putative sphingosine kinase
  misc_feature (241)..(504): Homolog of NCBI NO: 34898712 NR Description: putative sphingosine kinase
MADHQPQVEVLTESVRVNGTKAEATLVGGELAWRPAAGGNGEGQERRLELESEVLGFQMDGRQLKFATFAASGGGNGKGGGGDGNRRRGEVEMEMENEATAVRWGDVISDRLASLGRPKKLFIIVNPYGGKRSGPSIFQNEVLPLIEASGVLYTMQETKHRLHAQEIAHSLDLRKYDGIICVSGDGVMVEVVNGLLQREDWEAAIKVPLGIIPAGTGNGMARSLLHAAGEPFSISNAVFAIIRGHKRALDVTSVVQGKARFFSVLMLTWGLVADVDIESEKYRWMGSARLDFYLLLRILNLRRYNGRILFVPAPGYEEVGDPVDQATGYETNGFSTGFQDDGRTGSNGETCGYVGPSSIKEAGLRWRSLDGPFVSVWLGNVPFASEDAMAAPKAEFADGYLDAAIIKDCPRWDVLGLVFQMKDGSYVNSPCVEYFKVKAIRIEPGLRVGSSTEGGIIDSDGEVIARGDESDSRAGDDEPGHLMAYGPPIQLTVDQGLATIFSPR

SEQ ID NO: 16470 - protein, 446 aa, Zea mays subsp. mays
  peptide (1)..(446): Ceres Seq. ID no. 12366086
  misc_feature (62)..(157): Pfam Name: Diacylglycerol kinase catalytic domain (presumed) Pfam Description: Diacylglycerol kinase catalytic domain
  misc_feature (28)..(255): Homolog of NCBI NO: 28828335 NR Description: similar to Homo sapiens (Human). Hypothetical
  misc_feature (219)..(359): Homolog of NCBI NO: 34910090 NR Description: B1100D10.20 [Oryza sativa (japonica
  misc_feature (131)..(267): Homolog of NCBI NO: 34910090 NR Description: B1100D10.20 [Oryza sativa (japonica
  misc_feature (1)..(133): Homolog of NCBI NO: 34910090 NR Description: B1100D10.20 [Oryza sativa (japonica
  misc_feature (378)..(445): Homolog of NCBI NO: 15234501 NR Description: putative protein; protein id: At4g21540.1
  misc_feature (1)..(337): Homolog of NCBI NO: 15234501 NR Description: putative protein; protein id: At4g21540.1
  misc_feature (1)..(437): Homolog of NCBI NO: 15234501 NR Description: putative protein; protein id: At4g21540.1
  misc_feature (1)..(412): Homolog of NCBI NO: 22136030 NR Description: putative protein [Arabidopsis thaliana]
  misc_feature (1)..(156): Homolog of NCBI NO: 34898712 NR Description: putative sphingosine kinase
  misc_feature (183)..(446): Homolog of NCBI NO: 34898712 NR Description: putative sphingosine kinase
MDGRQLKFATFAASGGGNGKGGGGDGNRRRGEVEMEMENEATAVRWGDVISDRLASLGRPKKLFIIVNPYGGKRSGPSIFQNEVLPLIEASGVLYTMQETKHRLHAQEIAHSLDLRKYDGIICVSGDGVMVEVVNGLLQREDWEAAIKVPLGIIPAGTGNGMARSLLHAAGEPFSISNAVFAIIRGHKRALDVTSVVQGKARFFSVLMLTWGLVADVDIESEKYRWMGSARLDFYLLLRILNLRRYNGRILFVPAPGYEEVGDPVDQATGYETNGFSTGFQDDGRTGSNGETCGYVGPSSIKEAGLRWRSLDGPFVSVWLGNVPFASEDAMAAPKAEFADGYLDAAIIKDCPRWDVLGLVFQMKDGSYVNSPCVEYFKVKAIRIEPGLRVGSSTEGGIIDSDGEVIARGDESDSRAGDDEPGHLMAYGPPIQLTVDQGLATIFSPR

SEQ ID NO: 16471 - DNA, 1598 bp, Zea mays subsp. mays
  misc_feature (1)..(1598): Ceres Seq. ID no. 12407458
  misc_feature: MA Experiment ID: 20000477 Result: Down-regulated in Transcription
  misc_feature: MA Experiment 20000477 PARAMETER Experiment Name: Zm_5mM_SA_P Parameter: Age (day) Value: 10
  misc_feature: MA Experiment 20000477 PARAMETER Experiment Name: Zm_5mM_SA_P Parameter: Organism Value: Zea mays
  misc_feature: MA Experiment 20000477 PARAMETER Experiment Name: Zm_5mM_SA_P Parameter: Plant Line Value: 35A19
  misc_feature: MA Experiment 20000477 PARAMETER Experiment Name: Zm_5mM_SA_P Parameter: Timepoint (hr) Value: 48
  misc_feature: MA Experiment 20000477 PARAMETER Experiment Name: Zm_5mM_SA_P Parameter: Tissue Value: Aerial
  misc_feature: MA Experiment 20000477 PARAMETER Experiment Name: Zm_5mM_SA_P Parameter: Treatment Value: 5mM SA vs. No Treatment
  misc_feature: MA Experiment ID: 20000626 Result: Down-regulated in Transcription
  misc_feature: MA Experiment 20000626 PARAMETER Experiment Name: Zm_Herbicide-Treatments_P Parameter: Timepoint (hr) Value: 12
  misc_feature: MA Experiment 20000626 PARAMETER Experiment Name: Zm_Herbicide-Treatments_P Parameter: Tissue Value: Aerial
  misc_feature: MA Experiment 20000626 PARAMETER Experiment Name: Zm_Herbicide-Treatments_P Parameter: Treatment Value: Roundup vs. No Treatment
gcacgagaccattacctagaacatcctaatcaaaaattcttctttctccgtcctttccatcccaggtcgccaccgcgtctccgcccttccctcctccccaccatcttcagcacgaggcagcacgcgcggacgtccctcccgacacggagaaccccgctccgcgcgctcgcattcatcgcgccgccacccaggtcccagccggccgcgcgcccgcgcccccccgccgccggccgtgccatgccgcggcggggcgagacggcggtggtccccattgacgtggcgtccgccggcggcgggcgaggcgatgagcggcccaagagagagcgccaccggagccacggccccggccgccacggtccgcaccggagtcgcccgccgcccccgcccccgccggcgttccggccgttccggcggtggttcccgttccttgtgccgctattcatcgtcgctaacatcgtcctcttcgtgctcaccatgtacgtcaacgactgccccgcgcacgcgcgggccaccggcgccgcgataggcggatcggtcggcgagagcgccaccgcgcagggctgctggctcgcgcccgagctcgggaggttcgcgttccagtcgttcaaggagaacccgctcatcggcccttcctccgccacgctgttggaaatgggggcactggaaaccagtaaagttaccaaagatcacgaagggtggcgcctcattacatgcatttggttgcatgctggagtcgtccacatactcgccaacatgttgagcctcttaatgatcggaatcaggctcgagaaggaatttggtttcataaggattggtacactgtatgtgatctctggtgttggtggcagcttgctgtcttctctatttatggtgtcaaatatatcagtcggtgcttcaggtgcattatttggactattgggctcaatgctgtcagagctcataacgaattggacgatatatgagaacaagtttgcagcactcttgactctagttatgatcattctcatcaacttagctgttgggatccttccacatgttgacaacttcgctcaccttggaggatttatgtcagggttctgtcttggttttgtgctgctaatgcgaccacagtttggatatattaaccaaaagaactctcctcttggatttcccatgggcgtaactaaacggaagttcaagacatatcaagtcatacttttggttatttctacaatgatactagtttctgggttcaccattggattggtgttgctatttcaagggttcaatgctagtgagcactgttcttggtgccattatatgagctgtgtgcctacttcaaagtggagttgcaacgcaccaaataactactgcatgtcttcacagctcggaaaccaactaaatctgacatgtgaaagcactggaaagaccgcatcatatgttctcagcgatccaaacaactcggaggcgattaaaaatctttgtgtcggtctttgcagttaatagtaatgtctgcattttctaacaggaaattaatgctagcatatctatggattatatgactagaagcctatgcttacattatgattctctggtaatgctattgcggcttctatggc

SEQ ID NO: 16472 - protein, 493 aa, Zea mays subsp. mays
  peptide (1)..(493): Ceres Seq. ID no. 12407459
  misc_feature (137)..(175): Homolog of NCBI NO: 37536172 NR Description: putative membrane protein
  misc_feature (210)..(444): Homolog of NCBI NO: 37536172 NR Description: putative membrane protein
  misc_feature (218)..(492): Homolog of NCBI NO: 18409916 NR Description: putative protein; protein id: At3g53780.1
  misc_feature (137)..(445): Homolog of NCBI NO: 294845 NR Description: membrane protein [Saccharum hybrid cultivar
  misc_feature (139)..(444): Homolog of NCBI NO: 15221690 NR Description: membrane protein, putative; protein id:
  misc_feature (188)..(492): Homolog of NCBI NO: 11357824 NR Description: hypothetical protein F5K20.80 - Arabidopsis
  misc_feature (102)..(445): Homolog of NCBI NO: 15240744 NR Description: membrane protein
  misc_feature (78)..(165): Homolog of NCBI NO: 30693911 NR Description: membrane protein, Rhomboid family [Arabidopsis
  misc_feature (188)..(492): Homolog of NCBI NO: 30693911 NR Description: membrane protein, Rhomboid family [Arabidopsis
  misc_feature (97)..(401): Homolog of NCBI NO: 34895778 NR Description: putative membrane protein
ARDHYLEHPNQKFFFLRPFHPRSPPRLRPSLLPTIFSTRQHARTSLPTRRTPLRALAFIAPPPRSQPAARPRPPAAGRAMPRRGETAVVPIDVASAGGGRGDERPKRERHRSHGPGRHGPHRSRPPPPPPPAFRPFRRWFPFLVPLFIVANIVLFVLTMYVNDCPAHARATGAAIGGSVGESATAQGCWLAPELGRFAFQSFKENPLIGPSSATLLEMGALETSKVTKDHEGWRLITCIWLHAGVVHILANMLSLLMIGIRLEKEFGFIRIGTLYVISGVGGSLLSSLFMVSNISVGASGALFGLLGSMLSELITNWTIYENKFAALLTLVMIILINLAVGILPHVDNFAHLGGFMSGFCLGFVLLMRPQFGYINQKNSPLGFPMGVTKRKFKTYQVILLVISTMILVSGFTIGLVLLFQGFNASEHCSWCHYMSCVPTSKWSCNAPNNYCMSSQLGNQLNLTCESTGKTASYVLSDPNNSEAIKNLCVGLCS

SEQ ID NO: 16473 - protein, 414 aa, Zea mays subsp. mays
  peptide (1)..(414): Ceres Seq. ID no. 12407460
  misc_feature (58)..(96): Homolog of NCBI NO: 37536172 NR Description: putative membrane protein
  misc_feature (131)..(365): Homolog of NCBI NO: 37536172 NR Description: putative membrane protein
  misc_feature (139)..(413): Homolog of NCBI NO: 18409916 NR Description: putative protein; protein id: At3g53780.1
  misc_feature (58)..(366): Homolog of NCBI NO: 294845 NR Description: membrane protein [Saccharum hybrid cultivar
  misc_feature (60)..(365): Homolog of NCBI NO: 15221690 NR Description: membrane protein, putative; protein id:
  misc_feature (109)..(413): Homolog of NCBI NO: 11357824 NR Description: hypothetical protein F5K20.80 - Arabidopsis
  misc_feature (23)..(366): Homolog of NCBI NO: 15240744 NR Description: membrane protein
  misc_feature (1)..(86): Homolog of NCBI NO: 30693911 NR Description: membrane protein, Rhomboid family [Arabidopsis
  misc_feature (109)..(413): Homolog of NCBI NO: 30693911 NR Description: membrane protein, Rhomboid family [Arabidopsis
  misc_feature (18)..(322): Homolog of NCBI NO: 34895778 NR Description: putative membrane protein
MPRRGETAVVPIDVASAGGGRGDERPKRERHRSHGPGRHGPHRSRPPPPPPPAFRPFRRWFPFLVPLFIVANIVLFVLTMYVNDCPAHARATGAAIGGSVGESATAQGCWLAPELGRFAFQSFKENPLIGPSSATLLEMGALETSKVTKDHEGWRLITCIWLHAGVVHILANMLSLLMIGIRLEKEFGFIRIGTLYVISGVGGSLLSSLFMVSNISVGASGALFGLLGSMLSELITNWTIYENKFAALLTLVMIILINLAVGILPHVDNFAHLGGFMSGFCLGFVLLMRPQFGYINQKNSPLGFPMGVTKRKFKTYQVILLVISTMILVSGFTIGLVLLFQGFNASEHCSWCHYMSCVPTSKWSCNAPNNYCMSSQLGNQLNLTCESTGKTASYVLSDPNNSEAIKNLCVGLCS

SEQ ID NO: 16474 - protein, 335 aa, Zea mays subsp. mays
  peptide (1)..(335): Ceres Seq. ID no. 12407461
  misc_feature (60)..(334): Homolog of NCBI NO: 18409916 NR Description: putative protein; protein id: At3g53780.1
  misc_feature (1)..(287): Homolog of NCBI NO: 294845 NR Description: membrane protein [Saccharum hybrid cultivar
  misc_feature (1)..(286): Homolog of NCBI NO: 15221690 NR Description: membrane protein, putative; protein id:
  misc_feature (30)..(334): Homolog of NCBI NO: 11357824 NR Description: hypothetical protein F5K20.80 - Arabidopsis
  misc_feature (1)..(287): Homolog of NCBI NO: 15240744 NR Description: membrane protein
  misc_feature (30)..(334): Homolog of NCBI NO: 30693911 NR Description: membrane protein, Rhomboid family [Arabidopsis
  misc_feature (1)..(243): Homolog of NCBI NO: 34895778 NR Description: putative membrane protein
  misc_feature (1)..(286): Homolog of NCBI NO: 15222058 NR Description: membrane protein, putative
  misc_feature (1)..(17): Homolog of NCBI NO: 37536172 NR Description: putative membrane protein
  misc_feature (52)..(286): Homolog of NCBI NO: 37536172 NR Description: putative membrane protein
MYVNDCPAHARATGAAIGGSVGESATAQGCWLAPELGRFAFQSFKENPLIGPSSATLLEMGALETSKVTKDHEGWRLITCIWLHAGVVHILANMLSLLMIGIRLEKEFGFIRIGTLYVISGVGGSLLSSLFMVSNISVGASGALFGLLGSMLSELITNWTIYENKFAALLTLVMIILINLAVGILPHVDNFAHLGGFMSGFCLGFVLLMRPQFGYINQKNSPLGFPMGVTKRKFKTYQVILLVISTMILVSGFTIGLVLLFQGFNASEHCSWCHYMSCVPTSKWSCNAPNNYCMSSQLGNQLNLTCESTGKTASYVLSDPNNSEAIKNLCVGLCS

SEQ ID NO: 16475 - DNA, 1553 bp, Zea mays subsp. mays
  misc_feature (1)..(1553): Ceres Seq. ID no. 13498955
  misc_feature: MA Experiment ID: 108528 Result: Up-regulated in Transcription
  misc_feature: MA Experiment 108528 PARAMETER Experiment Name: Zm_Imbibed_Seeds_P Parameter: Age (day) Value: 5 vs. 2
  misc_feature: MA Experiment 108528 PARAMETER Experiment Name: Zm_Imbibed_Seeds_P Parameter: Organism Value: Zea mays
  misc_feature: MA Experiment 108528 PARAMETER Experiment Name: Zm_Imbibed_Seeds_P Parameter: Plant Line Value: 35A19
  misc_feature: MA Experiment 108528 PARAMETER Experiment Name: Zm_Imbibed_Seeds_P Parameter: Tissue Value: Aerial vs. Embryo
  misc_feature: MA Experiment ID: 108547 Result: Up-regulated in Transcription
  misc_feature: MA Experiment 108547 PARAMETER Experiment Name: Zm_Imbibed_Seeds_P Parameter: Age (day) Value: 4 vs. 2
  misc_feature: MA Experiment 108547 PARAMETER Experiment Name: Zm_Imbibed_Seeds_P Parameter: Organism Value: Zea mays
  misc_feature: MA Experiment 108547 PARAMETER Experiment Name: Zm_Imbibed_Seeds_P Parameter: Plant Line Value: 35A19
  misc_feature: MA Experiment 108547 PARAMETER Experiment Name: Zm_Imbibed_Seeds_P Parameter: Tissue Value: Aerial vs. Embryo
  misc_feature: MA Experiment ID: 108689 Result: Down-regulated in Transcription
  misc_feature: MA Experiment 108689 PARAMETER Experiment Name: Zm_Drought_Roots_P Parameter: Age (day) Value: 9
  misc_feature: MA Experiment 108689 PARAMETER Experiment Name: Zm_Drought_Roots_P Parameter: Organism Value: Zea mays
  misc_feature: MA Experiment 108689 PARAMETER Experiment Name: Zm_Drought_Roots_P Parameter: Plant Line Value: 35A19
  misc_feature: MA Experiment 108689 PARAMETER Experiment Name: Zm_Drought_Roots_P Parameter: Timepoint (hr) Value: 24
  misc_feature: MA Experiment 108689 PARAMETER Experiment Name: Zm_Drought_Roots_P Parameter: Tissue Value: Roots
  misc_feature: MA Experiment 108689 PARAMETER Experiment Name: Zm_Drought_Roots_P Parameter: Treatment Value: Drought vs. No Drought
actatactctcgcgcggcgagctcctcgagctcgctccccgttccaagatagaaaaatggccgcggcggaagcagcctcctccgcgccggcgcccgagcatctcctggaggtggaggacgacgaggtgctgatcgacttcaagcccaacgccaagtgccgcgccgacctccgcctccgctccctgcacccgtccctccccgtcgccttcaaggtgcagacctcctccccgctcaagttcctcgtcagcccgccgcgcggcgccgtgccgccgctctcctcggcgtccctgcgcgtcgtgctccgcccgcagccgcacgcgccgccgtccttcccgcgctcccgcgccgaccgcttmctcgtcctgtcctcgctctccgcggcgcgcctcgactccgtgggaagcagcaacgacggcggcggcgggggcggagtcagggccgtccgcctccgcgtgttcttcggcgggccgtaccttctccgcctcgccgcggacgccggagacgccgykgccgtgcgcctcatcctgcgccggcagccgcacctgctgccgttcctggagcaccagcaggccgccgcggcgcccgacgccggcgagcakyaktgggcgccgctgcacgcggcggccgccaggggggactgcggtkkagctgaggcggctggggcccgaggcgctggccgcgcgtgaccgygaggggaggacggtcctgcacgcdgtcgccgcggccggcgaggccgagacggtggcggtgctggtggacatgggcgccgacacgtmdkyggtcgacgcgcgcggkaggactccgctggacgtckcgcgcgacaagggataccaagaagtggtggacgtyctgkaacggtggsagctgstgatgacggcggcgaggcgaggcgacctcgggagcctcgagtccctgctcagcaagcgcgccggcgtccgcgggcgcgaccagtacggcctcacggcgctgcacctggccgcgatcaagggccacggcgacgcgatcgcgctgctcgccgggccgggatgcatggacgtcgagtgcgaggacgtggaagggcacaggccgctccacctcgccgtcgagggaggccacgcggaggccgtggagctgctgctcgacatgggcgccgacgccaacgcccggaccaggcgcggcgccacgccgctccagatggcggaggccatggggtacgaggccatcgctcagctcctgtgcgcgagaggtgcggaggtggccgccgcgtcggcgttgtgcgccgcgtcgtcgtcttcatcgtccatatcgtgcgcctgattgctgccggtatcgtttccgctgctgctcctgctgtgcgtgagctgtgtggtacagtactgtagccgagagatgcctacaaccgccgtggctggctttaaagtaagaagcgaacccgtccgaaattgcactgtactgtatagtggtttgttctgctttgttgggagagtagctcattgttgagacggtcgattgctatacccagcgtgctggtggaaaaaaaaacatcgccatgcaattgcagtgctttacatgtc

SEQ ID NO: 16476 - protein, 227 aa, Zea mays subsp. mays
  peptide (1)..(227): Ceres Seq. ID no. 15223058
  misc_feature (208)..(227): Homolog of NCBI NO: 22958408 NR Description: hypothetical protein [Rhodobacter sphaeroides]
  misc_feature (3)..(227): Homolog of NCBI NO: 34907942 NR Description: B1088C09.19 [Oryza sativa (japonica
  misc_feature (118)..(118): Xaa is any aa, unknown or other
  misc_feature (169)..(169): Xaa is any aa, unknown or other
  misc_feature (199)..(199): Xaa is any aa, unknown or other
  misc_feature (200)..(200): Xaa is any aa, unknown or other
  misc_feature (215)..(215): Xaa is any aa, unknown or other
YTLARRAPRARSPFQDRKMAAAEAASSAPAPEHLLEVEDDEVLIDFKPNAKCRADLRLRSLHPSLPVAFKVQTSSPLKFLVSPPRGAVPPLSSASLRVVLRPQPHAPPSFPRSRADRXLVLSSLSAARLDSVGSSNDGGGGGGVRAVRLRVFFGGPYLLRLAADAGDAXAVRLILRRQPHLLPFLEHQQAAAAPDAGEXXWAPLHAAAARGDCGXAEAAGARGAGRA

SEQ ID NO: 16477 - protein, 209 aa, Zea mays subsp. mays
  peptide (1)..(209): Ceres Seq. ID no. 15223059
  misc_feature (190)..(209): Homolog of NCBI NO: 22958408 NR Description: hypothetical protein [Rhodobacter sphaeroides]
  misc_feature (1)..(209): Homolog of NCBI NO: 34907942 NR Description: B1088C09.19 [Oryza sativa (japonica
  misc_feature (100)..(100): Xaa is any aa, unknown or other
  misc_feature (151)..(151): Xaa is any aa, unknown or other
  misc_feature (181)..(181): Xaa is any aa, unknown or other
  misc_feature (182)..(182): Xaa is any aa, unknown or other
  misc_feature (197)..(197): Xaa is any aa, unknown or other
MAAAEAASSAPAPEHLLEVEDDEVLIDFKPNAKCRADLRLRSLHPSLPVAFKVQTSSPLKFLVSPPRGAVPPLSSASLRVVLRPQPHAPPSFPRSRADRXLVLSSLSAARLDSVGSSNDGGGGGGVRAVRLRVFFGGPYLLRLAADAGDAXAVRLILRRQPHLLPFLEHQQAAAAPDAGEXXWAPLHAAAARGDCGXAEAAGARGAGRA

SEQ ID NO: 16478 - protein, 178 aa, Zea mays subsp. mays
  peptide (1)..(178): Ceres Seq. ID no. 15223060
  misc_feature (99)..(131): Pfam Name: Ankyrin repeat Pfam Description: Ankyrin repeat
  misc_feature (38)..(161): Homolog of NCBI NO: 28373666 NR Description: Chain A, Sank E3_5: An Artificial Ankyrin Repeat
  misc_feature (1)..(161): Homolog of NCBI NO: 18312929 NR Description: hypothetical protein with 4 ankyrin repeats
  misc_feature (38)..(161): Homolog of NCBI NO: 28274850 NR Description: ankyrin repeat protein E3_19 [synthetic construct]
  misc_feature (40)..(161): Homolog of NCBI NO: 28274854 NR Description: ankyrin repeat protein E4_8 [synthetic construct]
  misc_feature (1)..(151): Homolog of NCBI NO: 23055190 NR Description: hypothetical protein [Geobacter metallireducens]
  misc_feature (38)..(161): Homolog of NCBI NO: 28274852 NR Description: ankyrin repeat protein E4_2 [synthetic construct]
  misc_feature (40)..(157): Homolog of NCBI NO: 28373837 NR Description: Chain A, 4ank: A Designed Ankyrin Repeat Protein
  misc_feature (1)..(152): Homolog of NCBI NO: 28274854 NR Description: ankyrin repeat protein E4_8 [synthetic construct]
  misc_feature (1)..(152): Homolog of NCBI NO: 28274852 NR Description: ankyrin repeat protein E4_2 [synthetic construct]
  misc_feature (1)..(178): Homolog of NCBI NO: 34907942 NR Description: B1088C09.19 [Oryza sativa (japonica
  misc_feature (6)..(6): Xaa is any aa, unknown or other
  misc_feature (7)..(7): Xaa is any aa, unknown or other
  misc_feature (12)..(12): Xaa is any aa, unknown or other
  misc_feature (19)..(19): Xaa is any aa, unknown or other
  misc_feature (30)..(30): Xaa is any aa, unknown or other
  misc_feature (32)..(32): Xaa is any aa, unknown or other
  misc_feature (35)..(35): Xaa is any aa, unknown or other
  misc_feature (37)..(37): Xaa is any aa, unknown or other
MGADTXXVDARXRTPLDVXRDKGYQEVVDXLXRWXLXMTAARRGDLGSLESLLSKRAGVRGRDQYGLTALHLAAIKGHGDAIALLAGPGCMDVECEDVEGHRPLHLAVEGGHAEAVELLLDMGADANARTRRGATPLQMAEAMGYEAIAQLLCARGAEVAAASALCAASSSSSSISCA

SEQ ID NO: 16479 - DNA, 1071 bp, Zea mays subsp. mays
  misc_feature (1)..(1071): Ceres Seq. ID no. 12406460
  misc_feature: MA Experiment ID: 108528 Result: Up-regulated in Transcription
  misc_feature: MA Experiment 108528 PARAMETER Experiment Name: Zm_Imbibed_Seeds_P Parameter: Age (day) Value: 5 vs. 2
  misc_feature: MA Experiment 108528 PARAMETER Experiment Name: Zm_Imbibed_Seeds_P Parameter: Organism Value: Zea mays
  misc_feature: MA Experiment 108528 PARAMETER Experiment Name: Zm_Imbibed_Seeds_P Parameter: Plant Line Value: 35A19
  misc_feature: MA Experiment 108528 PARAMETER Experiment Name: Zm_Imbibed_Seeds_P Parameter: Tissue Value: Aerial vs. Embryo
  misc_feature: MA Experiment ID: 108529 Result: Down-regulated in Transcription
  misc_feature: MA Experiment 108529 PARAMETER Experiment Name: Zm_Imbibed_Seeds_P Parameter: Age (day) Value: 5 vs. 2
  misc_feature: MA Experiment 108529 PARAMETER Experiment Name: Zm_Imbibed_Seeds_P Parameter: Organism Value: Zea mays
  misc_feature: MA Experiment 108529 PARAMETER Experiment Name: Zm_Imbibed_Seeds_P Parameter: Plant Line Value: 35A19
  misc_feature: MA Experiment 108529 PARAMETER Experiment Name: Zm_Imbibed_Seeds_P Parameter: Tissue Value: Roots vs. Embryo
  misc_feature: MA Experiment ID: 108530 Result: Up-regulated in Transcription
  misc_feature: MA Experiment 108530 PARAMETER Experiment Name: Zm_Imbibed_Seeds_P Parameter: Age (day) Value: 6 vs. 2
  misc_feature: MA Experiment 108530 PARAMETER Experiment Name: Zm_Imbibed_Seeds_P Parameter: Organism Value: Zea mays
  misc_feature: MA Experiment 108530 PARAMETER Experiment Name: Zm_Imbibed_Seeds_P Parameter: Plant Line Value: 35A19
  misc_feature: MA Experiment 108530 PARAMETER Experiment Name: Zm_Imbibed_Seeds_P Parameter: Tissue Value: Aerial vs. Embryo
  misc_feature: MA Experiment ID: 108536 Result: Down-regulated in Transcription
  misc_feature: MA Experiment 108536 PARAMETER Experiment Name: Zm_Meristem_P Parameter: Age (day) Value: 8
  misc_feature: MA Experiment 108536 PARAMETER Experiment Name: Zm_Meristem_P Parameter: Organism Value: Zea mays
  misc_feature: MA Experiment 108536 PARAMETER Experiment Name: Zm_Meristem_P Parameter: Plant Line Value: 35A19
  misc_feature: MA Experiment 108536 PARAMETER Experiment Name: Zm_Meristem_P Parameter: Tissue Value: Shoot Meristem vs. Above Shoot Meristem
  misc_feature: MA Experiment ID: 108544 Result: Down-regulated in Transcription
  misc_feature: MA Experiment ID: 108545 Result: Up-regulated in Transcription
  misc_feature: MA Experiment 108545 PARAMETER Experiment Name: Zm_Imbibed_Seeds_P Parameter: Age (day) Value: 3 vs. 2
  misc_feature: MA Experiment 108545 PARAMETER Experiment Name: Zm_Imbibed_Seeds_P Parameter: Organism Value: Zea mays
  misc_feature: MA Experiment 108545 PARAMETER Experiment Name: Zm_Imbibed_Seeds_P Parameter: Plant Line Value: 35A19
  misc_feature: MA Experiment 108545 PARAMETER Experiment Name: Zm_Imbibed_Seeds_P Parameter: Tissue Value: Aerial vs. Embryo
  misc_feature: MA Experiment ID: 108546 Result: Down-regulated in Transcription
  misc_feature: MA Experiment 108546 PARAMETER Experiment Name: Zm_Imbibed_Seeds_P Parameter: Age (day) Value: 3 vs. 2
  misc_feature: MA Experiment 108546 PARAMETER Experiment Name: Zm_Imbibed_Seeds_P Parameter: Organism Value: Zea mays
  misc_feature: MA Experiment 108546 PARAMETER Experiment Name: Zm_Imbibed_Seeds_P Parameter: Plant Line Value: 35A19
  misc_feature: MA Experiment 108546 PARAMETER Experiment Name: Zm_Imbibed_Seeds_P Parameter: Tissue Value: Roots vs. Embryo
  misc_feature: MA Experiment ID: 108547 Result: Up-regulated in Transcription
  misc_feature: MA Experiment 108547 PARAMETER Experiment Name: Zm_Imbibed_Seeds_P Parameter: Age (day) Value: 4 vs. 2
  misc_feature: MA Experiment 108547 PARAMETER Experiment Name: Zm_Imbibed_Seeds_P Parameter: Organism Value: Zea mays
  misc_feature: MA Experiment 108547 PARAMETER Experiment Name: Zm_Imbibed_Seeds_P Parameter: Plant Line Value: 35A19
  misc_feature: MA Experiment 108547 PARAMETER Experiment Name: Zm_Imbibed_Seeds_P Parameter: Tissue Value: Aerial vs. Embryo
gtctctctgaccttatccccttgcggcaaaaccttgcgcgcaacaatggccgcctccctcccgaccaccgccgcgcgcctcgcggccccggccttcgcctaccggtcgcccaaggctccctccgccaccgccctcccgcgtgccgccgccttccctgcaatcgccgttgcggcggcgcccctgcgcccgcgccgcgcgccgaggccggtggcggcccgggccgggggcgaggagagggagacgatactgctccccgggtgcgactacaaccactggctgatcgtcatggagttccccaaggaccccgcgcccacccgcgagcagatgatcgacacctacctcaacacactcgccaccgtcctcggcagcatggaggaagccaagaagaacatgtacgccttcagcacgaccacctacaccgggttccagtgcaccgtggacgaggagacgtcggagaagttcaagggtctgcctggggtgctgtgggtgctccctgattcctacatcgacgtgaagaacaaggactacggaggtgacaagtacgtgaacggcgagataatcccctgcacgtacccgacgtaccagccgaaggagcggaggacgtccaagtacgagagcaggcggtacgagaggcggagagatgggccaccggcggccagcaggaaaccgaggcagcaggcaccagctcagactcagaccgagtcggcgtcttcgtgacgagctctgcaggcattttgtccacgtacctacctacctagaagtagaacaagagaggaggacgcctaaaattctgtcgcattgggcaccgcgtactggactggacaggcgggtcgggatccatcatccatcgtcagccagaaaattgtcgctgtccaagcagcctgggcagcttgtgtgtgactgtgtgtgctgatatcttgagctagctgtggcagaaactggaaaccctactgtgtgtgtgctgatatcttgtcatagcgagctgtgtgatgccgactggtgtagagctgtatcgctgattgcgtgaaaccgaaatgctgtggctttatttagactgatgttgtcacttcc

SEQ ID NO: 16480 - protein, 238 aa, Zea mays subsp. mays
  peptide (1)..(238): Ceres Seq. ID no. 12406461
  misc_feature (83)..(214): Homolog of NCBI NO: 25370552 NR Description: DAG protein homolog [imported] - Arabidopsis
  misc_feature (83)..(214): Homolog of NCBI NO: 15226108 NR Description: plastid protein
  misc_feature (20)..(214): Homolog of NCBI NO: 34897972 NR Description: putative plastid protein [Oryza sativa (japonica
  misc_feature (14)..(214): Homolog of NCBI NO: 38344141 NR Description: OSJNBa0041A02.8 [Oryza sativa (japonica
  misc_feature (4)..(223): Homolog of NCBI NO: 27754695 NR Description: putative DAG protein [Arabidopsis thaliana]
  misc_feature (4)..(223): Homolog of NCBI NO: 15230785 NR Description: DAG protein, putative; protein id: At3g06790.1
  misc_feature (77)..(233): Homolog of NCBI NO: 21593052 NR Description: DAG protein, putative [Arabidopsis thaliana]
  misc_feature (77)..(233): Homolog of NCBI NO: 15220382 NR Description: DAG protein, putative
  misc_feature (1)..(233): Homolog of NCBI NO: 6014904 NR Description: DAG PROTEIN, CHLOROPLAST PRECURSOR
  misc_feature (18)..(238): Homolog of NCBI NO: 38636775 NR Description: putative DAG protein [Oryza sativa (japonica
  misc_feature (1)..(233): Homolog of NCBI NO: 6014904 NR Description: DAG PROTEIN, CHLOROPLAST PRECURSOR
  misc_feature (18)..(238): Homolog of NCBI NO: 38636775 NR Description: putative DAG protein [Oryza sativa (japonica
  misc_feature (83)..(214): Homolog of NCBI NO: 25370552 NR Description: DAG protein homolog [imported] - Arabidopsis
  misc_feature (83)..(214): Homolog of NCBI NO: 15226108 NR Description: plastid protein
  misc_feature (20)..(214): Homolog of NCBI NO: 34897972 NR Description: putative plastid protein [Oryza sativa (japonica
  misc_feature (14)..(214): Homolog of NCBI NO: 38344141 NR Description: OSJNBa0041A02.8 [Oryza sativa (japonica
  misc_feature (4)..(223): Homolog of NCBI NO: 27754695 NR Description: putative DAG protein [Arabidopsis thaliana]
  misc_feature (4)..(223): Homolog of NCBI NO: 15230785 NR Description: DAG protein, putative; protein id: At3g06790.1
  misc_feature (77)..(233): Homolog of NCBI NO: 21593052 NR Description: DAG protein, putative [Arabidopsis thaliana]
  misc_feature (77)..(233): Homolog of NCBI NO: 15220382 NR Description: DAG protein, putative
VSLTLSPCGKTLRATMAASLPTTAARLAAPAFAYRSPKAPSATALPRAAAFPAIAVAAAPLRPRRAPRPVAARAGGEERETILLPGCDYNHWLIVMEFPKDPAPTREQMIDTYLNTLATVLGSMEEAKKNMYAFSTTTYTGFQCTVDEETSEKFKGLPGVLWVLPDSYIDVKNKDYGGDKYVNGEIIPCTYPTYQPKERRTSKYESRRYERRRDGPPAASRKPRQQAPAQTQTESASS

SEQ ID NO: 16481 - protein, 223 aa, Zea mays subsp. mays
  peptide (1)..(223): Ceres Seq. ID no. 12406462
  misc_feature (68)..(199): Homolog of NCBI NO: 25370552 NR Description: DAG protein homolog [imported] - Arabidopsis
  misc_feature (68)..(199): Homolog of NCBI NO: 15226108 NR Description: plastid protein
  misc_feature (5)..(199): Homolog of NCBI NO: 34897972 NR Description: putative plastid protein [Oryza sativa (japonica
  misc_feature (1)..(199): Homolog of NCBI NO: 38344141 NR Description: OSJNBa0041A02.8 [Oryza sativa (japonica
  misc_feature (1)..(208): Homolog of NCBI NO: 27754695 NR Description: putative DAG protein [Arabidopsis thaliana]
  misc_feature (1)..(208): Homolog of NCBI NO: 15230785 NR Description: DAG protein, putative; protein id: At3g06790.1
  misc_feature (62)..(218): Homolog of NCBI NO: 21593052 NR Description: DAG protein, putative [Arabidopsis thaliana]
  misc_feature (62)..(218): Homolog of NCBI NO: 15220382 NR Description: DAG protein, putative
  misc_feature (1)..(218): Homolog of NCBI NO: 6014904 NR Description: DAG PROTEIN, CHLOROPLAST PRECURSOR
  misc_feature (3)..(223): Homolog of NCBI NO: 38636775 NR Description: putative DAG protein [Oryza sativa (japonica
  misc_feature (68)..(199): Homolog of NCBI NO: 25370552 NR Description: DAG protein homolog [imported] - Arabidopsis
  misc_feature (68)..(199): Homolog of NCBI NO: 15226108 NR Description: plastid protein
  misc_feature (5)..(199): Homolog of NCBI NO: 34897972 NR Description: putative plastid protein [Oryza sativa (japonica
  misc_feature (1)..(199): Homolog of NCBI NO: 38344141 NR Description: OSJNBa0041A02.8 [Oryza sativa (japonica
  misc_feature (1)..(208): Homolog of NCBI NO: 27754695 NR Description: putative DAG protein [Arabidopsis thaliana]
  misc_feature (1)..(208): Homolog of NCBI NO: 15230785 NR Description: DAG protein, putative; protein id: At3g06790.1
  misc_feature (62)..(218): Homolog of NCBI NO: 21593052 NR Description: DAG protein, putative [Arabidopsis thaliana]
  misc_feature (62)..(218): Homolog of NCBI NO: 15220382 NR Description: DAG protein, putative
  misc_feature (1)..(218): Homolog of NCBI NO: 6014904 NR Description: DAG PROTEIN, CHLOROPLAST PRECURSOR
  misc_feature (3)..(223): Homolog of NCBI NO: 38636775 NR Description: putative DAG protein [Oryza sativa (japonica
MAASLPTTAARLAAPAFAYRSPKAPSATALPRAAAFPAIAVAAAPLRPRRAPRPVAARAGGEERETILLPGCDYNHWLIVMEFPKDPAPTREQMIDTYLNTLATVLGSMEEAKKNMYAFSTTTYTGFQCTVDEETSEKFKGLPGVLWVLPDSYIDVKNKDYGGDKYVNGEIIPCTYPTYQPKERRTSKYESRRYERRRDGPPAASRKPRQQAPAQTQTESASS

SEQ ID NO: 16482 - protein, 164 aa, Zea mays subsp. mays
  peptide (1)..(164): Ceres Seq. ID no. 12406463
LSDLIPLRQNLARNNGRLPPDHRRAPRGPGLRLPVAQGSLRHRPPACRRLPCNRRCGGAPAPAPRAEAGGGPGRGRGEGDDTAPRVRLQPLADRHGVPQGPRAHPRADDRHLPQHTRHRPRQHGGSQEEHVRLQHDHLHRVPVHRGRGDVGEVQGSAWGAVGAP

SEQ ID NO: 16483 - DNA, 481 bp, Zea mays subsp. mays
  misc_feature (1)..(481): Ceres Seq. ID no. 4611714
  misc_feature: MA Experiment ID: 108515 Result: Up-regulated in Transcription
  misc_feature: MA Experiment 108515 PARAMETER Experiment Name: Zm_2mM_SA_P Parameter: Age (day) Value: 8
  misc_feature: MA Experiment 108515 PARAMETER Experiment Name: Zm_2mM_SA_P Parameter: Organism Value: Zea mays
  misc_feature: MA Experiment 108515 PARAMETER Experiment Name: Zm_2mM_SA_P Parameter: Plant Line Value: 35A19
  misc_feature: MA Experiment 108515 PARAMETER Experiment Name: Zm_2mM_SA_P Parameter: Timepoint (hr) Value: 12
  misc_feature: MA Experiment 108515 PARAMETER Experiment Name: Zm_2mM_SA_P Parameter: Tissue Value: Aerial
  misc_feature: MA Experiment 108515 PARAMETER Experiment Name: Zm_2mM_SA_P Parameter: Treatment Value: 2mM SA vs. No Treatment
  misc_feature: MA Experiment ID: 108522 Result: Up-regulated in Transcription
  misc_feature: MA Experiment 108522 PARAMETER Experiment Name: Zm_42deg_Heat_P Parameter: Age (day) Value: 8
  misc_feature: MA Experiment 108522 PARAMETER Experiment Name: Zm_42deg_Heat_P Parameter: Organism Value: Zea mays
  misc_feature: MA Experiment 108522 PARAMETER Experiment Name: Zm_42deg_Heat_P Parameter: Plant Line Value: 35A19
  misc_feature: MA Experiment 108522 PARAMETER Experiment Name: Zm_42deg_Heat_P Parameter: Temperature (deg C) Value: 42 vs. 22
  misc_feature: MA Experiment 108522 PARAMETER Experiment Name: Zm_42deg_Heat_P Parameter: Timepoint (hr) Value: 1
  misc_feature: MA Experiment 108522 PARAMETER Experiment Name: Zm_42deg_Heat_P Parameter: Tissue Value: Aerial
  misc_feature: MA Experiment ID: 108523 Result: Up-regulated in Transcription
  misc_feature: MA Experiment 108523 PARAMETER Experiment Name: Zm_42deg_Heat_P Parameter: Age (day) Value: 8
  misc_feature: MA Experiment 108523 PARAMETER Experiment Name: Zm_42deg_Heat_P Parameter: Organism Value: Zea mays
  misc_feature: MA Experiment 108523 PARAMETER Experiment Name: Zm_42deg_Heat_P Parameter: Plant Line Value: 35A19
  misc_feature: MA Experiment 108523 PARAMETER Experiment Name: Zm_42deg_Heat_P Parameter: Temperature (deg C) Value: 42 vs. 22
  misc_feature: MA Experiment 108523 PARAMETER Experiment Name: Zm_42deg_Heat_P Parameter: Timepoint (hr) Value: 6
  misc_feature: MA Experiment 108523 PARAMETER Experiment Name: Zm_42deg_Heat_P Parameter: Tissue Value: Aerial
  misc_feature: MA Experiment ID: 108527 Result: Up-regulated in Transcription
  misc_feature: MA Experiment 108527 PARAMETER Experiment Name: Zm_5mM_NO_P Parameter: Age (day) Value: 8
  misc_feature: MA Experiment 108527 PARAMETER Experiment Name: Zm_5mM_NO_P Parameter: Organism Value: Zea mays
  misc_feature: MA Experiment 108527 PARAMETER Experiment Name: Zm_5mM_NO_P Parameter: Plant Line Value: 35A19
  misc_feature: MA Experiment 108527 PARAMETER Experiment Name: Zm_5mM_NO_P Parameter: Timepoint (hr) Value: 6
  misc_feature: MA Experiment 108527 PARAMETER Experiment Name: Zm_5mM_NO_P Parameter: Tissue Value: Aerial
  misc_feature: MA Experiment 108527 PARAMETER Experiment Name: Zm_5mM_NO_P Parameter: Treatment Value: 5mM NO vs. No Treatment
  misc_feature: MA Experiment ID: 108528 Result: Down-regulated in Transcription
  misc_feature: MA Experiment 108528 PARAMETER Experiment Name: Zm_Imbibed_Seeds_P Parameter: Age (day) Value: 5 vs. 2
  misc_feature: MA Experiment 108528 PARAMETER Experiment Name: Zm_Imbibed_Seeds_P Parameter: Organism Value: Zea mays
  misc_feature: MA Experiment 108528 PARAMETER Experiment Name: Zm_Imbibed_Seeds_P Parameter: Plant Line Value: 35A19
  misc_feature: MA Experiment 108528 PARAMETER Experiment Name: Zm_Imbibed_Seeds_P Parameter: Tissue Value: Aerial vs. Embryo
  misc_feature: MA Experiment ID: 108529 Result: Down-regulated in Transcription
  misc_feature: MA Experiment 108529 PARAMETER Experiment Name: Zm_Imbibed_Seeds_P Parameter: Age (day) Value: 5 vs. 2
  misc_feature: MA Experiment 108529 PARAMETER Experiment Name: Zm_Imbibed_Seeds_P Parameter: Organism Value: Zea mays
  misc_feature: MA Experiment 108529 PARAMETER Experiment Name: Zm_Imbibed_Seeds_P Parameter: Plant Line Value: 35A19
  misc_feature: MA Experiment 108529 PARAMETER Experiment Name: Zm_Imbibed_Seeds_P Parameter: Tissue Value: Roots vs. Embryo
  misc_feature: MA Experiment ID: 108530 Result: Down-regulated in Transcription
  misc_feature: MA Experiment 108530 PARAMETER Experiment Name: Zm_Imbibed_Seeds_P Parameter: Age (day) Value: 6 vs. 2
  misc_feature: MA Experiment 108530 PARAMETER Experiment Name: Zm_Imbibed_Seeds_P Parameter: Organism Value: Zea mays
  misc_feature: MA Experiment 108530 PARAMETER Experiment Name: Zm_Imbibed_Seeds_P Parameter: Plant Line Value: 35A19
  misc_feature: MA Experiment 108530 PARAMETER Experiment Name: Zm_Imbibed_Seeds_P Parameter: Tissue Value: Aerial vs. Embryo
  misc_feature: MA Experiment ID: 108534 Result: Up-regulated in Transcription
  misc_feature: MA Experiment 108534 PARAMETER Experiment Name: Zm_4deg_Cold_P Parameter: Age (hr) Value: 8
  misc_feature: MA Experiment 108534 PARAMETER Experiment Name: Zm_4deg_Cold_P Parameter: Organism Value: Zea mays
  misc_feature: MA Experiment 108534 PARAMETER Experiment Name: Zm_4deg_Cold_P Parameter: Plant Line Value: 35A19
  misc_feature: MA Experiment 108534 PARAMETER Experiment Name: Zm_4deg_Cold_P Parameter: Temperature (deg C) Value: 4 vs. 22
  misc_feature: MA Experiment 108534 PARAMETER Experiment Name: Zm_4deg_Cold_P Parameter: Timepoint (hr) Value: 6
  misc_feature: MA Experiment 108534 PARAMETER Experiment Name: Zm_4deg_Cold_P Parameter: Tissue Value: Aerial
  misc_feature: MA Experiment ID: 108542 Result: Up-regulated in Transcription
  misc_feature: MA Experiment 108542 PARAMETER Experiment Name: Zm_150mM_NaCl_P Parameter: Age (day) Value: 8
  misc_feature: MA Experiment 108542 PARAMETER Experiment Name: Zm_150mM_NaCl_P Parameter: Organism Value: Zea mays
  misc_feature: MA Experiment 108542 PARAMETER Experiment Name: Zm_150mM_NaCl_P Parameter: Plant Line Value: 35A19
  misc_feature: MA Experiment 108542 PARAMETER Experiment Name: Zm_150mM_NaCl_P Parameter: Timepoint (hr) Value: 6
  misc_feature: MA Experiment 108542 PARAMETER Experiment Name: Zm_150mM_NaCl_P Parameter: Tissue Value: Aerial
  misc_feature: MA Experiment 108542 PARAMETER Experiment Name: Zm_150mM_NaCl_P Parameter: Treatment Value: 150mM NaCl vs. No Treatment
  misc_feature: MA Experiment ID: 108544 Result: Down-regulated in Transcription
  misc_feature: MA Experiment ID: 108545 Result: Down-regulated in Transcription
  misc_feature: MA Experiment 108545 PARAMETER Experiment Name: Zm_Imbibed_Seeds_P Parameter: Age (day) Value: 3 vs. 2
  misc_feature: MA Experiment 108545 PARAMETER Experiment Name: Zm_Imbibed_Seeds_P Parameter: Organism Value: Zea mays
  misc_feature: MA Experiment 108545 PARAMETER Experiment Name: Zm_Imbibed_Seeds_P Parameter: Plant Line Value: 35A19
  misc_feature: MA Experiment 108545 PARAMETER Experiment Name: Zm_Imbibed_Seeds_P Parameter: Tissue Value: Aerial vs. Embryo
  misc_feature: MA Experiment ID: 108546 Result: Down-regulated in Transcription
  misc_feature: MA Experiment 108546 PARAMETER Experiment Name: Zm_Imbibed_Seeds_P Parameter: Age (day) Value: 3 vs. 2
  misc_feature: MA Experiment 108546 PARAMETER Experiment Name: Zm_Imbibed_Seeds_P Parameter: Organism Value: Zea mays
  misc_feature: MA Experiment 108546 PARAMETER Experiment Name: Zm_Imbibed_Seeds_P Parameter: Plant Line Value: 35A19
  misc_feature: MA Experiment 108546 PARAMETER Experiment Name: Zm_Imbibed_Seeds_P Parameter: Tissue Value: Roots vs. Embryo
  misc_feature: MA Experiment ID: 108547 Result: Down-regulated in Transcription
  misc_feature: MA Experiment 108547 PARAMETER Experiment Name: Zm_Imbibed_Seeds_P Parameter: Age (day) Value: 4 vs. 2
  misc_feature: MA Experiment 108547 PARAMETER Experiment Name: Zm_Imbibed_Seeds_P Parameter: Organism Value: Zea mays
  misc_feature: MA Experiment 108547 PARAMETER Experiment Name: Zm_Imbibed_Seeds_P Parameter: Plant Line Value: 35A19
  misc_feature: MA Experiment 108547 PARAMETER Experiment Name: Zm_Imbibed_Seeds_P Parameter: Tissue Value: Aerial vs. Embryo
  misc_feature: MA Experiment ID: 108559 Result: Up-regulated in Transcription
  misc_feature: MA Experiment 108559 PARAMETER Experiment Name: Zm_5mM_NO_P Parameter: Age (day) Value: 8
  misc_feature: MA Experiment 108559 PARAMETER Experiment Name: Zm_5mM_NO_P Parameter: Organism Value: Zea mays
  misc_feature: MA Experiment 108559 PARAMETER Experiment Name: Zm_5mM_NO_P Parameter: Plant Line Value: 35A19
  misc_feature: MA Experiment 108559 PARAMETER Experiment Name: Zm_5mM_NO_P Parameter: Timepoint (hr) Value: 12
  misc_feature: MA Experiment 108559 PARAMETER Experiment Name: Zm_5mM_NO_P Parameter: Tissue Value: Aerial
  misc_feature: MA Experiment 108559 PARAMETER Experiment Name: Zm_5mM_NO_P Parameter: Treatment Value: 5mM NO vs. No Treatment
  misc_feature: MA Experiment ID: 20000477 Result: Up-regulated in Transcription
  misc_feature: MA Experiment 20000477 PARAMETER Experiment Name: Zm_5mM_SA_P Parameter: Age (day) Value: 10
  misc_feature: MA Experiment 20000477 PARAMETER Experiment Name: Zm_5mM_SA_P Parameter: Organism Value: Zea mays
  misc_feature: MA Experiment 20000477 PARAMETER Experiment Name: Zm_5mM_SA_P Parameter: Plant Line Value: 35A19
  misc_feature: MA Experiment 20000477 PARAMETER Experiment Name: Zm_5mM_SA_P Parameter: Timepoint (hr) Value: 48
  misc_feature: MA Experiment 20000477 PARAMETER Experiment Name: Zm_5mM_SA_P Parameter: Tissue Value: Aerial
  misc_feature: MA Experiment 20000477 PARAMETER Experiment Name: Zm_5mM_SA_P Parameter: Treatment Value: 5mM SA vs. No Treatment
  misc_feature: MA Experiment ID: 20000478 Result: Up-regulated in Transcription
  misc_feature: MA Experiment 20000478 PARAMETER Experiment Name: Zm_5mM_SA_P Parameter: Age (day) Value: 11
  misc_feature: MA Experiment 20000478 PARAMETER Experiment Name: Zm_5mM_SA_P Parameter: Organism Value: Zea mays
  misc_feature: MA Experiment 20000478 PARAMETER Experiment Name: Zm_5mM_SA_P Parameter: Plant Line Value: 35A19
  misc_feature: MA Experiment 20000478 PARAMETER Experiment Name: Zm_5mM_SA_P Parameter: Timepoint (hr) Value: 72
  misc_feature: MA Experiment 20000478 PARAMETER Experiment Name: Zm_5mM_SA_P Parameter: Tissue Value: Aerial
  misc_feature: MA Experiment 20000478 PARAMETER Experiment Name: Zm_5mM_SA_P Parameter: Treatment Value: 5mM SA vs. No Treatment
  misc_feature: MA Experiment ID: 20000492 Result: Up-regulated in Transcription
  misc_feature: MA Experiment 20000492 PARAMETER Experiment Name: Zm_Hybrid_Seed_Dev_P Parameter: DAP Value: 12
  misc_feature: MA Experiment 20000492 PARAMETER Experiment Name: Zm_Hybrid_Seed_Dev_P Parameter: Organism Value: Zea mays
  misc_feature: MA Experiment 20000492 PARAMETER Experiment Name: Zm_Hybrid_Seed_Dev_P Parameter: Plant Line Value: 35A19
  misc_feature: MA Experiment 20000492 PARAMETER Experiment Name: Zm_Hybrid_Seed_Dev_P Parameter: Tissue Value: Fert Kernel vs. Unfert Floret
  misc_feature: MA Experiment ID: 20000535 Result: Up-regulated in Transcription
  misc_feature: MA Experiment 20000535 PARAMETER Experiment Name: Zm_Hybrid_Seed_Dev_P Parameter: DAP Value: 30 vs. 12
  misc_feature: MA Experiment 20000535 PARAMETER Experiment Name: Zm_Hybrid_Seed_Dev_P Parameter: Organism Value: Zea mays
  misc_feature: MA Experiment 20000535 PARAMETER Experiment Name: Zm_Hybrid_Seed_Dev_P Parameter: Plant Line Value: 35A19
  misc_feature: MA Experiment 20000535 PARAMETER Experiment Name: Zm_Hybrid_Seed_Dev_P Parameter: Tissue Value: Embryo vs. Unfert Floret
  misc_feature: MA Experiment ID: 20000626 Result: Up-regulated in Transcription
  misc_feature: MA Experiment 20000626 PARAMETER Experiment Name: Zm_Herbicide-Treatments_P Parameter: Timepoint (hr) Value: 12
  misc_feature: MA Experiment 20000626 PARAMETER Experiment Name: Zm_Herbicide-Treatments_P Parameter: Tissue Value: Aerial
  misc_feature: MA Experiment 20000626 PARAMETER Experiment Name: Zm_Herbicide-Treatments_P Parameter: Treatment Value: Roundup vs. No Treatment
  misc_feature: MA Experiment ID: 20000629 Result: Up-regulated in Transcription
  misc_feature: MA Experiment 20000629 PARAMETER Experiment Name: Zm_Herbicide-Treatments_P Parameter: Timepoint (hr) Value: 12
  misc_feature: MA Experiment 20000629 PARAMETER Experiment Name: Zm_Herbicide-Treatments_P Parameter: Tissue Value: Aerial
  misc_feature: MA Experiment 20000629 PARAMETER Experiment Name: Zm_Herbicide-Treatments_P Parameter: Treatment Value: Trimec vs. No Treatment
  misc_feature: MA Experiment ID: 20001610 Result: Up-regulated in Transcription
  misc_feature: MA Experiment 20001610 PARAMETER Experiment Name: Zm_50ppm_KNO3_L-to-H_P Parameter: Age (day) Value: 19
  misc_feature: MA Experiment 20001610 PARAMETER Experiment Name: Zm_50ppm_KNO3_L-to-H_P Parameter: Organism Value: Zea mays
  misc_feature: MA Experiment 20001610 PARAMETER Experiment Name: Zm_50ppm_KNO3_L-to-H_P Parameter: Plant Line Value: 35A19
  misc_feature: MA Experiment 20001610 PARAMETER Experiment Name: Zm_50ppm_KNO3_L-to-H_P Parameter: Timepoint (hr) Value: 2
  misc_feature: MA Experiment 20001610 PARAMETER Experiment Name: Zm_50ppm_KNO3_L-to-H_P Parameter: Tissue Value: Roots
  misc_feature: MA Experiment 20001610 PARAMETER Experiment Name: Zm_50ppm_KNO3_L-to-H_P Parameter: Treatment Value: 50ppm KNO3 vs. 50ppm KCl
  misc_feature: MA Experiment ID: 20001614 Result: Up-regulated in Transcription
  misc_feature: MA Experiment 20001614 PARAMETER Experiment Name: Zm_50ppm_KNO3_L-to-H_P Parameter: Age (day) Value: 21
  misc_feature: MA Experiment 20001614 PARAMETER Experiment Name: Zm_50ppm_KNO3_L-to-H_P Parameter: Organism Value: Zea mays
  misc_feature: MA Experiment 20001614 PARAMETER Experiment Name: Zm_50ppm_KNO3_L-to-H_P Parameter: Plant Line Value: 35A19
  misc_feature: MA Experiment 20001614 PARAMETER Experiment Name: Zm_50ppm_KNO3_L-to-H_P Parameter: Timepoint (hr) Value: 48
  misc_feature: MA Experiment 20001614 PARAMETER Experiment Name: Zm_50ppm_KNO3_L-to-H_P Parameter: Tissue Value: Roots
  misc_feature: MA Experiment 20001614 PARAMETER Experiment Name: Zm_50ppm_KNO3_L-to-H_P Parameter: Treatment Value: 50ppm KNO3 vs. 50ppm KCl
accgcaaggatccaccacaacagcgaaggagaaagcagaccaacctagccacccagggagaaaggccaaaagggaggggagagtgtcgtcatggcttccattgtcgcttccaggagggccgttcctctagttcgcgctctggagaagctcatcgcagcgtcctccgcgcccgggacatgccgggcctggggaaggagcacgtcaaggtgtgggcggagcagaacagcctggtgatcaagggcgagggcgagaaggaggatagcgaggacgaggccgccccgcctccgagatacagcggtcgcatcgagctcgcgccagaggtttacaggatggacaagatcaaggcggagatgaagaacggcgtgctcaaggtggtcgtgccgaaggtgaaggagcagcagcgcaaggacgtgttccaagtcaacgtcgagtagatgtttccaaatagaagcaagtgccggtacgggatggaggattggag

SEQ ID NO: 16484 - protein, 143 aa, Zea mays subsp. mays
  peptide (1)..(143): Ceres Seq. ID no. 4611715
  misc_feature (40)..(143): Homolog of NCBI NO: 21068482 NR Description: small heat-shock protein [Picea glauca]
  misc_feature (40)..(143): Homolog of NCBI NO: 7441313 NR Description: heat shock protein HSP23.5, mitochondrial - white
  misc_feature (58)..(143): Homolog of NCBI NO: 21554988 NR Description: mitochondrial heat shock 22 kd protein-like
  misc_feature (58)..(143): Homolog of NCBI NO: 15242086 NR Description: mitochondrial heat shock 22 kd protein-like
  misc_feature (58)..(143): Homolog of NCBI NO: 7441310 NR Description: heat shock protein MTSHP precursor, mitochondrial
  misc_feature (58)..(143): Homolog of NCBI NO: 7159338 NR Description: LMW heat shock protein [Euphorbia esula]
  misc_feature (58)..(143): Homolog of NCBI NO: 123564 NR Description: Small heat shock protein, chloroplast precursor
  misc_feature (39)..(143): Homolog of NCBI NO: 3122228 NR Description: Heat shock 22 kDa protein, mitochondrial
  misc_feature (54)..(143): Homolog of NCBI NO: 4138869 NR Description: small heat shock protein Hsp23.5 [Triticum
  misc_feature (58)..(143): Homolog of NCBI NO: 7441311 NR Description: heat shock protein hsp22 precursor, mitochondrial
RKDPPQQRRRKQTNLATQGERPKGRGECRHGFHCRFQEGRSSSSRSGEAHRSVLRARDMPGLGKEHVKVWAEQNSLVIKGEGEKEDSEDEAAPPPRYSGRIELAPEVYRMDKIKAEMKNGVLKVVVPKVKEQQRKDVFQVNVE

SEQ ID NO: 16485 - protein, 85 aa, Zea mays subsp. mays; identical to SEQ ID NO: 14964
  peptide (1)..(85): Ceres Seq. ID no. 4611716
  misc_feature (1)..(85): Homolog of NCBI NO: 21068482 NR Description: small heat-shock protein [Picea glauca]
  misc_feature (1)..(85): Homolog of NCBI NO: 7441313 NR Description: heat shock protein HSP23.5, mitochondrial - white
  misc_feature (1)..(85): Homolog of NCBI NO: 21554988 NR Description: mitochondrial heat shock 22 kd protein-like
  misc_feature (1)..(85): Homolog of NCBI NO: 15242086 NR Description: mitochondrial heat shock 22 kd protein-like
  misc_feature (1)..(85): Homolog of NCBI NO: 7441310 NR Description: heat shock protein MTSHP precursor, mitochondrial
  misc_feature (1)..(85): Homolog of NCBI NO: 7159338 NR Description: LMW heat shock protein [Euphorbia esula]
  misc_feature (1)..(85): Homolog of NCBI NO: 123564 NR Description: Small heat shock protein, chloroplast precursor
  misc_feature (1)..(85): Homolog of NCBI NO: 3122228 NR Description: Heat shock 22 kDa protein, mitochondrial
  misc_feature (1)..(85): Homolog of NCBI NO: 4138869 NR Description: small heat shock protein Hsp23.5 [Triticum
  misc_feature (1)..(85): Homolog of NCBI NO: 7441311 NR Description: heat shock protein hsp22 precursor, mitochondrial

SEQ ID NO: 16486 - DNA, 1075 bp, Zea mays subsp. mays
  misc_feature (1)..(1075): Ceres Seq. ID no. 12407455
  misc_feature: MA Experiment ID: 108522 Result: Up-regulated in Transcription
  misc_feature: MA Experiment 108522 PARAMETER Experiment Name: Zm_42deg_Heat_P Parameter: Age (day) Value: 8
  misc_feature: MA Experiment 108522 PARAMETER Experiment Name: Zm_42deg_Heat_P Parameter: Organism Value: Zea mays
  misc_feature: MA Experiment 108522 PARAMETER Experiment Name: Zm_42deg_Heat_P Parameter: Plant Line Value: 35A19
  misc_feature: MA Experiment 108522 PARAMETER Experiment Name: Zm_42deg_Heat_P Parameter: Temperature (deg C) Value: 42 vs. 22
  misc_feature: MA Experiment 108522 PARAMETER Experiment Name: Zm_42deg_Heat_P Parameter: Timepoint (hr) Value: 1
  misc_feature: MA Experiment 108522 PARAMETER Experiment Name: Zm_42deg_Heat_P Parameter: Tissue Value: Aerial
  misc_feature: MA Experiment ID: 20000487 Result: Up-regulated in Transcription
  misc_feature: MA Experiment 20000487 PARAMETER Experiment Name: Zm_50mM_NH4NO3_L_to_H_P Parameter: Organism Value: Zea mays
  misc_feature: MA Experiment 20000487 PARAMETER Experiment Name: Zm_50mM_NH4NO3_L_to_H_P Parameter: Timepoint (hr) Value: 4
  misc_feature: MA Experiment 20000487 PARAMETER Experiment Name: Zm_50mM_NH4NO3_L_to_H_P Parameter: Tissue Value: Leaves
  misc_feature: MA Experiment 20000487 PARAMETER Experiment Name: Zm_50mM_NH4NO3_L_to_H_P Parameter: Treatment Value: 50mM NH4NO3 vs. 100mM Mannitol
ctcccgcagccgccacctcaacccaggaacagagcgaggcgacgccgcggcacctcttctccggtaagtgagatcgcatatctcgtcgcatgcggcgaagaatttttaggtccggtagcttgttctctgctttattcgtggtgaagtttgggcggttcgaagttgatgaattgcttgtacgattcgactgggggtttgtcgtgcttattaggcacgattcgtcgttggttaggtggctgtagcatccctgcttctgttttgcactttctatgcgtatttttgcactctatatgtgttaaggttgacttaaatctgattattcgctcggttagatttggtatcctcatagtgtgtaggtctatctgtcttagaaatactaagtcaaatgttccgcattagcttgcaacccaaagtcttccgcagatagtaatgatatacggaatatcacatttggcagttgatattgattatttaggcgaagggaaatggcaaccgttccaggggatctgatctggcaggttgtgaggaagaacaactccttccttgtgaagcagttcggcaacggcaatgccaaggtgcagttcaccaaggagccgaacaacctctacaacatccactccttcaaacactcgggtttggcgaacaagaagactgtgacgatccagccagctgcaaaggactcggctgtggtcctctctactaccaagaccaagaagcagaacgcacctgcgaagctcagccacaagtctgtgatgcgcaaggagttccgcaagatggccaaggctgtgaaaaaccaggttagtgacaactactacaggcctgatctgaccaagccagctcttgctaggctaagctcggtgtaccgcagcctccaggttgccaagtccggtgtcaagaagaagaacaggcagtcctaagcgctaagtttgtgttctgtcagggggcatgttggtgctcgtagtcccagcttatatttatctatgttccaacagttttgagacttgttagaactgagcaaaccatgttaagatgctgctgtgtgtcattccttaaaaaaattgccttgcactttgtg

SEQ ID NO: 16487 - protein, 143 aa, Zea mays subsp. mays
  peptide (1)..(143): Ceres Seq. ID no. 12407456
  misc_feature (5)..(136): Pfam Name: Ribosomal L28e protein family Pfam Description: Ribosomal L28e protein family
  misc_feature (8)..(141): Homolog of NCBI NO: 33416595 NR Description: Unknown (protein for MGC:66289) [Danio rerio]
  misc_feature (1)..(138): Homolog of NCBI NO: 38047791 NR Description: similar to Drosophila melanogaster CG12740
  misc_feature (8)..(141): Homolog of NCBI NO: 6677779 NR Description: ribosomal protein L28
  misc_feature (1)..(138): Homolog of NCBI NO: 24656625 NR Description: CG12740-PA [Drosophila melanogaster]
  misc_feature (8)..(134): Homolog of NCBI NO: 24418650 NR Description: 60S ribosomal protein L28
  misc_feature (3)..(134): Homolog of NCBI NO: 19114036 NR Description: 60s ribosomal protein L28/L44
  misc_feature (1)..(138): Homolog of NCBI NO: 20976820 NR Description: GH04183p [Drosophila melanogaster]
  misc_feature (1)..(143): Homolog of NCBI NO: 15233567 NR Description: putative protein
  misc_feature (1)..(143): Homolog of NCBI NO: 15224835 NR Description: putative ribosomal protein L28
  misc_feature (1)..(143): Homolog of NCBI NO: 34910390 NR Description: ribosomal protein L28-like
MATVPGDLIWQVVRKNNSFLVKQFGNGNAKVQFTKEPNNLYNIHSFKHSGLANKKTVTIQPAAKDSAVVLSTTKTKKQNAPAKLSHKSVMRKEFRKMAKAVKNQVSDNYYRPDLTKPALARLSSVYRSLQVAKSGVKKKNRQS

SEQ ID NO: 16488 - protein, 77 aa, Zea mays subsp. mays
  peptide (1)..(77): Ceres Seq. ID no. 12407457
MNCLYDSTGGLSCLLGTIRRWLGGCSIPASVLHFLCVFLHSICVKVDLNLIIRSVRFGILIVCRSICLRNTKSNVPH

SEQ ID NO: 16489 - DNA, 1418 bp, Zea mays subsp. mays
  misc_feature (1)..(1418): Ceres Seq. ID no. 12376548
  misc_feature: MA Experiment ID: 108527 Result: Up-regulated in Transcription
  misc_feature: MA Experiment 108527 PARAMETER Experiment Name: Zm_5mM_NO_P Parameter: Age (day) Value: 8
  misc_feature: MA Experiment 108527 PARAMETER Experiment Name: Zm_5mM_NO_P Parameter: Organism Value: Zea mays
  misc_feature: MA Experiment 108527 PARAMETER Experiment Name: Zm_5mM_NO_P Parameter: Plant Line Value: 35A19
  misc_feature: MA Experiment 108527 PARAMETER Experiment Name: Zm_5mM_NO_P Parameter: Timepoint (hr) Value: 6
  misc_feature: MA Experiment 108527 PARAMETER Experiment Name: Zm_5mM_NO_P Parameter: Tissue Value: Aerial
  misc_feature: MA Experiment 108527 PARAMETER Experiment Name: Zm_5mM_NO_P Parameter: Treatment Value: 5mM NO vs. No Treatment
  misc_feature: MA Experiment ID: 20000478 Result: Up-regulated in Transcription
  misc_feature: MA Experiment 20000478 PARAMETER Experiment Name: Zm_5mM_SA_P Parameter: Age (day) Value: 11
  misc_feature: MA Experiment 20000478 PARAMETER Experiment Name: Zm_5mM_SA_P Parameter: Organism Value: Zea mays
  misc_feature: MA Experiment 20000478 PARAMETER Experiment Name: Zm_5mM_SA_P Parameter: Plant Line Value: 35A19
  misc_feature: MA Experiment 20000478 PARAMETER Experiment Name: Zm_5mM_SA_P Parameter: Timepoint (hr) Value: 72
  misc_feature: MA Experiment 20000478 PARAMETER Experiment Name: Zm_5mM_SA_P Parameter: Tissue Value: Aerial
  misc_feature: MA Experiment 20000478 PARAMETER Experiment Name: Zm_5mM_SA_P Parameter: Treatment Value: 5mM SA vs. No Treatment
  misc_feature: MA Experiment ID: 20000535 Result: Up-regulated in Transcription
  misc_feature: MA Experiment 20000535 PARAMETER Experiment Name: Zm_Hybrid_Seed_Dev_P Parameter: DAP Value: 30 vs. 12
  misc_feature: MA Experiment 20000535 PARAMETER Experiment Name: Zm_Hybrid_Seed_Dev_P Parameter: Organism Value: Zea mays
  misc_feature: MA Experiment 20000535 PARAMETER Experiment Name: Zm_Hybrid_Seed_Dev_P Parameter: Plant Line Value: 35A19
  misc_feature: MA Experiment 20000535 PARAMETER Experiment Name: Zm_Hybrid_Seed_Dev_P Parameter: Tissue Value: Embryo vs. Unfert Floret
  misc_feature: MA Experiment ID: 20000626 Result: Up-regulated in Transcription
  misc_feature: MA Experiment 20000626 PARAMETER Experiment Name: Zm_Herbicide-Treatments_P Parameter: Timepoint (hr) Value: 12
  misc_feature: MA Experiment 20000626 PARAMETER Experiment Name: Zm_Herbicide-Treatments_P Parameter: Tissue Value: Aerial
  misc_feature: MA Experiment 20000626 PARAMETER Experiment Name: Zm_Herbicide-Treatments_P Parameter: Treatment Value: Roundup vs. No Treatment
aaggatcgagtcgtttaattttctactaggagctagcagcgagcgggttatttgcaacgacggcatcgtcttggcgttggcgggcgtgtttggcaccatgggcgactactactacagccgccgctcgccgcacctcctcccggcggcggtgctggcgctgctcgccgtcgtcgtcgtcgtcgtcgcgagcagcagcctccggggtgcggcggcggcggcgggggcgggccggaatgtgatcacgcacatcaagggcttcgaaggccctctgcccttccacctcgagacagggtacgtggaggtggacgaggagcacggcacgcggctcttctactacttcatcgagtcggagaggaacccggcggaggacccgctcatcctctggatcaccggtggccccggatgctccgcgctctctggactcctcttcgagatcggacccctcaagttcgatgtggcggggtacacggaagggttcccgcggctggtctacttcgaggattcatggaccaaggtgagcaacgtgatcttccttgacgcgccggtggggacaggcttctcctactcgcgggaggaggccggcctgaacgtgagcctgacggagtccgggcggcagcaccacgtgttcctccgcaagtgggtggcggagcaccccgagttcgcgtccaacccgctgtacatcggcggcgactcctactcgggctacaccgtgcccgtgacggcgatggacatcgccaccagcagcgacgacgaggagccgccgaagctgaaccttgtgggctacctggtgggcaacgccgcgacggacgaccggtacgacacggggggcaaggtgccgttcatgcacggcatggggctcatctccgacgagctgtacgagtcggcgaagcagggctgcggcggcgacttctacgtggcgccggaccccaccaacgcgcggtgcgccagcgcgatgatggccatcaacatggtgaccttcgccgtgaaccccgtgcacatcctggagcccttctgcggcgcggccgtgcgggccgacggcggcagcatcttccagggctacggcggcggcgcgaggcggtcgatgctggtgcgggacgacgtccgccacccgggcttcttcgccaagcagcggctgggcctgcccgtggagtgcagggacaacgggtaccggctgtcctacatctgggcggacgacccggaggtgagggaggcgctcggcatccacgagggttccatcgggtcgtggagccggtgcaccatgctgtcgcactacaggcacgacgtcaccaccgtcatcccctaccatgtcaacctcaccaaggcaggatacagggcgcttgtgtacaagtacgtacgtacgtgttagctagtatgtatatactattgatcgatgcttattaaactaggattattatttg

SEQ ID NO: 16490 - protein, 454 aa, Zea mays subsp. mays
  peptide (1)..(454): Ceres Seq. ID no. 12376549
  misc_feature (78)..(338): Homolog of NCBI NO: 15219435 NR Description: putative serine carboxypeptidase; protein id:
  misc_feature (78)..(448): Homolog of NCBI NO: 15217581 NR Description: serine carboxypeptidase, putative; protein id:
  misc_feature (383)..(448): Homolog of NCBI NO: 15219433 NR Description: putative serine carboxypeptidase; protein id:
  misc_feature (78)..(338): Homolog of NCBI NO: 15219433 NR Description: putative serine carboxypeptidase; protein id:
  misc_feature (383)..(448): Homolog of NCBI NO: 15219427 NR Description: putative serine carboxypeptidase; protein id:
  misc_feature (78)..(338): Homolog of NCBI NO: 15219427 NR Description: putative serine carboxypeptidase; protein id:
  misc_feature (377)..(448): Homolog of NCBI NO: 37530314 NR Description: putative serine carboxypeptidase
  misc_feature (50)..(296): Homolog of NCBI NO: 37530314 NR Description: putative serine carboxypeptidase
  misc_feature (377)..(448): Homolog of NCBI NO: 37530318 NR Description: putative acyltransferase [Oryza sativa (japonica
  misc_feature (144)..(343): Homolog of NCBI NO: 37530318 NR Description: putative acyltransferase [Oryza sativa (japonica
RIESFNFLLGASSERVICNDGIVLALAGVFGTMGDYYYSRRSPHLLPAAVLALLAVVVVVVASSSLRGAAAAAGAGRNVITHIKGFEGPLPFHLETGYVEVDEEHGTRLFYYFIESERNPAEDPLILWITGGPGCSALSGLLFEIGPLKFDVAGYTEGFPRLVYFEDSWTKVSNVIFLDAPVGTGFSYSREEAGLNVSLTESGRQHHVFLRKWVAEHPEFASNPLYIGGDSYSGYTVPVTAMDIATSSDDEEPPKLNLVGYLVGNAATDDRYDTGGKVPFMHGMGLISDELYESAKQGCGGDFYVAPDPTNARCASAMMAINMVTFAVNPVHILEPFCGAAVRADGGSIFQGYGGGARRSMLVRDDVRHPGFFAKQRLGLPVECRDNGYRLSYIWADDPEVREALGIHEGSIGSWSRCTMLSHYRHDVTTVIPYHVNLTKAGYRALVYKYVRTC

SEQ ID NO: 16491 - protein, 422 aa, Zea mays subsp. mays
  peptide (1)..(422): Ceres Seq. ID no. 12376550
  misc_feature (112)..(311): Homolog of NCBI NO: 37530318 NR Description: putative acyltransferase [Oryza sativa (japonica
  misc_feature (46)..(306): Homolog of NCBI NO: 15219435 NR Description: putative serine carboxypeptidase; protein id:
  misc_feature (46)..(416): Homolog of NCBI NO: 15217581 NR Description: serine carboxypeptidase, putative; protein id:
  misc_feature (351)..(416): Homolog of NCBI NO: 15219433 NR Description: putative serine carboxypeptidase; protein id:
  misc_feature (46)..(306): Homolog of NCBI NO: 15219433 NR Description: putative serine carboxypeptidase; protein id:
  misc_feature (351)..(416): Homolog of NCBI NO: 15219427 NR Description: putative serine carboxypeptidase; protein id:
  misc_feature (46)..(306): Homolog of NCBI NO: 15219427 NR Description: putative serine carboxypeptidase; protein id:
  misc_feature (345)..(416): Homolog of NCBI NO: 37530314 NR Description: putative serine carboxypeptidase
  misc_feature (18)..(264): Homolog of NCBI NO: 37530314 NR Description: putative serine carboxypeptidase
  misc_feature (345)..(416): Homolog of NCBI NO: 37530318 NR Description: putative acyltransferase [Oryza sativa (japonica
MGDYYYSRRSPHLLPAAVLALLAVVVVVVASSSLRGAAAAAGAGRNVITHIKGFEGPLPFHLETGYVEVDEEHGTRLFYYFIESERNPAEDPLILWITGGPGCSALSGLLFEIGPLKFDVAGYTEGFPRLVYFEDSWTKVSNVIFLDAPVGTGFSYSREEAGLNVSLTESGRQHHVFLRKWVAEHPEFASNPLYIGGDSYSGYTVPVTAMDIATSSDDEEPPKLNLVGYLVGNAATDDRYDTGGKVPFMHGMGLISDELYESAKQGCGGDFYVAPDPTNARCASAMMAINMVTFAVNPVHILEPFCGAAVRADGGSIFQGYGGGARRSMLVRDDVRHPGFFAKQRLGLPVECRDNGYRLSYIWADDPEVREALGIHEGSIGSWSRCTMLSHYRHDVTTVIPYHVNLTKAGYRALVYKYVRTC

SEQ ID NO: 16492 - DNA, 1481 bp, Zea mays subsp. mays
  misc_feature (1)..(1481): Ceres Seq. ID no. 12376576
  misc_feature: MA Experiment ID: 108547 Result: Up-regulated in Transcription
  misc_feature: MA Experiment 108547 PARAMETER Experiment Name: Zm_Imbibed_Seeds_P Parameter: Age (day) Value: 4 vs. 2
  misc_feature: MA Experiment 108547 PARAMETER Experiment Name: Zm_Imbibed_Seeds_P Parameter: Organism Value: Zea mays
  misc_feature: MA Experiment 108547 PARAMETER Experiment Name: Zm_Imbibed_Seeds_P Parameter: Plant Line Value: 35A19
  misc_feature: MA Experiment 108547 PARAMETER Experiment Name: Zm_Imbibed_Seeds_P Parameter: Tissue Value: Aerial vs. Embryo
  misc_feature: MA Experiment ID: 20000492 Result: Down-regulated in Transcription
  misc_feature: MA Experiment 20000492 PARAMETER Experiment Name: Zm_Hybrid_Seed_Dev_P Parameter: DAP Value: 12
  misc_feature: MA Experiment 20000492 PARAMETER Experiment Name: Zm_Hybrid_Seed_Dev_P Parameter: Organism Value: Zea mays
  misc_feature: MA Experiment 20000492 PARAMETER Experiment Name: Zm_Hybrid_Seed_Dev_P Parameter: Plant Line Value: 35A19
  misc_feature: MA Experiment 20000492 PARAMETER Experiment Name: Zm_Hybrid_Seed_Dev_P Parameter: Tissue Value: Fert Kernel vs. Unfert Floret
  misc_feature: MA Experiment ID: 20000535 Result: Down-regulated in Transcription
  misc_feature: MA Experiment 20000535 PARAMETER Experiment Name: Zm_Hybrid_Seed_Dev_P Parameter: DAP Value: 30 vs. 12
  misc_feature: MA Experiment 20000535 PARAMETER Experiment Name: Zm_Hybrid_Seed_Dev_P Parameter: Organism Value: Zea mays
  misc_feature: MA Experiment 20000535 PARAMETER Experiment Name: Zm_Hybrid_Seed_Dev_P Parameter: Plant Line Value: 35A19
  misc_feature: MA Experiment 20000535 PARAMETER Experiment Name: Zm_Hybrid_Seed_Dev_P Parameter: Tissue Value: Embryo vs. Unfert Floret
atccagcgcggctccactcaaagcttgagccttccttttcttttcttgtttttgttttattttcttggtaggggggagtcgtcttctccatctctccttagcctaggagaaggagagatccagaggcaaaagcttcagggtttgtacaaattctagatctaaccggactaaccagaaaacaaaacaaaaaaagacgaaagcatgagccacttcgccgccgccatgaagagcccccttgcggtcgccgtcgcagcgcccgccgccgccgccgacgccaagagcccgctcttctgccccaagccgcggcgccccgcggcgccgctgcggtgccaccagagcggcggcttctccgacgccggcacggatctgctcgacctcctnctctcgaagggcgacgagagcggcctgtcgtcggcgtccccgcagccgccgctgttctgcggctcgccgccgcggcgagcgtcgaaccccgtggtccacgacagcaggttcggcgcggactgccnncccatgcccgtgccgggactgcccgtgcaccggcccagcccgcgcccgtcggctggcggnnccgtccatgtcgccgcgagggtgcgcccgcgcgcggttcgcgttccagcccgccgcggtccgcgtnnagggttttgactgcctcgaccgcggccgcggcggccgtggccatggcatcaccgccatggcctagactgtgcacatacaacagccagcaccctgagaccctcctcccccgcccctccatccatggcacgcaagagccaggagcacctggttggaggtagaagaagagggggggggggggggggggctgttaggggaggaattgagagggatcggtttgtcctaaatcttaacccccctaaaaagtaaaaaaaaactagtacttttatataaacccgtcccatcctcccatccccaacaattacagcgagtttaggtaattttatcacagatccttttttgtatgtaaataaagttcgaggttcagaaattatgtagaaaaaatgtagaggggaggaggagcagggacaaaagggcttacaaaaagcagagaagggatgattaatcagagtttcctctctcatgtgtcactgcccctcctctctggaaggattaattagccattgggtttggtgggagggagttcgggaatagttaggtagtatgtcctagttcgtcaattaatgatgctttcttttttgttttttgatggggaattgttttttctttgttgtccgtccgtccatccatgcaaccaagaaatttcatggagaatctgtacaaaagagtggctagctattacgagagtccggtctgagagaagcaacacgagagaagtcagtggatgagcttagagaaagacattcacacgctgcgagggttgataatttgtgatattttcctctttttttcttcctgattttgtatattgtaatatcctgcttgattttccaatgaatgaatcaatc

SEQ ID NO: 16493 - protein, 147 aa, Zea mays subsp. mays
  peptide (1)..(147): Ceres Seq. ID no. 12376577
  misc_feature (31)..(137): Homolog of NCBI NO: 18396232 NR Description: Expressed protein
  misc_feature (24)..(114): Homolog of NCBI NO: 30685676 NR Description: expressed protein [Arabidopsis thaliana]
  misc_feature (24)..(114): Homolog of NCBI NO: 11762168 NR Description: AT5g16110 [Arabidopsis thaliana]
  misc_feature (60)..(60): Xaa is any aa, unknown or other
  misc_feature (102)..(102): Xaa is any aa, unknown or other
  misc_feature (122)..(122): Xaa is any aa, unknown or other
  misc_feature (123)..(123): Xaa is any aa, unknown or other
  misc_feature (145)..(145): Xaa is any aa, unknown or other
MSHFAAAMKSPLAVAVAAPAAAADAKSPLFCPKPRRPAAPLRCHQSGGFSDAGTDLLDLXLSKGDESGLSSASPQPPLFCGSPPRRASNPVVHDSRFGADCXPMPVPGLPVHRPSPRPSAGXXVHVAARVRPRAVRVPARRGPRXGF

SEQ ID NO: 16494 - protein, 140 aa, Zea mays subsp. mays
  peptide (1)..(140): Ceres Seq. ID no. 12376578
  misc_feature (24)..(130): Homolog of NCBI NO: 18396232 NR Description: Expressed protein
  misc_feature (17)..(107): Homolog of NCBI NO: 30685676 NR Description: expressed protein [Arabidopsis thaliana]
  misc_feature (17)..(107): Homolog of NCBI NO: 11762168 NR Description: AT5g16110 [Arabidopsis thaliana]
  misc_feature (53)..(53): Xaa is any aa, unknown or other
  misc_feature (95)..(95): Xaa is any aa, unknown or other
  misc_feature (115)..(115): Xaa is any aa, unknown or other
  misc_feature (116)..(116): Xaa is any aa, unknown or other
  misc_feature (138)..(138): Xaa is any aa, unknown or other
MKSPLAVAVAAPAAAADAKSPLFCPKPRRPAAPLRCHQSGGFSDAGTDLLDLXLSKGDESGLSSASPQPPLFCGSPPRRASNPVVHDSRFGADCXPMPVPGLPVHRPSPRPSAGXXVHVAARVRPRAVRVPARRGPRXGF

SEQ ID NO: 16495 - DNA, 1965 bp, Zea mays subsp. mays
  misc_feature (1)..(1965): Ceres Seq. ID no. 12406126
  misc_feature: MA Experiment ID: 20000492 Result: Up-regulated in Transcription
  misc_feature: MA Experiment 20000492 PARAMETER Experiment Name: Zm_Hybrid_Seed_Dev_P Parameter: DAP Value: 12
  misc_feature: MA Experiment 20000492 PARAMETER Experiment Name: Zm_Hybrid_Seed_Dev_P Parameter: Organism Value: Zea mays
  misc_feature: MA Experiment 20000492 PARAMETER Experiment Name: Zm_Hybrid_Seed_Dev_P Parameter: Plant Line Value: 35A19
  misc_feature: MA Experiment 20000492 PARAMETER Experiment Name: Zm_Hybrid_Seed_Dev_P Parameter: Tissue Value: Fert Kernel vs. Unfert Floret
aaggcctcaacacacacacacactctctcgcttgacctacccccctccgccccccgccgggcctgcagggtgttcgacgcttcgcccgcccgcccgagcgccgccacggcatggcttcctccatctccgccgccgctaaggcctccgcggcctttgcccaaaagaaggagctggccgcgccggcgccgcaccgcgcgggctcgagccgtcggaccaagccgtgccgcgtgcgcgccgtcgcgtcgcccgcgcgcaccccccgcgccccgtcgtccaccggctcggtgaagaccgcgatgacgatgacggagaagatcctggcgagggcgtcggagcgcgcggcgctggagcccggggagaacgtgtgggtggacatcgacgtgctcatgacgcacgacgtctgcgggcccggcaccatcggcatcttcaagaaggagttcggggaggatgccaaggtctgggaccgcgagaaggtcgtcatcatccccgaccactacatcttcaccagcgacgagcgcgccaaccgcaacgtcgatatcctcagggacttctgtctggagcagaacatcaagtacttctatgatatcaaggacctcagcgatttcagggctaatccagactacaagggtgtctgccacattgcacttgctcaggaaggccactgccgaccaggcgaggttctcctgggtactgattctcatacgtgcaatgctggagcctttggtcaatttgcaaccggaattggaaacactgatgcaggttttgtgatgggcactggaaaggctcttctcaaggtgccacctactatcaggtttgtattagatggagaaatgccgccttatttacttgcgaaggatctgattttgcaaattattggtgagatttcagtatctggtgcaacctacaaatcgatggagtttgttggatcaactgtagaaagtctaaccatggaagaacgtatgacactatgcaacatggttgttgaagctggtggaaagaacggtgtcgtgcctgctgatgaaactacatttaaataccttgagggtaggacatcagttgattatcaacctgtctacagtgatgctgaggccagattttttagtgactaccggtttgatgtatcgaaactggagccagtagttgccaagccacattcgcctgacaaccgtgccctagcaagagaatgcaaagatgtcaagatcgaccgagtctatattggttcctgcactggtggcaagactgaggacttccttgctgccgcaaaggtgttcttagcctcgggaaagaaggttaaagttcccacattccttgtccctgccacacaaaaggtgtggatggacgtatatagccttcctgtaccaggatctggcggcaaaacttgcgcccagatattcgaggaggctggttgtgatacaccagcaagtcctaattgcggcgcttgtctgggtggccctcgcgatacgtatgcacggatgaatgaacctacggtctgcgtgtccaccacgaacaggaacttcccgggcaggatggggcacaaggaagggcagatctacctggcgtccccctacaccgctgcagcctcggccctgacggggtacgtcacggaccccagggacttcctcatgtgaaacgatcttgaaacagccacagagtgcctgcaccgctgttttttgtgttgaaccttagtttaggcgtgtgcccttcgttgagaaataaactcccatgtcgggaggctgccattgccatttatgttttttgcgttatatttattacagtgactgccgataacgtagttgagcgttacaagggaaatacattcattcttcccagtatcgatggcagtcactagactccgttcttacaaaaaaaaaggcatgtcgagagatcttgtagttcatacacttgttaaaacacttttttgtacaatgtatgggaaagaagctcagtcgatctttcttgttttgc

SEQ ID NO: 16496 - protein, 505 aa, Zea mays subsp. mays
  peptide (1)..(505): Ceres Seq. ID no. 12406127
  misc_feature (64)..(495): Pfam Name: Aconitase family (aconitate hydratase) Pfam Description: Aconitase family (aconitate hydratase)
  misc_feature (62)..(504): Homolog of NCBI NO: 23112852 NR Description: hypothetical protein [Desulfitobacterium
  misc_feature (63)..(502): Homolog of NCBI NO: 18977310 NR Description: 3-isopropylmalate dehydratase large subunit;
  misc_feature (63)..(500): Homolog of NCBI NO: 15606262 NR Description: large subunit of isopropylmalate isomerase
  misc_feature (62)..(500): Homolog of NCBI NO: 15679385 NR Description: 3-isopropylmalate dehydratase, LeuD subunit
  misc_feature (63)..(502): Homolog of NCBI NO: 15668676 NR Description: 3-isopropylmalate dehydratase (leuC)
  misc_feature (64)..(504): Homolog of NCBI NO: 20094876 NR Description: 3-isopropylmalate dehydratase large subunit
  misc_feature (62)..(504): Homolog of NCBI NO: 21673449 NR Description: 3-isopropylmalate dehydratase, large subunit,
  misc_feature (63)..(504): Homolog of NCBI NO: 23043646 NR Description: hypothetical protein [Trichodesmium erythraeum
  misc_feature (1)..(504): Homolog of NCBI NO: 7450363 NR Description: hypothetical protein T9E8.170 - Arabidopsis
  misc_feature (1)..(504): Homolog of NCBI NO: 18414006 NR Description: putative protein
MASSISAAAKASAAFAQKKELAAPAPHRAGSSRRTKPCRVRAVASPARTPRAPSSTGSVKTAMTMTEKILARASERAALEPGENVWVDIDVLMTHDVCGPGTIGIFKKEFGEDAKVWDREKVVIIPDHYIFTSDERANRNVDILRDFCLEQNIKYFYDIKDLSDFRANPDYKGVCHIALAQEGHCRPGEVLLGTDSHTCNAGAFGQFATGIGNTDAGFVMGTGKALLKVPPTIRFVLDGEMPPYLLAKDLILQIIGEISVSGATYKSMEFVGSTVESLTMEERMTLCNMVVEAGGKNGVVPADETTFKYLEGRTSVDYQPVYSDAEARFFSDYRFDVSKLEPVVAKPHSPDNRALARECKDVKIDRVYIGSCTGGKTEDFLAAAKVFLASGKKVKVPTFLVPATQKVWMDVYSLPVPGSGGKTCAQIFEEAGCDTPASPNCGACLGGPRDTYARMNEPTVCVSTTNRNFPGRMGHKEGQIYLASPYTAAASALTGYVTDPRDFLM

SEQ ID NO: 16497 - protein, 443 aa, Zea mays subsp. mays
  peptide (1)..(443): Ceres Seq. ID no. 12406128
  misc_feature (2)..(433): Pfam Name: Aconitase family (aconitate hydratase) Pfam Description: Aconitase family (aconitate hydratase)
  misc_feature (1)..(442): Homolog of NCBI NO: 23112852 NR Description: hypothetical protein [Desulfitobacterium
  misc_feature (1)..(440): Homolog of NCBI NO: 18977310 NR Description: 3-isopropylmalate dehydratase large subunit;
  misc_feature (1)..(438): Homolog of NCBI NO: 15606262 NR Description: large subunit of isopropylmalate isomerase
  misc_feature (1)..(438): Homolog of NCBI NO: 15679385 NR Description: 3-isopropylmalate dehydratase, LeuD subunit
  misc_feature (1)..(440): Homolog of NCBI NO: 15668676 NR Description: 3-isopropylmalate dehydratase (leuC)
  misc_feature (2)..(442): Homolog of NCBI NO: 20094876 NR Description: 3-isopropylmalate dehydratase large subunit
  misc_feature (1)..(442): Homolog of NCBI NO: 21673449 NR Description: 3-isopropylmalate dehydratase, large subunit,
  misc_feature (1)..(442): Homolog of NCBI NO: 23043646 NR Description: hypothetical protein [Trichodesmium erythraeum
  misc_feature (1)..(442): Homolog of NCBI NO: 7450363 NR Description: hypothetical protein T9E8.170 - Arabidopsis
  misc_feature (1)..(442): Homolog of NCBI NO: 18414006 NR Description: putative protein
MTMTEKILARASERAALEPGENVWVDIDVLMTHDVCGPGTIGIFKKEFGEDAKVWDREKVVIIPDHYIFTSDERANRNVDILRDFCLEQNIKYFYDIKDLSDFRANPDYKGVCHIALAQEGHCRPGEVLLGTDSHTCNAGAFGQFATGIGNTDAGFVMGTGKALLKVPPTIRFVLDGEMPPYLLAKDLILQIIGEISVSGATYKSMEFVGSTVESLTMEERMTLCNMVVEAGGKNGVVPADETTFKYLEGRTSVDYQPVYSDAEARFFSDYRFDVSKLEPVVAKPHSPDNRALARECKDVKIDRVYIGSCTGGKTEDFLAAAKVFLASGKKVKVPTFLVPATQKVWMDVYSLPVPGSGGKTCAQIFEEAGCDTPASPNCGACLGGPRDTYARMNEPTVCVSTTNRNFPGRMGHKEGQIYLASPYTAAASALTGYVTDPRDFLM

SEQ ID NO: 16498 - protein, 441 aa, Zea mays subsp. mays
  peptide (1)..(441): Ceres Seq. ID no. 12406129
  misc_feature (1)..(431): Pfam Name: Aconitase family (aconitate hydratase) Pfam Description: Aconitase family (aconitate hydratase)
  misc_feature (1)..(440): Homolog of NCBI NO: 23112852 NR Description: hypothetical protein [Desulfitobacterium
  misc_feature (1)..(438): Homolog of NCBI NO: 18977310 NR Description: 3-isopropylmalate dehydratase large subunit;
  misc_feature (1)..(436): Homolog of NCBI NO: 15606262 NR Description: large subunit of isopropylmalate isomerase
  misc_feature (1)..(436): Homolog of NCBI NO: 15679385 NR Description: 3-isopropylmalate dehydratase, LeuD subunit
  misc_feature (1)..(438): Homolog of NCBI NO: 15668676 NR Description: 3-isopropylmalate dehydratase (leuC)
  misc_feature (1)..(440): Homolog of NCBI NO: 20094876 NR Description: 3-isopropylmalate dehydratase large subunit
  misc_feature (1)..(440): Homolog of NCBI NO: 21673449 NR Description: 3-isopropylmalate dehydratase, large subunit,
  misc_feature (1)..(440): Homolog of NCBI NO: 23043646 NR Description: hypothetical protein [Trichodesmium erythraeum
  misc_feature (1)..(440): Homolog of NCBI NO: 7450363 NR Description: hypothetical protein T9E8.170 - Arabidopsis
  misc_feature (1)..(440): Homolog of NCBI NO: 18414006 NR Description: putative protein
MTEKILARASERAALEPGENVWVDIDVLMTHDVCGPGTIGIFKKEFGEDAKVWDREKVVIIPDHYIFTSDERANRNVDILRDFCLEQNIKYFYDIKDLSDFRANPDYKGVCHIALAQEGHCRPGEVLLGTDSHTCNAGAFGQFATGIGNTDAGFVMGTGKALLKVPPTIRFVLDGEMPPYLLAKDLILQIIGEISVSGATYKSMEFVGSTVESLTMEERMTLCNMVVEAGGKNGVVPADETTFKYLEGRTSVDYQPVYSDAEARFFSDYRFDVSKLEPVVAKPHSPDNRALARECKDVKIDRVYIGSCTGGKTEDFLAAAKVFLASGKKVKVPTFLVPATQKVWMDVYSLPVPGSGGKTCAQIFEEAGCDTPASPNCGACLGGPRDTYARMNEPTVCVSTTNRNFPGRMGHKEGQIYLASPYTAAASALTGYVTDPRDFLM

SEQ ID NO: 16499 - DNA, 1799 bp, Zea mays subsp. mays
  misc_feature (1)..(1799): Ceres Seq. ID no. 12358658
  misc_feature: MA Experiment ID: 108522 Result: Down-regulated in Transcription
  misc_feature: MA Experiment 108522 PARAMETER Experiment Name: Zm_42deg_Heat_P Parameter: Age (day) Value: 8
  misc_feature: MA Experiment 108522 PARAMETER Experiment Name: Zm_42deg_Heat_P Parameter: Organism Value: Zea mays
  misc_feature: MA Experiment 108522 PARAMETER Experiment Name: Zm_42deg_Heat_P Parameter: Plant Line Value: 35A19
  misc_feature: MA Experiment 108522 PARAMETER Experiment Name: Zm_42deg_Heat_P Parameter: Temperature (deg C) Value: 42 vs. 22
  misc_feature: MA Experiment 108522 PARAMETER Experiment Name: Zm_42deg_Heat_P Parameter: Timepoint (hr) Value: 1
  misc_feature: MA Experiment 108522 PARAMETER Experiment Name: Zm_42deg_Heat_P Parameter: Tissue Value: Aerial
  misc_feature: MA Experiment ID: 108529 Result: Down-regulated in Transcription
  misc_feature: MA Experiment 108529 PARAMETER Experiment Name: Zm_Imbibed_Seeds_P Parameter: Age (day) Value: 5 vs. 2
  misc_feature: MA Experiment 108529 PARAMETER Experiment Name: Zm_Imbibed_Seeds_P Parameter: Organism Value: Zea mays
  misc_feature: MA Experiment 108529 PARAMETER Experiment Name: Zm_Imbibed_Seeds_P Parameter: Plant Line Value: 35A19
  misc_feature: MA Experiment 108529 PARAMETER Experiment Name: Zm_Imbibed_Seeds_P Parameter: Tissue Value: Roots vs. Embryo
  misc_feature: MA Experiment ID: 108535 Result: Up-regulated in Transcription
  misc_feature: MA Experiment 108535 PARAMETER Experiment Name: Zm_Meristem_P Parameter: Age (day) Value: 8
  misc_feature: MA Experiment 108535 PARAMETER Experiment Name: Zm_Meristem_P Parameter: Organism Value: Zea mays
  misc_feature: MA Experiment 108535 PARAMETER Experiment Name: Zm_Meristem_P Parameter: Plant Line Value: 35A19
  misc_feature: MA Experiment 108535 PARAMETER Experiment Name: Zm_Meristem_P Parameter: Tissue Value: Root Meristem vs. Above Root Meristem
  misc_feature: MA Experiment ID: 108536 Result: Up-regulated in Transcription
  misc_feature: MA Experiment 108536 PARAMETER Experiment Name: Zm_Meristem_P Parameter: Age (day) Value: 8
  misc_feature: MA Experiment 108536 PARAMETER Experiment Name: Zm_Meristem_P Parameter: Organism Value: Zea mays
  misc_feature: MA Experiment 108536 PARAMETER Experiment Name: Zm_Meristem_P Parameter: Plant Line Value: 35A19
  misc_feature: MA Experiment 108536 PARAMETER Experiment Name: Zm_Meristem_P Parameter: Tissue Value: Shoot Meristem vs. Above Shoot Meristem
  misc_feature: MA Experiment ID: 108546 Result: Down-regulated in Transcription
  misc_feature: MA Experiment 108546 PARAMETER Experiment Name: Zm_Imbibed_Seeds_P Parameter: Age (day) Value: 3 vs. 2
  misc_feature: MA Experiment 108546 PARAMETER Experiment Name: Zm_Imbibed_Seeds_P Parameter: Organism Value: Zea mays
  misc_feature: MA Experiment 108546 PARAMETER Experiment Name: Zm_Imbibed_Seeds_P Parameter: Plant Line Value: 35A19
  misc_feature: MA Experiment 108546 PARAMETER Experiment Name: Zm_Imbibed_Seeds_P Parameter: Tissue Value: Roots vs. Embryo
  misc_feature: MA Experiment ID: 108559 Result: Down-regulated in Transcription
  misc_feature: MA Experiment 108559 PARAMETER Experiment Name: Zm_5mM_NO_P Parameter: Age (day) Value: 8
  misc_feature: MA Experiment 108559 PARAMETER Experiment Name: Zm_5mM_NO_P Parameter: Organism Value: Zea mays
  misc_feature: MA Experiment 108559 PARAMETER Experiment Name: Zm_5mM_NO_P Parameter: Plant Line Value: 35A19
  misc_feature: MA Experiment 108559 PARAMETER Experiment Name: Zm_5mM_NO_P Parameter: Timepoint (hr) Value: 12
  misc_feature: MA Experiment 108559 PARAMETER Experiment Name: Zm_5mM_NO_P Parameter: Tissue Value: Aerial
  misc_feature: MA Experiment 108559 PARAMETER Experiment Name: Zm_5mM_NO_P Parameter: Treatment Value: 5mM NO vs. No Treatment
  misc_feature: MA Experiment ID: 20000478 Result: Down-regulated in Transcription
  misc_feature: MA Experiment 20000478 PARAMETER Experiment Name: Zm_5mM_SA_P Parameter: Age (day) Value: 11
  misc_feature: MA Experiment 20000478 PARAMETER Experiment Name: Zm_5mM_SA_P Parameter: Organism Value: Zea mays
  misc_feature: MA Experiment 20000478 PARAMETER Experiment Name: Zm_5mM_SA_P Parameter: Plant Line Value: 35A19
  misc_feature: MA Experiment 20000478 PARAMETER Experiment Name: Zm_5mM_SA_P Parameter: Timepoint (hr) Value: 72
  misc_feature: MA Experiment 20000478 PARAMETER Experiment Name: Zm_5mM_SA_P Parameter: Tissue Value: Aerial
  misc_feature: MA Experiment 20000478 PARAMETER Experiment Name: Zm_5mM_SA_P Parameter: Treatment Value: 5mM SA vs. No Treatment
  misc_feature: MA Experiment ID: 20000535 Result: Down-regulated in Transcription
  misc_feature: MA Experiment 20000535 PARAMETER Experiment Name: Zm_Hybrid_Seed_Dev_P Parameter: DAP Value: 30 vs. 12
  misc_feature: MA Experiment 20000535 PARAMETER Experiment Name: Zm_Hybrid_Seed_Dev_P Parameter: Organism Value: Zea mays
  misc_feature: MA Experiment 20000535 PARAMETER Experiment Name: Zm_Hybrid_Seed_Dev_P Parameter: Plant Line Value: 35A19
  misc_feature: MA Experiment 20000535 PARAMETER Experiment Name: Zm_Hybrid_Seed_Dev_P Parameter: Tissue Value: Embryo vs. Unfert Floret
ctataaataaataccgcccaccaacatctggtggtatcaaagaatctcctctgtatctctggcagccgcatcgtctcaatctcagtcactcccggacacgcgcacgagccaccccgcacccaactaaccaacccatggacgcgggcggaacgccgccgctgctgttcctcctggccgcggcggccgccctgctgggcgcggcgctcaggtggctgctcctggcctggcggtcggcggcgaggacggggcggctgccaccgggcagcacggggctgccgctcatcggggagacgctgcgcctcatcgcggcgtacaagacgccgaacccggagccgttcatcgacgagcgcgtggcgcggcacggcagcggggtgttcacgacgcacgtgttcggcgagcgcaccgtgttctccgcggacccggccttcaaccgcctgctcctggccgccgagggccgcgccgtcagctgcagctacccgtcgtccatcgccacgctgctgggcccgcgctcgctgctcctcaccgccggccccgcgcacaagcgcctccactcgctcacgctcgcccgcctcggccggccggcctcgccgccgctgctggcgcacatcgaccgcctcgtcctcgccaccctgcgggactggggccggccaggcgccggcgccgtcgtccgcctcctcgacgaggccaagaagatcaccttcaacctcactgtctggcagctcgtcagcatcgagcctgggccctggaccgagagcctccgccgcgagtacgtcaagctcgtcgacggcttcttctccatccccttccccttcgcctacctcctccctttcaccgcctacggccaggccctcaaggcgaggaagaaggtggctggagctcttcgggaggtgataaggaagaggatgggcgaggaggccggaactggccctggcgccggtagaaatggggagaagaaggacatggtggaggagcttctggaagcagagggtgggagcttctcggtggaggagatggtggatttctgcctgtctctgctggtgggctggctacgagaccacctccgtgctcatgacgctcgccgtcaagttcctcaccgagacgcccactgcactggcgcagctcaaggaagagcacgacagcatcagacacaggaaaggcaaggacgagcagcctctgcaatggagcgattacaagtcgatgccgtttacacaatgcgtgatcagtgagacgctgcgcgtggctaacttgatcagcggggtgttcaggcgggcgaacaccgacatccatttcaaagattacgttatcccaaagggctgcagaatcttcgcgtcgttccgagccgtgcacctgagccccgagcactacgagaacgctcgagccttcgacccctggagatggcagcagagcaagaaggagggagtactagtagtagggcaggacgcgcagcagggggcccagggccagcgtgttcactcccttcggcggggggcctcgcctgtgcccgggccacgagcttgcccgcgtcgtggtctccgttttcctccaccgcctggtgacgcgcttcagctgggaagaggctgaggaggacagggtcgtcttcttccccaccacccgcaccctcaaagggtaccccatcatcctgcggcggcgaccgggttgggatttctgacctagctcatcatgttacaatagagtcgatccatctatagttgttacactcatctctctctctctctctctctctgtctgtaataacactactgtctaatataaacaagcatctccgctctattctgttc

SEQ ID NO: 16500 - protein, 407 aa, Zea mays subsp. mays
  peptide (1)..(407): Ceres Seq. ID no. 12358659
  misc_feature (263)..(346): Pfam Name: Cytochrome P450 Pfam Description: Cytochrome P450
  misc_feature (83)..(301): Homolog of NCBI NO: 18400142 NR Description: cytochrome P450, putative
  misc_feature (80)..(346): Homolog of NCBI NO: 18419825 NR Description: rotundifolia3 (rot3)
  misc_feature (80)..(346): Homolog of NCBI NO: 13878393 NR Description: Cytochrome P450 90C1 (ROTUNDIFOLIA3)
  misc_feature (52)..(300): Homolog of NCBI NO: 2935342 NR Description: steroid 22-alpha-hydroxylase; DWF4; CYP90B1
  misc_feature (52)..(300): Homolog of NCBI NO: 15229822 NR Description: steroid 22-alpha-hydroxylase (DWF4)
  misc_feature (84)..(346): Homolog of NCBI NO: 25282635 NR Description: cytochrome P450 like protein [imported] -
  misc_feature (78)..(346): Homolog of NCBI NO: 34903584 NR Description: cytochrome P450-like protein
  misc_feature (84)..(345): Homolog of NCBI NO: 34902330 NR Description: Putative steroid 22-alpha-hydroxylase
  misc_feature (51)..(346): Homolog of NCBI NO: 9587211 NR Description: cytochrome P450 [Vigna radiata]
  misc_feature (63)..(346): Homolog of NCBI NO: 15239203 NR Description: cytochrome p450, putative
INKYRPPTSGGIKESPLYLWQPHRLNLSHSRTRARATPHPTNQPMDAGGTPPLLFLLAAAAALLGAALRWLLLAWRSAARTGRLPPGSTGLPLIGETLRLIAAYKTPNPEPFIDERVARHGSGVFTTHVFGERTVFSADPAFNRLLLAAEGRAVSCSYPSSIATLLGPRSLLLTAGPAHKRLHSLTLARLGRPASPPLLAHIDRLVLATLRDWGRPGAGAVVRLLDEAKKITFNLTVWQLVSIEPGPWTESLRREYVKLVDGFFSIPFPFAYLLPFTAYGQALKARKKVAGALREVIRKRMGEEAGTGPGAGRNGEKKDMVEELLEAEGGSFSVEEMVDFCLSLLVGWLRDHLRAHDARRQVPHRDAHCTGAAQGRARQHQTQERQGRAASAMERLQVDAVYTMRDQ

SEQ ID NO: 16501 - protein, 363 aa, Zea mays subsp. mays
  peptide (1)..(363): Ceres Seq. ID no. 12358660
  misc_feature (219)..(302): Pfam Name: Cytochrome P450 Pfam Description: Cytochrome P450
  misc_feature (39)..(257): Homolog of NCBI NO: 18400142 NR Description: cytochrome P450, putative
  misc_feature (36)..(302): Homolog of NCBI NO: 18419825 NR Description: rotundifolia3 (rot3)
  misc_feature (36)..(302): Homolog of NCBI NO: 13878393 NR Description: Cytochrome P450 90C1 (ROTUNDIFOLIA3)
  misc_feature (8)..(256): Homolog of NCBI NO: 2935342 NR Description: steroid 22-alpha-hydroxylase; DWF4; CYP90B1
  misc_feature (8)..(256): Homolog of NCBI NO: 15229822 NR Description: steroid 22-alpha-hydroxylase (DWF4)
  misc_feature (40)..(302): Homolog of NCBI NO: 25282635 NR Description: cytochrome P450 like protein [imported] -
  misc_feature (34)..(302): Homolog of NCBI NO: 34903584 NR Description: cytochrome P450-like protein
  misc_feature (40)..(301): Homolog of NCBI NO: 34902330 NR Description: Putative steroid 22-alpha-hydroxylase
  misc_feature (7)..(302): Homolog of NCBI NO: 9587211 NR Description: cytochrome P450 [Vigna radiata]
  misc_feature (19)..(302): Homolog of NCBI NO: 15239203 NR Description: cytochrome p450, putative
MDAGGTPPLLFLLAAAAALLGAALRWLLLAWRSAARTGRLPPGSTGLPLIGETLRLIAAYKTPNPEPFIDERVARHGSGVFTTHVFGERTVFSADPAFNRLLLAAEGRAVSCSYPSSIATLLGPRSLLLTAGPAHKRLHSLTLARLGRPASPPLLAHIDRLVLATLRDWGRPGAGAVVRLLDEAKKITFNLTVWQLVSIEPGPWTESLRREYVKLVDGFFSIPFPFAYLLPFTAYGQALKARKKVAGALREVIRKRMGEEAGTGPGAGRNGEKKDMVEELLEAEGGSFSVEEMVDFCLSLLVGWLRDHLRAHDARRQVPHRDAHCTGAAQGRARQHQTQERQGRAASAMERLQVDAVYTMRDQ

SEQ ID NO: 16502 - protein, 212 aa, Zea mays subsp. mays
  peptide (1)..(212): Ceres Seq. ID no. 12358661
  misc_feature (34)..(155): Pfam Name: Cytochrome P450 Pfam Description: Cytochrome P450
  misc_feature (35)..(154): Homolog of NCBI NO: 18400142 NR Description: cytochrome P450, putative
  misc_feature (35)..(154): Homolog of NCBI NO: 18419825 NR Description: rotundifolia3 (rot3)
  misc_feature (35)..(154): Homolog of NCBI NO: 13878393 NR Description: Cytochrome P450 90C1 (ROTUNDIFOLIA3)
  misc_feature (33)..(154): Homolog of NCBI NO: 2935342 NR Description: steroid 22-alpha-hydroxylase; DWF4; CYP90B1
  misc_feature (33)..(154): Homolog of NCBI NO: 15229822 NR Description: steroid 22-alpha-hydroxylase (DWF4)
  misc_feature (35)..(154): Homolog of NCBI NO: 25282635 NR Description: cytochrome P450 like protein [imported] -
  misc_feature (37)..(154): Homolog of NCBI NO: 34903584 NR Description: cytochrome P450-like protein
  misc_feature (33)..(176): Homolog of NCBI NO: 34902330 NR Description: Putative steroid 22-alpha-hydroxylase
  misc_feature (34)..(158): Homolog of NCBI NO: 9587211 NR Description: cytochrome P450 [Vigna radiata]
  misc_feature (34)..(155): Homolog of NCBI NO: 15239203 NR Description: cytochrome p450, putative
MGRRRTWWRSFWKQRVGASRWRRWWISACLCWWAGYETTSVLMTLAVKFLTETPTALAQLKEEHDSIRHRKGKDEQPLQWSDYKSMPFTQCVISETLRVANLISGVFRRANTDIHFKDYVIPKGCRIFASFRAVHLSPEHYENARAFDPWRWQQSKKEGVLVVGQDAQQGAQGQRVHSLRRGASPVPGPRACPRRGLRFPPPPGDALQLGRG

SEQ ID NO: 16503 - DNA, 1457 bp, Zea mays subsp. mays
  misc_feature (1)..(1457): Ceres Seq. ID no. 12566276
  misc_feature: MA Experiment ID: 108527 Result: Up-regulated in Transcription
  misc_feature: MA Experiment 108527 PARAMETER Experiment Name: Zm_5mM_NO_P Parameter: Age (day) Value: 8
  misc_feature: MA Experiment 108527 PARAMETER Experiment Name: Zm_5mM_NO_P Parameter: Organism Value: Zea mays
  misc_feature: MA Experiment 108527 PARAMETER Experiment Name: Zm_5mM_NO_P Parameter: Plant Line Value: 35A19
  misc_feature: MA Experiment 108527 PARAMETER Experiment Name: Zm_5mM_NO_P Parameter: Timepoint (hr) Value: 6
  misc_feature: MA Experiment 108527 PARAMETER Experiment Name: Zm_5mM_NO_P Parameter: Tissue Value: Aerial
  misc_feature: MA Experiment 108527 PARAMETER Experiment Name: Zm_5mM_NO_P Parameter: Treatment Value: 5mM NO vs. No Treatment
  misc_feature: MA Experiment ID: 20000487 Result: Up-regulated in Transcription
  misc_feature: MA Experiment 20000487 PARAMETER Experiment Name: Zm_50mM_NH4NO3_L_to_H_P Parameter: Organism Value: Zea mays
  misc_feature: MA Experiment 20000487 PARAMETER Experiment Name: Zm_50mM_NH4NO3_L_to_H_P Parameter: Timepoint (hr) Value: 4
  misc_feature: MA Experiment 20000487 PARAMETER Experiment Name: Zm_50mM_NH4NO3_L_to_H_P Parameter: Tissue Value: Leaves
  misc_feature: MA Experiment 20000487 PARAMETER Experiment Name: Zm_50mM_NH4NO3_L_to_H_P Parameter: Treatment Value: 50mM NH4NO3 vs. 100mM Mannitol
  misc_feature: MA Experiment ID: 20000488 Result: Up-regulated in Transcription
  misc_feature: MA Experiment 20000488 PARAMETER Experiment Name: Zm_50mM_NH4NO3_L_to_H_P Parameter: Organism Value: Zea mays
  misc_feature: MA Experiment 20000488 PARAMETER Experiment Name: Zm_50mM_NH4NO3_L_to_H_P Parameter: Timepoint (hr) Value: 8
  misc_feature: MA Experiment 20000488 PARAMETER Experiment Name: Zm_50mM_NH4NO3_L_to_H_P Parameter: Tissue Value: Leaves
  misc_feature: MA Experiment 20000488 PARAMETER Experiment Name: Zm_50mM_NH4NO3_L_to_H_P Parameter: Treatment Value: 50mM NH4NO3 vs. 100mM Mannitol
  misc_feature: MA Experiment ID: 20000492 Result: Up-regulated in Transcription
  misc_feature: MA Experiment 20000492 PARAMETER Experiment Name: Zm_Hybrid_Seed_Dev_P Parameter: DAP Value: 12
  misc_feature: MA Experiment 20000492 PARAMETER Experiment Name: Zm_Hybrid_Seed_Dev_P Parameter: Organism Value: Zea mays
  misc_feature: MA Experiment 20000492 PARAMETER Experiment Name: Zm_Hybrid_Seed_Dev_P Parameter: Plant Line Value: 35A19
  misc_feature: MA Experiment 20000492 PARAMETER Experiment Name: Zm_Hybrid_Seed_Dev_P Parameter: Tissue Value: Fert Kernel vs. Unfert Floret
  misc_feature: MA Experiment ID: 20001605 Result: Up-regulated in Transcription
  misc_feature: MA Experiment 20001605 PARAMETER Experiment Name: Zm_50ppm_KNO3_L-to-H_P Parameter: Age (day) Value: 19
  misc_feature: MA Experiment 20001605 PARAMETER Experiment Name: Zm_50ppm_KNO3_L-to-H_P Parameter: Organism Value: Zea mays
  misc_feature: MA Experiment 20001605 PARAMETER Experiment Name: Zm_50ppm_KNO3_L-to-H_P Parameter: Plant Line Value: 35A19
  misc_feature: MA Experiment 20001605 PARAMETER Experiment Name: Zm_50ppm_KNO3_L-to-H_P Parameter: Timepoint (hr) Value: 4
  misc_feature: MA Experiment 20001605 PARAMETER Experiment Name: Zm_50ppm_KNO3_L-to-H_P Parameter: Tissue Value: Shoots
  misc_feature: MA Experiment 20001605 PARAMETER Experiment Name: Zm_50ppm_KNO3_L-to-H_P Parameter: Treatment Value: 50ppm KNO3 vs. 50ppm KCl
  misc_feature: MA Experiment ID: 20001606 Result: Up-regulated in Transcription
  misc_feature: MA Experiment 20001606 PARAMETER Experiment Name: Zm_50ppm_KNO3_L-to-H_P Parameter: Age (day) Value: 19
  misc_feature: MA Experiment 20001606 PARAMETER Experiment Name: Zm_50ppm_KNO3_L-to-H_P Parameter: Organism Value: Zea mays
  misc_feature: MA Experiment 20001606 PARAMETER Experiment Name: Zm_50ppm_KNO3_L-to-H_P Parameter: Plant Line Value: 35A19
  misc_feature: MA Experiment 20001606 PARAMETER Experiment Name: Zm_50ppm_KNO3_L-to-H_P Parameter: Timepoint (hr) Value: 8
  misc_feature: MA Experiment 20001606 PARAMETER Experiment Name: Zm_50ppm_KNO3_L-to-H_P Parameter: Tissue Value: Shoots
  misc_feature: MA Experiment 20001606 PARAMETER Experiment Name: Zm_50ppm_KNO3_L-to-H_P Parameter: Treatment Value: 50ppm KNO3 vs. 50ppm KCl
gccgtctcgtctgaccgtacgtctttggtgatgaagcatcgatccgggagaaggttcagcattagctctagctagagctagatagccggaggaggagctagtaggaagaggcatggataatcatcaacttgtcgccatggcagcggtggctcagccggcgagcccgacctcgccgcacgtcgcgcacaagatcccgcccggcgacgggccttacgcgagggccaagcacttccagctggtggagaaggacctggacgcgtcgatcgcgtggttctggaaggcgatcagcgcgggcgacaagttggacagcgcgctcaaggacatggcggtggtgatgaagcagcgcgggtacctggcggaggccatcgacgccatcaggtcgctgcggcacctgtgcccgaagcagtcccaggagccgctggacaacatcctcctggacctctacaaggccagcgggcggaccaaggaggagatcgagctgctcaagcagaagctccgcaagatctacctcggcgaggcgttccatggcaggaccaccaagcgcgcccgctcgcacggccgcaagatccacgtctccgtcaagcaagagacatcgcgcgtcctgggcaacctcgcgtgggcgtacatgcagcagcgcaacttcatggcggcggaggtggtgtaccggaaggcgcagatgatcgacccggacgccaacaaggcgtgcaacctcgccctctgcctcatcgagcaggcccggctcgccgacgccgagctcgtcctcgccgacgtgctcgccgggaggtacctgcaggcccgcgaccagcaggacggcaagatcgtccggaaagtggaggagctgctggcccggatcatggcgcatacgacgtggccgggcggtggcggcggtgacggacgacgacgcccggcggataagagcgggagcgggagcgagagcgacgacgatgactgggtcgagaaccagatgctggctttgctcgacgtggcggtgccgtaccggaagaagagcaggaggctgccggtctttgaggagatctcgcgagcagaatagcagatggctgatatagattagcagcagcatcatcatctttcgatcgagctccatgcatatatcgtttgagcgagcgcggatcctctggacctaactgcagtctgcagataggtaggtaggtaggtctgagctgatccagacccacatgtcagtgaccggacgcagaggatctgcttccattattatttgatcgactcctgtccagctcaaccttttggaccaactccgtggcgatagcagtagcagcagcagaaaggtaaagcgcgcgtgtgtgtgtgtgcccctgtgaatctgtggatcggagacagtgtgcagtagcatagcatcagcagcaaggtatttaaagcgtgcaagtgtgtgtataactgtatatacgcttcttatatgcatctgtggatattttgcg

SEQ ID NO: 16504 - protein, 312 aa, Zea mays subsp. mays
  peptide (1)..(312): Ceres Seq. ID no. 12566277
  misc_feature (161)..(194): Pfam Name: TPR Domain Pfam Description: TPR Domain
  misc_feature (124)..(220): Homolog of NCBI NO: 25455795 NR Description: MS5-like protein [imported] - Arabidopsis
  misc_feature (22)..(220): Homolog of NCBI NO: 15233432 NR Description: putative protein; protein id: At4g20900.1
  misc_feature (7)..(245): Homolog of NCBI NO: 15241471 NR Description: male sterility MS5; pollenless3; protein id:
  misc_feature (31)..(220): Homolog of NCBI NO: 29467532 NR Description: P0582D05.25 [Oryza sativa (japonica
  misc_feature (22)..(247): Homolog of NCBI NO: 4028970 NR Description: pollenless3 [Arabidopsis thaliana]
  misc_feature (22)..(247): Homolog of NCBI NO: 3859112 NR Description: male sterility MS5 [Arabidopsis thaliana]
  misc_feature (22)..(220): Homolog of NCBI NO: 15230439 NR Description: MS5-like protein; protein id: At3g51280.1
  misc_feature (22)..(247): Homolog of NCBI NO: 30695554 NR Description: male sterility MS5 family [Arabidopsis thaliana]
  misc_feature (22)..(247): Homolog of NCBI NO: 9758884 NR Description: gb|AAC72543.1~gene_id:K24G6.19~similar to unknown
  misc_feature (22)..(258): Homolog of NCBI NO: 3859116 NR Description: unknown [Oryza sativa]
MDNHQLVAMAAVAQPASPTSPHVAHKIPPGDGPYARAKHFQLVEKDLDASIAWFWKAISAGDKLDSALKDMAVVMKQRGYLAEAIDAIRSLRHLCPKQSQEPLDNILLDLYKASGRTKEEIELLKQKLRKIYLGEAFHGRTTKRARSHGRKIHVSVKQETSRVLGNLAWAYMQQRNFMAAEVVYRKAQMIDPDANKACNLALCLIEQARLADAELVLADVLAGRYLQARDQQDGKIVRKVEELLARIMAHTTWPGGGGGDGRRRPADKSGSGSESDDDDWVENQMLALLDVAVPYRKKSRRLPVFEEISRAE

SEQ ID NO: 16505 - protein, 304 aa, Zea mays subsp. mays
  peptide (1)..(304): Ceres Seq. ID no. 12566278
  misc_feature (153)..(186): Pfam Name: TPR Domain Pfam Description: TPR Domain
  misc_feature (116)..(212): Homolog of NCBI NO: 25455795 NR Description: MS5-like protein [imported] - Arabidopsis
  misc_feature (14)..(212): Homolog of NCBI NO: 15233432 NR Description: putative protein; protein id: At4g20900.1
  misc_feature (1)..(237): Homolog of NCBI NO: 15241471 NR Description: male sterility MS5; pollenless3; protein id:
  misc_feature (23)..(212): Homolog of NCBI NO: 29467532 NR Description: P0582D05.25 [Oryza sativa (japonica
  misc_feature (14)..(239): Homolog of NCBI NO: 4028970 NR Description: pollenless3 [Arabidopsis thaliana]
  misc_feature (14)..(239): Homolog of NCBI NO: 3859112 NR Description: male sterility MS5 [Arabidopsis thaliana]
  misc_feature (14)..(212): Homolog of NCBI NO: 15230439 NR Description: MS5-like protein; protein id: At3g51280.1
  misc_feature (14)..(239): Homolog of NCBI NO: 30695554 NR Description: male sterility MS5 family [Arabidopsis thaliana]
  misc_feature (14)..(239): Homolog of NCBI NO: 9758884 NR Description: gb|AAC72543.1~gene_id:K24G6.19~similar to unknown
  misc_feature (14)..(250): Homolog of NCBI NO: 3859116 NR Description: unknown [Oryza sativa]
MAAVAQPASPTSPHVAHKIPPGDGPYARAKHFQLVEKDLDASIAWFWKAISAGDKLDSALKDMAVVMKQRGYLAEAIDAIRSLRHLCPKQSQEPLDNILLDLYKASGRTKEEIELLKQKLRKIYLGEAFHGRTTKRARSHGRKIHVSVKQETSRVLGNLAWAYMQQRNFMAAEVVYRKAQMIDPDANKACNLALCLIEQARLADAELVLADVLAGRYLQARDQQDGKIVRKVEELLARIMAHTTWPGGGGGDGRRRPADKSGSGSESDDDDWVENQMLALLDVAVPYRKKSRRLPVFEEISRAE

SEQ ID NO: 16506 - protein, 242 aa, Zea mays subsp. mays
  peptide (1)..(242): Ceres Seq. ID no. 12566279
  misc_feature (91)..(124): Pfam Name: TPR Domain Pfam Description: TPR Domain
  misc_feature (54)..(150): Homolog of NCBI NO: 25455795 NR Description: MS5-like protein [imported] - Arabidopsis
  misc_feature (1)..(150): Homolog of NCBI NO: 15233432 NR Description: putative protein; protein id: At4g20900.1
  misc_feature (1)..(175): Homolog of NCBI NO: 15241471 NR Description: male sterility MS5; pollenless3; protein id:
  misc_feature (1)..(150): Homolog of NCBI NO: 29467532 NR Description: P0582D05.25 [Oryza sativa (japonica
  misc_feature (1)..(177): Homolog of NCBI NO: 4028970 NR Description: pollenless3 [Arabidopsis thaliana]
  misc_feature (1)..(177): Homolog of NCBI NO: 3859112 NR Description: male sterility MS5 [Arabidopsis thaliana]
  misc_feature (1)..(150): Homolog of NCBI NO: 15230439 NR Description: MS5-like protein; protein id: At3g51280.1
  misc_feature (1)..(177): Homolog of NCBI NO: 30695554 NR Description: male sterility MS5 family [Arabidopsis thaliana]
  misc_feature (1)..(177): Homolog of NCBI NO: 9758884 NR Description: gb|AAC72543.1~gene_id:K24G6.19~similar to unknown
  misc_feature (1)..(188): Homolog of NCBI NO: 3859116 NR Description: unknown [Oryza sativa]
MAVVMKQRGYLAEAIDAIRSLRHLCPKQSQEPLDNILLDLYKASGRTKEEIELLKQKLRKIYLGEAFHGRTTKRARSHGRKIHVSVKQETSRVLGNLAWAYMQQRNFMAAEVVYRKAQMIDPDANKACNLALCLIEQARLADAELVLADVLAGRYLQARDQQDGKIVRKVEELLARIMAHTTWPGGGGGDGRRRPADKSGSGSESDDDDWVENQMLALLDVAVPYRKKSRRLPVFEEISRAE

SEQ ID NO: 16507 - DNA, 699 bp, Zea mays subsp. mays
  misc_feature (1)..(699): Ceres Seq. ID no. 12346538
  misc_feature: MA Experiment ID: 108547 Result: Down-regulated in Transcription
  misc_feature: MA Experiment 108547 PARAMETER Experiment Name: Zm_Imbibed_Seeds_P Parameter: Age (day) Value: 4 vs. 2
  misc_feature: MA Experiment 108547 PARAMETER Experiment Name: Zm_Imbibed_Seeds_P Parameter: Organism Value: Zea mays
  misc_feature: MA Experiment 108547 PARAMETER Experiment Name: Zm_Imbibed_Seeds_P Parameter: Plant Line Value: 35A19
  misc_feature: MA Experiment 108547 PARAMETER Experiment Name: Zm_Imbibed_Seeds_P Parameter: Tissue Value: Aerial vs. Embryo
accaatgggcaacagccttaggtgctgcctggcctgcgtcctcccctgcggcgcgctggacctgatcaggatcgtccacctcaacggccgcatcgaggagtacggccggccggtggccgccggcgagatcctggccgccaacccgaaccacgtcctcagcaagccgtgctcccagggcgtcgccgtgcggaggatcctcatcgtgtcgccggactccgagctagagcgcggcgagatatacttcctcatcccggcctcgtcggtgccgccggagaagaagccgcagccgcagcgacagcagaagagcgtcgtcctggccggctcgcacggcaaccaggcggtggtcaacaagaaggcatcgtcgtcgcaccggagacgacgcaccgccggctgcagaaccaccgtatggaagccacacctcgagtgcattgttgagggggacacttaggcagaggtggacgatgatccattcttttgctctcttttttttttttttggtttttgtggatcaagcgggggggctaatggctaatgcaatgtaacaccactagcagcatggtgttttgcccacttaatttgtgtggttagtcagcatttttaatcttttttcttgggtaaatgtatatccatgtaatgttttcccccttcctacatatgatgggaatgcagaggaagggttgttgccagttctttcttctt

SEQ ID NO: 16508 - protein, 148 aa, Zea mays subsp. mays
  peptide (1)..(148): Ceres Seq. ID no. 12346539
  misc_feature (26)..(145): Homolog of NCBI NO: 34896398 NR Description: hypothetical protein [Oryza sativa (japonica
  misc_feature (2)..(130): Homolog of NCBI NO: 18396990 NR Description: Expressed protein
  misc_feature (4)..(98): Homolog of NCBI NO: 34909702 NR Description: B1131G08.9 [Oryza sativa (japonica
  misc_feature (117)..(145): Homolog of NCBI NO: 34907910 NR Description: P0439E11.22 [Oryza sativa (japonica
  misc_feature (2)..(109): Homolog of NCBI NO: 34907910 NR Description: P0439E11.22 [Oryza sativa (japonica
  misc_feature (2)..(99): Homolog of NCBI NO: 15227725 NR Description: hypothetical protein; protein id: At2g30230.1
  misc_feature (2)..(100): Homolog of NCBI NO: 18390706 NR Description: expressed protein
  misc_feature (117)..(145): Homolog of NCBI NO: 34896112 NR Description: P0701D05.10 [Oryza sativa (japonica
  misc_feature (2)..(93): Homolog of NCBI NO: 34896112 NR Description: P0701D05.10 [Oryza sativa (japonica
PMGNSLRCCLACVLPCGALDLIRIVHLNGRIEEYGRPVAAGEILAANPNHVLSKPCSQGVAVRRILIVSPDSELERGEIYFLIPASSVPPEKKPQPQRQQKSVVLAGSHGNQAVVNKKASSSHRRRRTAGCRTTVWKPHLECIVEGDT

SEQ ID NO: 16509 - protein, 147 aa, Zea mays subsp. mays
  peptide (1)..(147): Ceres Seq. ID no. 12346540
  misc_feature (25)..(144): Homolog of NCBI NO: 34896398 NR Description: hypothetical protein [Oryza sativa (japonica
  misc_feature (1)..(129): Homolog of NCBI NO: 18396990 NR Description: Expressed protein
  misc_feature (3)..(97): Homolog of NCBI NO: 34909702 NR Description: B1131G08.9 [Oryza sativa (japonica
  misc_feature (116)..(144): Homolog of NCBI NO: 34907910 NR Description: P0439E11.22 [Oryza sativa (japonica
  misc_feature (1)..(108): Homolog of NCBI NO: 34907910 NR Description: P0439E11.22 [Oryza sativa (japonica
  misc_feature (1)..(98): Homolog of NCBI NO: 15227725 NR Description: hypothetical protein; protein id: At2g30230.1
  misc_feature (1)..(99): Homolog of NCBI NO: 18390706 NR Description: expressed protein
  misc_feature (116)..(144): Homolog of NCBI NO: 34896112 NR Description: P0701D05.10 [Oryza sativa (japonica
  misc_feature (1)..(92): Homolog of NCBI NO: 34896112 NR Description: P0701D05.10 [Oryza sativa (japonica
MGNSLRCCLACVLPCGALDLIRIVHLNGRIEEYGRPVAAGEILAANPNHVLSKPCSQGVAVRRILIVSPDSELERGEIYFLIPASSVPPEKKPQPQRQQKSVVLAGSHGNQAVVNKKASSSHRRRRTAGCRTTVWKPHLECIVEGDT

SEQ ID NO: 16510 - DNA, 1771 bp, Zea mays subsp. mays
  misc_feature (1)..(1771): Ceres Seq. ID no. 12381090
  misc_feature: MA Experiment ID: 108527 Result: Up-regulated in Transcription
  misc_feature: MA Experiment 108527 PARAMETER Experiment Name: Zm_5mM_NO_P Parameter: Age (day) Value: 8
  misc_feature: MA Experiment 108527 PARAMETER Experiment Name: Zm_5mM_NO_P Parameter: Organism Value: Zea mays
  misc_feature: MA Experiment 108527 PARAMETER Experiment Name: Zm_5mM_NO_P Parameter: Plant Line Value: 35A19
  misc_feature: MA Experiment 108527 PARAMETER Experiment Name: Zm_5mM_NO_P Parameter: Timepoint (hr) Value: 6
  misc_feature: MA Experiment 108527 PARAMETER Experiment Name: Zm_5mM_NO_P Parameter: Tissue Value: Aerial
  misc_feature: MA Experiment 108527 PARAMETER Experiment Name: Zm_5mM_NO_P Parameter: Treatment Value: 5mM NO vs. No Treatment
  misc_feature: MA Experiment ID: 108529 Result: Up-regulated in Transcription
  misc_feature: MA Experiment 108529 PARAMETER Experiment Name: Zm_Imbibed_Seeds_P Parameter: Age (day) Value: 5 vs. 2
  misc_feature: MA Experiment 108529 PARAMETER Experiment Name: Zm_Imbibed_Seeds_P Parameter: Organism Value: Zea mays
  misc_feature: MA Experiment 108529 PARAMETER Experiment Name: Zm_Imbibed_Seeds_P Parameter: Plant Line Value: 35A19
  misc_feature: MA Experiment 108529 PARAMETER Experiment Name: Zm_Imbibed_Seeds_P Parameter: Tissue Value: Roots vs. Embryo
  misc_feature: MA Experiment ID: 108533 Result: Up-regulated in Transcription
  misc_feature: MA Experiment 108533 PARAMETER Experiment Name: Zm_4deg_Cold_P Parameter: Age (hr) Value: 8
  misc_feature: MA Experiment 108533 PARAMETER Experiment Name: Zm_4deg_Cold_P Parameter: Organism Value: Zea mays
  misc_feature: MA Experiment 108533 PARAMETER Experiment Name: Zm_4deg_Cold_P Parameter: Plant Line Value: 35A19
  misc_feature: MA Experiment 108533 PARAMETER Experiment Name: Zm_4deg_Cold_P Parameter: Temperature (deg C) Value: 4 vs. 22
  misc_feature: MA Experiment 108533 PARAMETER Experiment Name: Zm_4deg_Cold_P Parameter: Timepoint (hr) Value: 1
  misc_feature: MA Experiment 108533 PARAMETER Experiment Name: Zm_4deg_Cold_P Parameter: Tissue Value: Aerial
  misc_feature: MA Experiment ID: 108535 Result: Down-regulated in Transcription
  misc_feature: MA Experiment 108535 PARAMETER Experiment Name: Zm_Meristem_P Parameter: Age (day) Value: 8
  misc_feature: MA Experiment 108535 PARAMETER Experiment Name: Zm_Meristem_P Parameter: Organism Value: Zea mays
  misc_feature: MA Experiment 108535 PARAMETER Experiment Name: Zm_Meristem_P Parameter: Plant Line Value: 35A19
  misc_feature: MA Experiment 108535 PARAMETER Experiment Name: Zm_Meristem_P Parameter: Tissue Value: Root Meristem vs. Above Root Meristem
  misc_feature: MA Experiment ID: 108536 Result: Up-regulated in Transcription
  misc_feature: MA Experiment 108536 PARAMETER Experiment Name: Zm_Meristem_P Parameter: Age (day) Value: 8
  misc_feature: MA Experiment 108536 PARAMETER Experiment Name: Zm_Meristem_P Parameter: Organism Value: Zea mays
  misc_feature: MA Experiment 108536 PARAMETER Experiment Name: Zm_Meristem_P Parameter: Plant Line Value: 35A19
  misc_feature: MA Experiment 108536 PARAMETER Experiment Name: Zm_Meristem_P Parameter: Tissue Value: Shoot Meristem vs. Above Shoot Meristem
  misc_feature: MA Experiment ID: 108543 Result: Down-regulated in Transcription
  misc_feature: MA Experiment ID: 108559 Result: Up-regulated in Transcription
  misc_feature: MA Experiment 108559 PARAMETER Experiment Name: Zm_5mM_NO_P Parameter: Age (day) Value: 8
  misc_feature: MA Experiment 108559 PARAMETER Experiment Name: Zm_5mM_NO_P Parameter: Organism Value: Zea mays
  misc_feature: MA Experiment 108559 PARAMETER Experiment Name: Zm_5mM_NO_P Parameter: Plant Line Value: 35A19
  misc_feature: MA Experiment 108559 PARAMETER Experiment Name: Zm_5mM_NO_P Parameter: Timepoint (hr) Value: 12
  misc_feature: MA Experiment 108559 PARAMETER Experiment Name: Zm_5mM_NO_P Parameter: Tissue Value: Aerial
  misc_feature: MA Experiment 108559 PARAMETER Experiment Name: Zm_5mM_NO_P Parameter: Treatment Value: 5mM NO vs. No Treatment
  misc_feature: MA Experiment ID: 108687 Result: Up-regulated in Transcription
  misc_feature: MA Experiment 108687 PARAMETER Experiment Name: Zm_Embryos-Flowers__P Parameter: Tissue Value: Embryo vs. Aerial+
  misc_feature: MA Experiment ID: 108688 Result: Down-regulated in Transcription
  misc_feature: MA Experiment 108688 PARAMETER Experiment Name: Zm_Embryos-Flowers__P Parameter: Tissue Value: Immature Flowers vs. Aerial+
  misc_feature: MA Experiment ID: 108689 Result: Down-regulated in Transcription
  misc_feature: MA Experiment 108689 PARAMETER Experiment Name: Zm_Drought_Roots_P Parameter: Age (day) Value: 9
  misc_feature: MA Experiment 108689 PARAMETER Experiment Name: Zm_Drought_Roots_P Parameter: Organism Value: Zea mays
  misc_feature: MA Experiment 108689 PARAMETER Experiment Name: Zm_Drought_Roots_P Parameter: Plant Line Value: 35A19
  misc_feature: MA Experiment 108689 PARAMETER Experiment Name: Zm_Drought_Roots_P Parameter: Timepoint (hr) Value: 24
  misc_feature: MA Experiment 108689 PARAMETER Experiment Name: Zm_Drought_Roots_P Parameter: Tissue Value: Roots
  misc_feature: MA Experiment 108689 PARAMETER Experiment Name: Zm_Drought_Roots_P Parameter: Treatment Value: Drought vs. No Drought
  misc_feature: MA Experiment ID: 20000108 Result: Down-regulated in Transcription
  misc_feature: MA Experiment 20000108 PARAMETER Experiment Name: Zm_Root-Tips_P Parameter: Age (day) Value: 12
  misc_feature: MA Experiment 20000108 PARAMETER Experiment Name: Zm_Root-Tips_P Parameter: Organism Value: Zea mays
  misc_feature: MA Experiment 20000108 PARAMETER Experiment Name: Zm_Root-Tips_P Parameter: Tissue Value: Root tips vs. Root mid region    35
  misc_feature: MA Experiment 20000108 PARAMETER Experiment Name: Zm_Root-Tips_P Parameter: Tissue Value: Root tips vs. Root mid region   Sequence Listing-Misc Features (4)
  misc_feature: MA Experiment ID: 20000630 Result: Up-regulated in Transcription
  misc_feature: MA Experiment 20000630 PARAMETER Experiment Name: Zm_Herbicide-Treatments_P Parameter: Timepoint (hr) Value: 4
  misc_feature: MA Experiment 20000630 PARAMETER Experiment Name: Zm_Herbicide-Treatments_P Parameter: Tissue Value: Aerial
  misc_feature: MA Experiment 20000630 PARAMETER Experiment Name: Zm_Herbicide-Treatments_P Parameter: Treatment Value: Roundup vs. No Treatment
gcacgagaccattacctagaacatcctaatcgaaaaatcgaatcgcgaccaaaccaaatcctccaccccggcgcgctgccccatcacccttcccgctgtgctcacgcaccaaaccccactccgttcctcactgcaatccaccgccccagctctttcgcgcaatggcggccgtcgcggcgccggcgccgccaccgccggcggcagctgagcctggaggacctcaaggtggtgtccgtgctcgggcgcggcgccaagggcgtcgtgttccacgtcgtgcacgctcccggggaaccggacggcgagggcgagggcgccgccgcagccgcggccatggcgctcaaggcggtctcgcgggaggcagcgcggcacaagaaggcggccagcggggacggggacggccaccgccggatctggttcgagcgggatgtgctcctggcgctgcgccacccgctgctcccttccctgcgaggcatcctcgccaccgacgcgatcgtcggcttcgccatggaccgctgcggcggcggggacctcaactcgctgcggcggcggcagacggagaagatgttctccgactccgtcatacggttctacgcggcggagctggtgctggcgctcgagtacctgcacagtctcggcgtcgtgtaccgggacctcaagccggagaacgtcctcatccaggacagcggccacatcatgctcgtcgacttcgacctctccacgcggctcccggccgcagccgcaggagccagacgcgccggccaccagtcccaagccggcgcctccggtcgccgcgccgtccccgagccgcggcagagcaaggaagccggcgggcgccgccctgtgcttcccattccgcaccaccggcagcgctgcgaagcctgccgcggactcgccgtcgccgctgtccacctcgcggacggcctcgtcgtcgtcgtcgtcctcgacggcgaccacggcctcctcctcggcggcgtcggccggcacgcggactcccgcgaagtcgaactcgttcgtggggacggaggactacgtggcgccggagatcatcgccgggcgcgggcacgacttcgccgtggactggtggggcctgggcgtggtgctctacgagatgctctacggccgcacgccgttccgggggcagaaccgcaaggagaccttctaccgcgtcctcgccaagcagccggagctcgtcggcgagcagacgccgctgcgcgacctcatcgcccgcctcctcgagaaggaccccgagaggcgcatcggcgcgcgcggcgtcaaggcccaccccttcttcggcggcgtcgactggaacgcatcctgcaggtggcgcgcccgccgttcatcccggcgccgccgcaggacgaggacggcgacgaggcgctcgacgtcgagaaggtcgtccgcgaggtgttcgcgtccaaggagggcgagggagggaaggcttcgcctgtggcagacggaggccctgtgggcggcgacggcgacgggaggagagatcattccaaagatggtgatttctcagtgtttttctgagctatttattttctttagatttgttctttctttttctttagatttgtactgtatgaacatgatggcatttagcaactgaggttaggagtgagtacggcgcaatggccggtggagtacataaattaaagaggtgcaggtgctcccgctcaatggggtatagccaatatatagggtttttttttgctgtgtactttgcttgatcataataaataataatgatagcgcagttgtgctcaaacgc

SEQ ID NO: 16511 - protein, 509 aa, Zea mays subsp. mays
  peptide (1)..(509): Ceres Seq. ID no. 12381091
  misc_feature (74)..(242): Pfam Name: Protein kinase domain Pfam Description: Protein kinase domain
  misc_feature (140)..(269): Homolog of NCBI NO: 38346163 NR Description: OSJNBa0079A21.10 [Oryza sativa (japonica
  misc_feature (84)..(255): Homolog of NCBI NO: 1750190 NR Description: putative serine/threonine protein kinase
  misc_feature (63)..(241): Homolog of NCBI NO: 15219253 NR Description: putative protein kinase; protein id: At1g16440.1
  misc_feature (63)..(341): Homolog of NCBI NO: 37536874 NR Description: putative protein kinase [Oryza sativa (japonica
  misc_feature (69)..(242): Homolog of NCBI NO: 15232374 NR Description: unknown protein; protein id: At3g20830.1
  misc_feature (56)..(242): Homolog of NCBI NO: 18403402 NR Description: putative serine threonine protein kinase; protein
  misc_feature (111)..(243): Homolog of NCBI NO: 15235548 NR Description: putative protein; protein id: At4g13000.1
  misc_feature (67)..(242): Homolog of NCBI NO: 15230825 NR Description: protein kinase, putative; protein id: At3g25250.1
  misc_feature (436)..(509): Homolog of NCBI NO: 38344243 NR Description: OJ991113_30.20 [Oryza sativa (japonica
  misc_feature (67)..(243): Homolog of NCBI NO: 38344243 NR Description: OJ991113_30.20 [Oryza sativa (japonica
ARDHYLEHPNRKIESRPNQILHPGALPHHPSRCAHAPNPTPFLTAIHRPSSFAQWRPSRRRRRHRRRQLSLEDLKVVSVLGRGAKGVVFHVVHAPGEPDGEGEGAAAAAAMALKAVSREAARHKKAASGDGDGHRRIWFERDVLLALRHPLLPSLRGILATDAIVGFAMDRCGGGDLNSLRRRQTEKMFSDSVIRFYAAELVLALEYLHSLGVVYRDLKPENVLIQDSGHIMLVDFDLSTRLPAAAAGARRAGHQSQAGASGRRAVPEPRQSKEAGGRRPVLPIPHHRQRCEACRGLAVAAVHLADGLVVVVVLDGDHGLLLGGVGRHADSREVELVRGDGGLRGAGDHRRARARLRRGLVGPGRGALRDALRPHAVPGAEPQGDLLPRPRQAAGARRRADAAARPHRPPPREGPREAHRRARRQGPPLLRRRRLERILQVARPPFIPAPPQDEDGDEALDVEKVVREVFASKEGEGGKASPVADGGPVGGDGDGRRDHSKDGDFSVFF

SEQ ID NO: 16512 - protein, 449 aa, Zea mays subsp. mays
  peptide (1)..(449): Ceres Seq. ID no. 12381092
  misc_feature (295)..(383): Pfam Name: Equine herpesvirus glycoprotein gp2 Pfam Description: Equine herpesvirus glycoprotein gp2
  misc_feature (144)..(445): Homolog of NCBI NO: 30424862 NR Description: RIKEN cDNA 5033413A03 [Mus musculus]
  misc_feature (154)..(448): Homolog of NCBI NO: 30424862 NR Description: RIKEN cDNA 5033413A03 [Mus musculus]
  misc_feature (92)..(445): Homolog of NCBI NO: 30424862 NR Description: RIKEN cDNA 5033413A03 [Mus musculus]
  misc_feature (1)..(214): Homolog of NCBI NO: 6690017 NR Description: NTR [Herpesvirus papio]
  misc_feature (1)..(394): Homolog of NCBI NO: 30424862 NR Description: RIKEN cDNA 5033413A03 [Mus musculus]
  misc_feature (1)..(390): Homolog of NCBI NO: 30424862 NR Description: RIKEN cDNA 5033413A03 [Mus musculus]
  misc_feature (1)..(380): Homolog of NCBI NO: 6690017 NR Description: NTR [Herpesvirus papio]
  misc_feature (1)..(434): Homolog of NCBI NO: 6690017 NR Description: NTR [Herpesvirus papio]
  misc_feature (1)..(448): Homolog of NCBI NO: 6690017 NR Description: NTR [Herpesvirus papio]
MAAVAAPAPPPPAAAEPGGPQGGVRARARRQGRRVPRRARSRGTGRRGRGRRRSRGHGAQGGLAGGSAAQEGGQRGRGRPPPDLVRAGCAPGAAPPAAPFPARHPRHRRDRRLRHGPLRRRGPQLAAAAADGEDVLRLRHTVLRGGAGAGARVPAQSRRRVPGPQAGERPHPGQRPHHARRLRPLHAAPGRSRRSQTRRPPVPSRRLRSPRRPRAAAEQGSRRAPPCASHSAPPAALRSLPRTRRRRCPPRGRPRRRRRPRRRPRPPPRRRRPARGLPRSRTRSWGRRTTWRRRSSPGAGTTSPWTGGAWAWCSTRCSTAARRSGGRTARRPSTASSPSSRSSSASRRRCATSSPASSRRTPRGASARAASRPTPSSAASTGTHPAGGAPAVHPGAAAGRGRRRGARRREGRPRGVRVQGGRGREGFACGRRRPCGRRRRREERSFQRW

SEQ ID NO: 16513 - protein, 399 aa, Zea mays subsp. mays
  peptide (1)..(399): Ceres Seq. ID no. 12381093
  misc_feature (1)..(132): Pfam Name: Protein kinase domain Pfam Description: Protein kinase domain
  misc_feature (1)..(231): Homolog of NCBI NO: 37536874 NR Description: putative protein kinase [Oryza sativa (japonica
  misc_feature (1)..(132): Homolog of NCBI NO: 15232374 NR Description: unknown protein; protein id: At3g20830.1
  misc_feature (1)..(132): Homolog of NCBI NO: 18403402 NR Description: putative serine threonine protein kinase; protein
  misc_feature (1)..(133): Homolog of NCBI NO: 15235548 NR Description: putative protein; protein id: At4g13000.1
  misc_feature (1)..(131): Homolog of NCBI NO: 15219253 NR Description: putative protein kinase; protein id: At1g16440.1
  misc_feature (30)..(159): Homolog of NCBI NO: 38346163 NR Description: OSJNBa0079A21.10 [Oryza sativa (japonica
  misc_feature (1)..(145): Homolog of NCBI NO: 1750190 NR Description: putative serine/threonine protein kinase
  misc_feature (1)..(132): Homolog of NCBI NO: 15230825 NR Description: protein kinase, putative; protein id: At3g25250.1
  misc_feature (326)..(399): Homolog of NCBI NO: 38344243 NR Description: OJ991113_30.20 [Oryza sativa (japonica
  misc_feature (1)..(133): Homolog of NCBI NO: 38344243 NR Description: OJ991113_30.20 [Oryza sativa (japonica
MALKAVSREAARHKKAASGDGDGHRRIWFERDVLLALRHPLLPSLRGILATDAIVGFAMDRCGGGDLNSLRRRQTEKMFSDSVIRFYAAELVLALEYLHSLGVVYRDLKPENVLIQDSGHIMLVDFDLSTRLPAAAAGARRAGHQSQAGASGRRAVPEPRQSKEAGGRRPVLPIPHHRQRCEACRGLAVAAVHLADGLVVVVVLDGDHGLLLGGVGRHADSREVELVRGDGGLRGAGDHRRARARLRRGLVGPGRGALRDALRPHAVPGAEPQGDLLPRPRQAAGARRRADAAARPHRPPPREGPREAHRRARRQGPPLLRRRRLERILQVARPPFIPAPPQDEDGDEALDVEKVVREVFASKEGEGGKASPVADGGPVGGDGDGRRDHSKDGDFSVFF

SEQ ID NO: 16514 - DNA, 1622 bp, Zea mays subsp. mays
  misc_feature (1)..(1622): Ceres Seq. ID no. 12349591
  misc_feature: MA Experiment ID: 108522 Result: Down-regulated in Transcription
  misc_feature: MA Experiment 108522 PARAMETER Experiment Name: Zm_42deg_Heat_P Parameter: Age (day) Value: 8
  misc_feature: MA Experiment 108522 PARAMETER Experiment Name: Zm_42deg_Heat_P Parameter: Organism Value: Zea mays
  misc_feature: MA Experiment 108522 PARAMETER Experiment Name: Zm_42deg_Heat_P Parameter: Plant Line Value: 35A19
  misc_feature: MA Experiment 108522 PARAMETER Experiment Name: Zm_42deg_Heat_P Parameter: Temperature (deg C) Value: 42 vs. 22
  misc_feature: MA Experiment 108522 PARAMETER Experiment Name: Zm_42deg_Heat_P Parameter: Timepoint (hr) Value: 1
  misc_feature: MA Experiment 108522 PARAMETER Experiment Name: Zm_42deg_Heat_P Parameter: Tissue Value: Aerial
gagaaggaagaagctcaggcgaagcgaggcagagggatgtcgtgacgacgaaaccgaagccgagaacggaagcgagccttacatatacccggccccgtcccagtgccctcggcttccgccccagataccaaaccctaaccttagtcggccgttccgcaggcccgccggcggcgacgccttgtgtgccgcgtccgtgattctcttgcacagggaagcgtttggaaggggactccctgcctagtgcactggccgcagcgacgcgcggccgaggcgcggatcggggaggggaggacggctgtggcgagatggcgggtgacgtcgcgacctcgccagccccggcgccgctgtccgtgtcctcatcgtcgcagaaccaccaccaccacggccccacgaccgcccgcggtctcctctgccacgccggcgccggtgcctccgctggtgtggtggcggcgacgttcgtgtgcccactcgatgtcatcaagaccaggttccaggtccacggctggcccaagcttgccacaggtagtgtaattattgggagcttgcagcagattgctcaacaagaaggtttccggggaatgtatcgcggcctatccccaactattctggcactcttgcctaactgggcggtttactttactgtgtatgagcagcttaaaagttttctttcttccaacgatggaagccatcaactttctttaggggcaaatgttgttgctgcatcatgtgctggagctgcaacaactattgtaacaaatccactttgggttgtgaagacaagatttcagacccaaggaattagagccgggccaatcccgtataaaggtacacttgctgccttgagaagaatagcacatgaagaaggcatccgagggctatacagtggcctggtccctgccttggctggtatcagtcacgttgctattcagttccctgtgtacgagaagataaaagcttatctggctgagcgagataatactactgtagaagcattgagttttggtgatgtcgctgttgcttcgtctctggctaaagtagctgcgtcaacattgacatatcctcatgaggttgttcgatcaaggctgcaagaccagcgagcaaactctgatgccagatacaaaggtgtaatagactgtgtcagaaaggtttatcataaagagggtgtggctggcttctaccgtggatgtgccacaaatctgttgcggacgacccctgctgcagtgataactttcactagcttcgagatgatccataggtcccttcttgatctattccctgctgaacctgaacctcacatccaacctctaaagcattgaccatacaacatttgtaccctatccatgcggcagattaggaccccagtaaccatccagcaacagcaatgttgtttactgtgccagatggctcttgtaaaagagagaattgtttttttccccagataatagctgccattcaaaagttgaaacaatagtgtaggcagagcattagcatctgtgtacgtaatagatttgttagcatgcatttggggtggaggtatatgagcgatgttgggtattttttatgatgatgacgaaaagaaaaatgttacgacatatgaaggaatgattactatattcttttcc

SEQ ID NO: 16515 - protein, 336 aa, Zea mays subsp. mays
  peptide (1)..(336): Ceres Seq. ID no. 12349592
  misc_feature (285)..(320): Homolog of NCBI NO: 24652037 NR Description: CG8026-PA [Drosophila melanogaster]
  misc_feature (37)..(303): Homolog of NCBI NO: 24652037 NR Description: CG8026-PA [Drosophila melanogaster]
  misc_feature (40)..(323): Homolog of NCBI NO: 6320831 NR Description: Hypothetical ORF; Yel006wp [Saccharomyces
  misc_feature (40)..(319): Homolog of NCBI NO: 6322185 NR Description: Hypothetical ORF; Yil006wp [Saccharomyces
  misc_feature (125)..(326): Homolog of NCBI NO: 25403521 NR Description: probable mitochondrial carrier protein
  misc_feature (44)..(324): Homolog of NCBI NO: 34914648 NR Description: OSJNBa0054L14.23 [Oryza sativa (japonica
  misc_feature (71)..(326): Homolog of NCBI NO: 7487567 NR Description: probable mitochondrial carrier protein
  misc_feature (32)..(326): Homolog of NCBI NO: 11067279 NR Description: unknown protein [Arabidopsis thaliana]
  misc_feature (32)..(326): Homolog of NCBI NO: 18395659 NR Description: mitochondrial carrier protein family
  misc_feature (20)..(326): Homolog of NCBI NO: 18407372 NR Description: mitochondrial carrier protein family
MAGDVATSPAPAPLSVSSSSQNHHHHGPTTARGLLCHAGAGASAGVVAATFVCPLDVIKTRFQVHGWPKLATGSVIIGSLQQIAQQEGFRGMYRGLSPTILALLPNWAVYFTVYEQLKSFLSSNDGSHQLSLGANVVAASCAGAATTIVTNPLWVVKTRFQTQGIRAGPIPYKGTLAALRRIAHEEGIRGLYSGLVPALAGISHVAIQFPVYEKIKAYLAERDNTTVEALSFGDVAVASSLAKVAASTLTYPHEVVRSRLQDQRANSDARYKGVIDCVRKVYHKEGVAGFYRGCATNLLRTTPAAVITFTSFEMIHRSLLDLFPAEPEPHIQPLKH

SEQ ID NO: 16516 - protein, 245 aa, Zea mays subsp. mays
  peptide (1)..(245): Ceres Seq. ID no. 12349593
  misc_feature (194)..(229): Homolog of NCBI NO: 24652037 NR Description: CG8026-PA [Drosophila melanogaster]
  misc_feature (1)..(212): Homolog of NCBI NO: 24652037 NR Description: CG8026-PA [Drosophila melanogaster]
  misc_feature (1)..(232): Homolog of NCBI NO: 6320831 NR Description: Hypothetical ORF; Yel006wp [Saccharomyces
  misc_feature (1)..(228): Homolog of NCBI NO: 6322185 NR Description: Hypothetical ORF; Yil006wp [Saccharomyces
  misc_feature (34)..(235): Homolog of NCBI NO: 25403521 NR Description: probable mitochondrial carrier protein
  misc_feature (1)..(233): Homolog of NCBI NO: 34914648 NR Description: OSJNBa0054L14.23 [Oryza sativa (japonica
  misc_feature (1)..(235): Homolog of NCBI NO: 7487567 NR Description: probable mitochondrial carrier protein
  misc_feature (1)..(235): Homolog of NCBI NO: 11067279 NR Description: unknown protein [Arabidopsis thaliana]
  misc_feature (1)..(235): Homolog of NCBI NO: 18395659 NR Description: mitochondrial carrier protein family
  misc_feature (1)..(235): Homolog of NCBI NO: 18407372 NR Description: mitochondrial carrier protein family
MYRGLSPTILALLPNWAVYFTVYEQLKSFLSSNDGSHQLSLGANVVAASCAGAATTIVTNPLWVVKTRFQTQGIRAGPIPYKGTLAALRRIAHEEGIRGLYSGLVPALAGISHVAIQFPVYEKIKAYLAERDNTTVEALSFGDVAVASSLAKVAASTLTYPHEVVRSRLQDQRANSDARYKGVIDCVRKVYHKEGVAGFYRGCATNLLRTTPAAVITFTSFEMIHRSLLDLFPAEPEPHIQPLKH

SEQ ID NO: 16517 - DNA, 1381 bp, Zea mays subsp. mays
  misc_feature (1)..(1381): Ceres Seq. ID no. 12349594
  misc_feature: MA Experiment ID: 108535 Result: Up-regulated in Transcription
  misc_feature: MA Experiment 108535 PARAMETER Experiment Name: Zm_Meristem_P Parameter: Age (day) Value: 8
  misc_feature: MA Experiment 108535 PARAMETER Experiment Name: Zm_Meristem_P Parameter: Organism Value: Zea mays
  misc_feature: MA Experiment 108535 PARAMETER Experiment Name: Zm_Meristem_P Parameter: Plant Line Value: 35A19
  misc_feature: MA Experiment 108535 PARAMETER Experiment Name: Zm_Meristem_P Parameter: Tissue Value: Root Meristem vs. Above Root Meristem
  misc_feature: MA Experiment ID: 20000477 Result: Down-regulated in Transcription
  misc_feature: MA Experiment 20000477 PARAMETER Experiment Name: Zm_5mM_SA_P Parameter: Age (day) Value: 10
  misc_feature: MA Experiment 20000477 PARAMETER Experiment Name: Zm_5mM_SA_P Parameter: Organism Value: Zea mays
  misc_feature: MA Experiment 20000477 PARAMETER Experiment Name: Zm_5mM_SA_P Parameter: Plant Line Value: 35A19
  misc_feature: MA Experiment 20000477 PARAMETER Experiment Name: Zm_5mM_SA_P Parameter: Timepoint (hr) Value: 48
  misc_feature: MA Experiment 20000477 PARAMETER Experiment Name: Zm_5mM_SA_P Parameter: Tissue Value: Aerial
  misc_feature: MA Experiment 20000477 PARAMETER Experiment Name: Zm_5mM_SA_P Parameter: Treatment Value: 5mM SA vs. No Treatment
gacctgtcgtcttcgtctccggcagagcaaagcggcggcgaggcgggagatatagaggagagacgagagcgggatggggtacctgtggagggtgcggctgtcttcatttgctgccggcgcggcgacggcttcggcggcggggttcttcctcctctacaaggaccacctgctcgcccgcgctgccgacgccgagtccaactccgcctcctactccccgccgctcgccacagccgacaccgctttctccgcgccgccgcgcgccgtggcgcccgccgacctccagctctccgggtcctacgcctccgacatctacacctacctccgctccctggaggtggatccgcagcggcggtccagatccgattacatcgaggcggtgcaggcggacgtcacggcccacatgcggagcatcctcgtcgactggctcgtcgaggtcgccgaggagtacaagctcgtcgcggacacgctctacctcaccatctcttatgtcgaccgcttcctctccgtcaacgcgctcggccgtgacaagctgcagctccttggcgttgcctccatgctcattgccgcgaagttcgaggagatcagcccgccgcacccggaggacttctgctacatcacagacaacacctacaccaaagaggagctcctcaagatggagagcgacatactcaagcttctcaagttcgagttgggcaatcctacaatcaagaccttcctgagacgtttcataagatctgcccatgaagacaagaagggctccatcttgttaatggaattcttggggagctacctcgctgagctgagtctactagattatggctgcctccggttcttgccatcagtagttgctgcttcagtcatgtttgttgctaggctgaccattgatccaaataccaatccgtggaacacaaagctgcagaagatgactggctacaaagtttctgaactcaaggattgcatcgtagccatacatgacttgcagctcaacaggaaatgtccatcattaacggcaattcgagacaagtacaagcagcacaagttcaaatgcgtgtcattgatcctcgtgcctgtcgtgatccctacttcatactttgaagacttagctgagtagctgctctcggactgtaccgctgtaaggctaacaatctgagctctccttgagctcttagggacaagcagaaaataaccgtttgatgagctttcctctcatttaagtagcgtggtgaaagctatttgtttgaggttctttaggattcgcgccgctgtgtcactcttagtgagaccaggcattctcttgctgtgaatcttgtatcatatcttagtcacaccttgccttggtccgttggcaacgaatgtaatgtttgatacgttagacccttcg

SEQ ID NO: 16518 - protein, 345 aa, Zea mays subsp. mays
  peptide (1)..(345): Ceres Seq. ID no. 12349595
  misc_feature (78)..(207): Pfam Name: Cyclin, N-terminal domain Pfam Description: Cyclin, N-terminal domain
  misc_feature (68)..(343): Homolog of NCBI NO: 116167 NR Description: G2/MITOTIC-SPECIFIC CYCLIN C13-1 (A-LIKE CYCLIN)
  misc_feature (68)..(343): Homolog of NCBI NO: 15220147 NR Description: Cyclin A3;4; protein id: At1g47230.1, supported
  misc_feature (68)..(343): Homolog of NCBI NO: 15239172 NR Description: Cyclin A3;1; protein id: At5g43080.1 [Arabidopsis
  misc_feature (41)..(341): Homolog of NCBI NO: 7242793 NR Description: cyclin A3.1 [Pisum sativum]
  misc_feature (68)..(345): Homolog of NCBI NO: 7438513 NR Description: cyclin A-type (clone 59) - common tobacco
  misc_feature (68)..(343): Homolog of NCBI NO: 7438516 NR Description: cyclin A-type - Madagascar periwinkle
  misc_feature (35)..(345): Homolog of NCBI NO: 40538955 NR Description: putative A-type cyclin [Oryza sativa (japonica
MGYLWRVRLSSFAAGAATASAAGFFLLYKDHLLARAADAESNSASYSPPLATADTAFSAPPRAVAPADLQLSGSYASDIYTYLRSLEVDPQRRSRSDYIEAVQADVTAHMRSILVDWLVEVAEEYKLVADTLYLTISYVDRFLSVNALGRDKLQLLGVASMLIAAKFEEISPPHPEDFCYITDNTYTKEELLKMESDILKLLKFELGNPTIKTFLRRFIRSAHEDKKGSILLMEFLGSYLAELSLLDYGCLRFLPSVVAASVMFVARLTIDPNTNPWNTKLQKMTGYKVSELKDCIVAIHDLQLNRKCPSLTAIRDKYKQHKFKCVSLILVPVVIPTSYFEDLAE

SEQ ID NO: 16519 - protein, 238 aa, Zea mays subsp. mays
  peptide (1)..(238): Ceres Seq. ID no. 12349596
  misc_feature (50)..(238): Pfam Name: Herpes virus major outer envelope glycoprotein (BLLF1) Pfam Description: Herpes virus major outer envelope glycoprotein
  misc_feature (32)..(173): Homolog of NCBI NO: 3914142 NR Description: EARLY NODULIN 20 PRECURSOR (N-20)
PVVFVSGRAKRRRGGRYRGETRAGWGTCGGCGCLHLLPARRRLRRRGSSSSTRTTCSPALPTPSPTPPPTPRRSPQPTPLSPRRRAPWRPPTSSSPGPTPPTSTPTSAPWRWIRSGGPDPITSRRCRRTSRPTCGASSSTGSSRSPRSTSSSRTRSTSPSLMSTASSPSTRSAVTSCSSLALPPCSLPRSSRRSARRTRRTSATSQTTPTPKRSSSRWRATYSSFSSSSWAILQSRPS

SEQ ID NO: 16520 - protein, 236 aa, Zea mays subsp. mays
  peptide (1)..(236): Ceres Seq. ID no. 12349597
  misc_feature (1)..(98): Pfam Name: Cyclin, N-terminal domain Pfam Description: Cyclin, N-terminal domain
  misc_feature (1)..(234): Homolog of NCBI NO: 116167 NR Description: G2/MITOTIC-SPECIFIC CYCLIN C13-1 (A-LIKE CYCLIN)
  misc_feature (1)..(234): Homolog of NCBI NO: 15220147 NR Description: Cyclin A3;4; protein id: At1g47230.1, supported
  misc_feature (1)..(234): Homolog of NCBI NO: 15239172 NR Description: Cyclin A3;1; protein id: At5g43080.1 [Arabidopsis
  misc_feature (1)..(232): Homolog of NCBI NO: 7242793 NR Description: cyclin A3.1 [Pisum sativum]
  misc_feature (1)..(236): Homolog of NCBI NO: 7438513 NR Description: cyclin A-type (clone 59) - common tobacco
  misc_feature (1)..(234): Homolog of NCBI NO: 7438516 NR Description: cyclin A-type - Madagascar periwinkle
  misc_feature (1)..(236): Homolog of NCBI NO: 40538955 NR Description: putative A-type cyclin [Oryza sativa (japonica
MRSILVDWLVEVAEEYKLVADTLYLTISYVDRFLSVNALGRDKLQLLGVASMLIAAKFEEISPPHPEDFCYITDNTYTKEELLKMESDILKLLKFELGNPTIKTFLRRFIRSAHEDKKGSILLMEFLGSYLAELSLLDYGCLRFLPSVVAASVMFVARLTIDPNTNPWNTKLQKMTGYKVSELKDCIVAIHDLQLNRKCPSLTAIRDKYKQHKFKCVSLILVPVVIPTSYFEDLAE

SEQ ID NO: 16521 - DNA, 1230 bp, Zea mays subsp. mays
  misc_feature (1)..(1230): Ceres Seq. ID no. 12434921
  misc_feature: MA Experiment ID: 108543 Result: Down-regulated in Transcription
  misc_feature: MA Experiment ID: 108544 Result: Up-regulated in Transcription
  misc_feature: MA Experiment ID: 108689 Result: Up-regulated in Transcription
  misc_feature: MA Experiment 108689 PARAMETER Experiment Name: Zm_Drought_Roots_P Parameter: Age (day) Value: 9
  misc_feature: MA Experiment 108689 PARAMETER Experiment Name: Zm_Drought_Roots_P Parameter: Organism Value: Zea mays
  misc_feature: MA Experiment 108689 PARAMETER Experiment Name: Zm_Drought_Roots_P Parameter: Plant Line Value: 35A19
  misc_feature: MA Experiment 108689 PARAMETER Experiment Name: Zm_Drought_Roots_P Parameter: Timepoint (hr) Value: 24
  misc_feature: MA Experiment 108689 PARAMETER Experiment Name: Zm_Drought_Roots_P Parameter: Tissue Value: Roots
  misc_feature: MA Experiment 108689 PARAMETER Experiment Name: Zm_Drought_Roots_P Parameter: Treatment Value: Drought vs. No Drought
  misc_feature: MA Experiment ID: 20000535 Result: Down-regulated in Transcription
  misc_feature: MA Experiment 20000535 PARAMETER Experiment Name: Zm_Hybrid_Seed_Dev_P Parameter: DAP Value: 30 vs. 12
  misc_feature: MA Experiment 20000535 PARAMETER Experiment Name: Zm_Hybrid_Seed_Dev_P Parameter: Organism Value: Zea mays
  misc_feature: MA Experiment 20000535 PARAMETER Experiment Name: Zm_Hybrid_Seed_Dev_P Parameter: Plant Line Value: 35A19
  misc_feature: MA Experiment 20000535 PARAMETER Experiment Name: Zm_Hybrid_Seed_Dev_P Parameter: Tissue Value: Embryo vs. Unfert Floret
gcacgagaccattacctagaacatcctaatcgaaaaacgacgacgagaatccccccatcccccaccaggccacaaaaaccaggtcgccgatgccgcctaccgtctgacatcgatcacccaggcagatcgcgcgcaagccacccaaacaaatccaaaaccgaatcctgatccgatcccgtcgatcggcggcggcggcgatggaggcccggcccggcgcgtggcgcctgcagcagcggggccccggcgcgcccgtcgcgggcctgcccatcggcttccgcttccgccccaccgacgaggagctgctgctgcactacctccgccgcaaggcgctggcctgcccgctcccggcgggcgtcatcccggacgccgacctcgcgcgcctcgacccgtcggacctcctcctccccgccgccgcaccacctgcggggggagccgccgacgacgccagcggggagcacttcttcttccaccgcccggcgacgcggtgctggcgcaggggaggcggcgcggccagggcggccggcgccggcgtctggaggccgtccgggaaggagaccgtcgtcgtgtcgccgcgctgcaagcgcccccgtcggcaccaagcggacgctcgtcttctgcccgcgccgccgtggcggcggcggcgcccgcaccgactgggtcatgcacgagtaccgcctcctccccgccggcctccacctccacggctgcgccgccaacgcgcctccgcccactaatgtgagctcccatggcggtggcgcggcggcggccgactgggtggtctgtcgcattttcaggagggccaggccagcccaccgcgcccgccttggtgacgcgcaagaagaagaagaagagcacgcggcggtggagagcgcgtcgtccacgtcgtcgtgcgtcaccgacgcctccgggaccatcggccaggacgatgacggcgacgaagggatcagtggcagctgcagcgtcgcctcctctaattgagaccgactagaagaaacaagagttggctagcccgcccgtcgaccaaatcacgggcgccgtgtcctaattgccgtagcaccctctcagtctcagtccctagtagcaatcaatagagagaagaagcttgagctccaacaaaccgacaacaacatcataaaaaggctaagcgctttgctgccatgttatgttgttgctggagctcgtcgcgaatccagagtgttaattagcgagaaaatcaatcagttcccttcc

SEQ ID NO: 16522 - protein, 178 aa, Zea mays subsp. mays
  peptide (1)..(178): Ceres Seq. ID no. 12434922
  misc_feature (77)..(130): Pfam Name: No apical meristem (NAM) protein Pfam Description: No apical meristem (NAM) protein
  misc_feature (18)..(124): Homolog of NCBI NO: 23397295 NR Description: unknown protein [Arabidopsis thaliana]
  misc_feature (10)..(124): Homolog of NCBI NO: 18416983 NR Description: putative protein
  misc_feature (22)..(127): Homolog of NCBI NO: 38175531 NR Description: putative development regulation gene OsNAC4
  misc_feature (14)..(124): Homolog of NCBI NO: 20466640 NR Description: NAM-like protein [Arabidopsis thaliana]
  misc_feature (14)..(124): Homolog of NCBI NO: 21554226 NR Description: NAM-like protein [Arabidopsis thaliana]
  misc_feature (14)..(124): Homolog of NCBI NO: 15219110 NR Description: NAM-like protein
  misc_feature (17)..(126): Homolog of NCBI NO: 34902214 NR Description: Hypothetical protein [Oryza sativa (japonica
  misc_feature (17)..(124): Homolog of NCBI NO: 15218843 NR Description: jasmonic acid, putative; protein id: At1g65910.1
  misc_feature (77)..(130): Homolog of NCBI NO: 34907026 NR Description: contains EST C27594(C52325)~unknown protein
  misc_feature (1)..(67): Homolog of NCBI NO: 34907026 NR Description: contains EST C27594(C52325)~unknown protein
MEARPGAWRLQQRGPGAPVAGLPIGFRFRPTDEELLLHYLRRKALACPLPAGVIPDADLARLDPSDLLLPAAAPPAGGAADDASGEHFFFHRPATRCWRRGGGAARAAGAGVWRPSGKETVVVSPRCKRPRRHQADARLLPAPPWRRRRPHRLGHARVPPPPRRPPPPRLRRQRASAH

SEQ ID NO: 16523 - protein, 105 aa, Zea mays subsp. mays
  peptide (1)..(105): Ceres Seq. ID no. 12434923
  misc_feature (1)..(54): Homolog of NCBI NO: 34784016 NR Description: Unknown (protein for MGC:63802) [Danio rerio]
  misc_feature (1)..(91): Homolog of NCBI NO: 34899790 NR Description: OJ1773_H01.21 [Oryza sativa (japonica
  misc_feature (1)..(20): Homolog of NCBI NO: 21105746 NR Description: nam-like protein 9 [Petunia x hybrida]
  misc_feature (28)..(80): Homolog of NCBI NO: 7486254 NR Description: hypothetical protein F27G19.10 - Arabidopsis
  misc_feature (28)..(80): Homolog of NCBI NO: 23397295 NR Description: unknown protein [Arabidopsis thaliana]
  misc_feature (28)..(80): Homolog of NCBI NO: 18416983 NR Description: putative protein
  misc_feature (1)..(98): Homolog of NCBI NO: 34907026 NR Description: contains EST C27594(C52325)~unknown protein
MHEYRLLPAGLHLHGCAANAPPPTNVSSHGGGAAAADWVVCRIFRRARPAHRARLGDAQEEEEEHAAVESASSTSSCVTDASGTIGQDDDGDEGISGSCSVASSN

SEQ ID NO: 16524 - DNA, 1449 bp, Zea mays subsp. mays
  misc_feature (1)..(1449): Ceres Seq. ID no. 12366087
  misc_feature: MA Experiment ID: 108687 Result: Down-regulated in Transcription
  misc_feature: MA Experiment 108687 PARAMETER Experiment Name: Zm_Embryos-Flowers__P Parameter: Tissue Value: Embryo vs. Aerial+
  misc_feature: MA Experiment ID: 20000477 Result: Down-regulated in Transcription
  misc_feature: MA Experiment 20000477 PARAMETER Experiment Name: Zm_5mM_SA_P Parameter: Age (day) Value: 10
  misc_feature: MA Experiment 20000477 PARAMETER Experiment Name: Zm_5mM_SA_P Parameter: Organism Value: Zea mays
  misc_feature: MA Experiment 20000477 PARAMETER Experiment Name: Zm_5mM_SA_P Parameter: Plant Line Value: 35A19
  misc_feature: MA Experiment 20000477 PARAMETER Experiment Name: Zm_5mM_SA_P Parameter: Timepoint (hr) Value: 48
  misc_feature: MA Experiment 20000477 PARAMETER Experiment Name: Zm_5mM_SA_P Parameter: Tissue Value: Aerial
  misc_feature: MA Experiment 20000477 PARAMETER Experiment Name: Zm_5mM_SA_P Parameter: Treatment Value: 5mM SA vs. No Treatment
acattttttactgcgagaggctcctcgtcccactttgcattgcacccccgcaagctctcttcactctccccagctcaactcaaatgcaagcaaagatcgagcagaaacggcagcggctgctgggcatcgcgcccgatctgccgctgcacaagctccagctcgtcgtcgccccgaccgcggcctcgctcccggcgctcgccgtggtcgccctcctcctcctcctcctcgccacggcgcgccgtccgtgctccttcctcgacgcgtaccgctccggcgtcgtctccctgccttccccgtccagaacctcgccgccccacctcgggcgctctgcggccgccaacagggtgccgagcgggtgcgacatcttccgcccgggccagtgggttcccgacgacgacgcgccgtactacaccaacctcacctgcccgctcatccaggagcaccagaactgcatgaagtacggccgccccgaccgcggattccttcgctggcggtggcgccccgatggctgcgacctgccccgcttcgacgccgccgccttcctggacgccgtccgggacacgtcgctggcgttcgtcggggactcgctcgccaggaaccacatgcagtccctcatgtgcctcctgtccaaggtggcgtaccccaaagacgtctcgacgacgacgaacccagagttccggacgatgcgctacgaggcgtacaacttcaccatggccatcttctggtcgccgttcctggtccgggggcaccagccggacccgcggcgccacatgtgggacatctacctggacgagccggacgcggcgtggcgcgacgccgtctcgggcttcgaccgcgtggtcctgtcggcggcgacctggttcacccggccggccatgttctacgaggccggcggggggcgcgtccgcgtcgtggggtgccactactgcctggtcccgggcgtccccgaccggacgctgcgctactcgctgcgcatggcgctccgctccgcgctccgcgtgctcacggggccccggttcaacaggacggtgatcctgcggacgctgtcgccgacgtcgcacttcgagggcggggagtgggaccggggcggggactgccggcggacgcggccgttcgcgcccaacgagacgcgggtggcggggctggacctcgacctccacgcggtgcaggtggaggagttctccagggcaagggccgaggcggaggcgtccggcggggggacgaggctggcgctcatggacaccacggcggccatggtgcttcggccggacggccacccgagccggtacggccactggccgcacgagaacgtgacgctgtacaacgactgcgtgcactggtgcctccccggccccatcgacgcctggaacgacatgctgctccagatgctcctcgcggacccatcttgatgtccgtgtgtttcttccgctagctccaatttgtcccagg

SEQ ID NO: 16525 - protein, 476 aa, Zea mays subsp. mays
  peptide (1)..(476): Ceres Seq. ID no. 12366088
  misc_feature (309)..(437): Pfam Name: Herpesvirus UL87 family Pfam Description: Herpesvirus UL87 family
HFLLREAPRPTLHCTPASSLHSPQLNSNASKDRAETAAAAGHRARSAAAQAPARRRPDRGLAPGARRGRPPPPPPRHGAPSVLLPRRVPLRRRLPAFPVQNLAAPPRALCGRQQGAERVRHLPPGPVGSRRRRAVLHQPHLPAHPGAPELHEVRPPRPRIPSLAVAPRWLRPAPLRRRRLPGRRPGHVAGVRRGLARQEPHAVPHVPPVQGGVPQRRLDDDEPRVPDDALRGVQLHHGHLLVAVPGPGAPAGPAAPHVGHLPGRAGRGVARRRLGLRPRGPVGGDLVHPAGHVLRGRRGARPRRGVPLLPGPGRPRPDAALLAAHGAPLRAPRAHGAPVQQDGDPADAVADVALRGRGVGPGRGLPADAAVRAQRDAGGGAGPRPPRGAGGGVLQGKGRGGGVRRGDEAGAHGHHGGHGASAGRPPEPVRPLAARERDAVQRLRALVPPRPHRRLERHAAPDAPRGPILMSVCFFR

SEQ ID NO: 16526 - protein, 468 aa, Zea mays subsp. mays
  peptide (1)..(468): Ceres Seq. ID no. 12366089
  misc_feature (287)..(463): Pfam Name: Arabidopsis proteins of unknown function Pfam Description: Arabidopsis proteins of unknown function
  misc_feature (130)..(464): Homolog of NCBI NO: 25518737 NR Description: hypothetical protein F6F3.23 [imported] -
  misc_feature (119)..(463): Homolog of NCBI NO: 15223079 NR Description: unknown protein
  misc_feature (125)..(247): Homolog of NCBI NO: 34898640 NR Description: hypothetical protein~similar to Oryza sativa
  misc_feature (259)..(463): Homolog of NCBI NO: 34898640 NR Description: hypothetical protein~similar to Oryza sativa
  misc_feature (90)..(464): Homolog of NCBI NO: 30678135 NR Description: expressed protein [Arabidopsis thaliana]
  misc_feature (50)..(463): Homolog of NCBI NO: 15237213 NR Description: putative protein; protein id: At5g15900.1
  misc_feature (119)..(466): Homolog of NCBI NO: 15237211 NR Description: putative protein; protein id: At5g15890.1
  misc_feature (91)..(464): Homolog of NCBI NO: 34911880 NR Description: OSJNBb0032K15.17 [Oryza sativa (japonica
  misc_feature (94)..(463): Homolog of NCBI NO: 34911888 NR Description: OSJNBb0032K15.21 [Oryza sativa (japonica
  misc_feature (50)..(468): Homolog of NCBI NO: 34898638 NR Description: contains ESTs
IFYCERLLVPLCIAPPQALFTLPSSTQMQAKIEQKRQRLLGIAPDLPLHKLQLVVAPTAASLPALAVVALLLLLLATARRPCSFLDAYRSGVVSLPSPSRTSPPHLGRSAAANRVPSGCDIFRPGQWVPDDDAPYYTNLTCPLIQEHQNCMKYGRPDRGFLRWRWRPDGCDLPRFDAAAFLDAVRDTSLAFVGDSLARNHMQSLMCLLSKVAYPKDVSTTTNPEFRTMRYEAYNFTMAIFWSPFLVRGHQPDPRRHMWDIYLDEPDAAWRDAVSGFDRVVLSAATWFTRPAMFYEAGGGRVRVVGCHYCLVPGVPDRTLRYSLRMALRSALRVLTGPRFNRTVILRTLSPTSHFEGGEWDRGGDCRRTRPFAPNETRVAGLDLDLHAVQVEEFSRARAEAEASGGGTRLALMDTTAAMVLRPDGHPSRYGHWPHENVTLYNDCVHWCLPGPIDAWNDMLLQMLLADPS

SEQ ID NO: 16527 - protein, 441 aa, Zea mays subsp. mays
  peptide (1)..(441): Ceres Seq. ID no. 12366090
  misc_feature (260)..(436): Pfam Name: Arabidopsis proteins of unknown function Pfam Description: Arabidopsis proteins of unknown function
  misc_feature (63)..(437): Homolog of NCBI NO: 30678135 NR Description: expressed protein [Arabidopsis thaliana]
  misc_feature (23)..(436): Homolog of NCBI NO: 15237213 NR Description: putative protein; protein id: At5g15900.1
  misc_feature (92)..(439): Homolog of NCBI NO: 15237211 NR Description: putative protein; protein id: At5g15890.1
  misc_feature (103)..(437): Homolog of NCBI NO: 25518737 NR Description: hypothetical protein F6F3.23 [imported] -
  misc_feature (98)..(220): Homolog of NCBI NO: 34898640 NR Description: hypothetical protein~similar to Oryza sativa
  misc_feature (232)..(436): Homolog of NCBI NO: 34898640 NR Description: hypothetical protein~similar to Oryza sativa
  misc_feature (92)..(436): Homolog of NCBI NO: 15223079 NR Description: unknown protein
  misc_feature (64)..(437): Homolog of NCBI NO: 34911880 NR Description: OSJNBb0032K15.17 [Oryza sativa (japonica
  misc_feature (67)..(436): Homolog of NCBI NO: 34911888 NR Description: OSJNBb0032K15.21 [Oryza sativa (japonica
  misc_feature (23)..(441): Homolog of NCBI NO: 34898638 NR Description: contains ESTs
MQAKIEQKRQRLLGIAPDLPLHKLQLVVAPTAASLPALAVVALLLLLLATARRPCSFLDAYRSGVVSLPSPSRTSPPHLGRSAAANRVPSGCDIFRPGQWVPDDDAPYYTNLTCPLIQEHQNCMKYGRPDRGFLRWRWRPDGCDLPRFDAAAFLDAVRDTSLAFVGDSLARNHMQSLMCLLSKVAYPKDVSTTTNPEFRTMRYEAYNFTMAIFWSPFLVRGHQPDPRRHMWDIYLDEPDAAWRDAVSGFDRVVLSAATWFTRPAMFYEAGGGRVRVVGCHYCLVPGVPDRTLRYSLRMALRSALRVLTGPRFNRTVILRTLSPTSHFEGGEWDRGGDCRRTRPFAPNETRVAGLDLDLHAVQVEEFSRARAEAEASGGGTRLALMDTTAAMVLRPDGHPSRYGHWPHENVTLYNDCVHWCLPGPIDAWNDMLLQMLLADPS

SEQ ID NO: 16528 - DNA, 1374 bp, Zea mays subsp. mays
  misc_feature (1)..(1374): Ceres Seq. ID no. 12352823
  misc_feature: MA Experiment ID: 108529 Result: Up-regulated in Transcription
  misc_feature: MA Experiment 108529 PARAMETER Experiment Name: Zm_Imbibed_Seeds_P Parameter: Age (day) Value: 5 vs. 2
  misc_feature: MA Experiment 108529 PARAMETER Experiment Name: Zm_Imbibed_Seeds_P Parameter: Organism Value: Zea mays
  misc_feature: MA Experiment 108529 PARAMETER Experiment Name: Zm_Imbibed_Seeds_P Parameter: Plant Line Value: 35A19
  misc_feature: MA Experiment 108529 PARAMETER Experiment Name: Zm_Imbibed_Seeds_P Parameter: Tissue Value: Roots vs. Embryo
  misc_feature: MA Experiment ID: 108535 Result: Down-regulated in Transcription
  misc_feature: MA Experiment 108535 PARAMETER Experiment Name: Zm_Meristem_P Parameter: Age (day) Value: 8
  misc_feature: MA Experiment 108535 PARAMETER Experiment Name: Zm_Meristem_P Parameter: Organism Value: Zea mays
  misc_feature: MA Experiment 108535 PARAMETER Experiment Name: Zm_Meristem_P Parameter: Plant Line Value: 35A19
  misc_feature: MA Experiment 108535 PARAMETER Experiment Name: Zm_Meristem_P Parameter: Tissue Value: Root Meristem vs. Above Root Meristem
accaaaccgccccgccgagcgacccagtccgtcagcgagcacccctgtcgccgaagcccaggcagcagcagcgggcagcggcgtccgtccggtccgcgcgcgttcgttccccacttcccctccccgaccggcagattccccgtccacgcccccgccttaaaacgcccgccactaatcccgtttctcactgcccttccgcggctgtgctgtgctgttctgtgctctgctctgctctgctccccgtctttcctcctctcccggtctttcctcctctccccttcccgcccagcgcgtccccccgaggaaccaaccccgcggcatggggatcgtggaggaggcgcacaacctgcgagtggtgggcgaggggaagcgcggggtcatcgtgctggcgcacggcttcggcaccgaccagtccgtgtggaagcacctggtgccgcacctcgtcgcccgactaccgcgtcgtgctcttcgacaccatgggcgccggccccaccaacccggactacttcgacttctcccgctacgccacgctcgagggctacgcgctcgacctcctcgccatcctccaggagctcggcgtccgctcctgcatctacgtcggccactccgtctccgcggtcatcggcgcgctcgcctccatctccaggcctgacctcttcaccaagctcgtgctcctctccgcgtccccaaggtacctcaatgatgtggactactatggcgggtttgagcaagatgagcttgatgagctgtttgaggcgatgcgatcaaactacaaggcctggtgctcaggttttgcgcccctgtgtgttggcggagacatggaatcagtggcagttcaggagtttagcaggacgctcttcaatatacgtccggacattgcgcttagtgttgcccagacgatcttccagagcgacgtgcgcagcctcctcccgcacgtcactgtcccatgccacattgttcagagcaccaaggatctcgcggtgccggtcgtggtgtctgagtacctgcacaggcaccttggtggcgactccatcgtggaggtgatgccctctgaaggccatcttccccagcttagctctccggacattgtaatccctgtcttactccgacacatccagcacgatatcgcagtctaggttggtcaatcgttcctccaagacgatgagcatccgaagctgtctacttgtctgtttgtatcttgcttaattgttcaacgtaggatcgcatctatttgatgttctaataaggtttcaaaggtgttatgtagtgttggcggtggaaagtgtagcatatatgtatgtgttatccattggtcgtctaatgtaggctaccatgttggatgctctgacatctgaagtccttcagaagctcttc

SEQ ID NO: 16529 - protein, 377 aa, Zea mays subsp. mays
  peptide (1)..(377): Ceres Seq. ID no. 12352824
  misc_feature (151)..(369): Pfam Name: alpha/beta hydrolase fold Pfam Description: alpha/beta hydrolase fold
  misc_feature (150)..(361): Homolog of NCBI NO: 29827464 NR Description: putative hydrolase [Streptomyces avermitilis
  misc_feature (151)..(371): Homolog of NCBI NO: 22298700 NR Description: ORF_ID:tlr1157~hypothetical protein
  misc_feature (150)..(360): Homolog of NCBI NO: 22987307 NR Description: hypothetical protein [Burkholderia fungorum]
  misc_feature (148)..(372): Homolog of NCBI NO: 15230110 NR Description: unknown protein; protein id: At3g24420.1
  misc_feature (141)..(364): Homolog of NCBI NO: 24216360 NR Description: Predicted hydrolases or acyltransferases,
  misc_feature (150)..(360): Homolog of NCBI NO: 21593927 NR Description: unknown [Arabidopsis thaliana]
  misc_feature (150)..(360): Homolog of NCBI NO: 18396732 NR Description: expressed protein
  misc_feature (150)..(377): Homolog of NCBI NO: 15235567 NR Description: putative protein
  misc_feature (150)..(232): Homolog of NCBI NO: 40736991 NR Description: putative hydrolases [Oryza sativa (japonica
  misc_feature (231)..(377): Homolog of NCBI NO: 40736991 NR Description: putative hydrolases [Oryza sativa (japonica
QTAPPSDPVRQRAPLSPKPRQQQRAAASVRSARVRSPLPLPDRQIPRPRPRLKTPATNPVSHCPSAAVLCCSVLCSALLPVFPPLPVFPPLPFPPSASPRGTNPAAWGSWRRRTTCEWWARGSAGSSCWRTASAPTSPCGSTWCRTSSPDYRVVLFDTMGAGPTNPDYFDFSRYATLEGYALDLLAILQELGVRSCIYVGHSVSAVIGALASISRPDLFTKLVLLSASPRYLNDVDYYGGFEQDELDELFEAMRSNYKAWCSGFAPLCVGGDMESVAVQEFSRTLFNIRPDIALSVAQTIFQSDVRSLLPHVTVPCHIVQSTKDLAVPVVVSEYLHRHLGGDSIVEVMPSEGHLPQLSSPDIVIPVLLRHIQHDIAV

SEQ ID NO: 16530 - protein, 347 aa, Zea mays subsp. mays
  peptide (1)..(347): Ceres Seq. ID no. 12352825
  misc_feature (110)..(215): Pfam Name: Cupin Pfam Description: Cupin
  misc_feature (36)..(229): Homolog of NCBI NO: 15233976 NR Description: extensin-like protein; protein id: At4g18670.1
  misc_feature (142)..(326): Homolog of NCBI NO: 5420387 NR Description: proteophosphoglycan [Leishmania major]
  misc_feature (142)..(344): Homolog of NCBI NO: 11359723 NR Description: proteophosphoglycan, membrane-associated
  misc_feature (3)..(347): Homolog of NCBI NO: 11360318 NR Description: probable mucin DKFZp434C196.1 - human (fragment)
  misc_feature (141)..(229): Homolog of NCBI NO: 30140331 NR Description: putative arabinagalactan protein [Lotus japonicus]
TKPPRRATQSVSEHPCRRSPGSSSGQRRPSGPRAFVPHFPSPTGRFPVHAPALKRPPLIPFLTALPRLCCAVLCSALLCSPSFLLSRSFLLSPSRPARPPEEPTPRHGDRGGGAQPASGGRGEARGHRAGARLRHRPVRVEAPGAAPRRPTTASCSSTPWAPAPPTRTTSTSPATPRSRATRSTSSPSSRSSASAPASTSATPSPRSSARSPPSPGLTSSPSSCSSPRPQGTSMMWTTMAGLSKMSLMSCLRRCDQTTRPGAQVLRPCVLAETWNQWQFRSLAGRSSIYVRTLRLVLPRRSSRATCAASSRTSLSHATLFRAPRISRCRSWCLSTCTGTLVATPSWR

SEQ ID NO: 16531 - protein, 219 aa, Zea mays subsp. mays
  peptide (1)..(219): Ceres Seq. ID no. 12352826
  misc_feature (1)..(211): Pfam Name: alpha/beta hydrolase fold Pfam Description: alpha/beta hydrolase fold
  misc_feature (1)..(203): Homolog of NCBI NO: 29827464 NR Description: putative hydrolase [Streptomyces avermitilis
  misc_feature (1)..(213): Homolog of NCBI NO: 22298700 NR Description: ORF_ID:tlr1157~hypothetical protein
  misc_feature (1)..(202): Homolog of NCBI NO: 22987307 NR Description: hypothetical protein [Burkholderia fungorum]
  misc_feature (1)..(214): Homolog of NCBI NO: 15230110 NR Description: unknown protein; protein id: At3g24420.1
  misc_feature (1)..(206): Homolog of NCBI NO: 24216360 NR Description: Predicted hydrolases or acyltransferases,
  misc_feature (1)..(202): Homolog of NCBI NO: 21593927 NR Description: unknown [Arabidopsis thaliana]
  misc_feature (1)..(202): Homolog of NCBI NO: 18396732 NR Description: expressed protein
  misc_feature (1)..(219): Homolog of NCBI NO: 15235567 NR Description: putative protein
  misc_feature (1)..(74): Homolog of NCBI NO: 40736991 NR Description: putative hydrolases [Oryza sativa (japonica
  misc_feature (73)..(219): Homolog of NCBI NO: 40736991 NR Description: putative hydrolases [Oryza sativa (japonica
MGAGPTNPDYFDFSRYATLEGYALDLLAILQELGVRSCIYVGHSVSAVIGALASISRPDLFTKLVLLSASPRYLNDVDYYGGFEQDELDELFEAMRSNYKAWCSGFAPLCVGGDMESVAVQEFSRTLFNIRPDIALSVAQTIFQSDVRSLLPHVTVPCHIVQSTKDLAVPVVVSEYLHRHLGGDSIVEVMPSEGHLPQLSSPDIVIPVLLRHIQHDIAV

SEQ ID NO: 16532 - DNA, 1419 bp, Zea mays subsp. mays
  misc_feature (1)..(1419): Ceres Seq. ID no. 12353172
  misc_feature: MA Experiment ID: 108528 Result: Up-regulated in Transcription
  misc_feature: MA Experiment 108528 PARAMETER Experiment Name: Zm_Imbibed_Seeds_P Parameter: Age (day) Value: 5 vs. 2
  misc_feature: MA Experiment 108528 PARAMETER Experiment Name: Zm_Imbibed_Seeds_P Parameter: Organism Value: Zea mays
  misc_feature: MA Experiment 108528 PARAMETER Experiment Name: Zm_Imbibed_Seeds_P Parameter: Plant Line Value: 35A19
  misc_feature: MA Experiment 108528 PARAMETER Experiment Name: Zm_Imbibed_Seeds_P Parameter: Tissue Value: Aerial vs. Embryo
  misc_feature: MA Experiment ID: 108530 Result: Up-regulated in Transcription
  misc_feature: MA Experiment 108530 PARAMETER Experiment Name: Zm_Imbibed_Seeds_P Parameter: Age (day) Value: 6 vs. 2
  misc_feature: MA Experiment 108530 PARAMETER Experiment Name: Zm_Imbibed_Seeds_P Parameter: Organism Value: Zea mays
  misc_feature: MA Experiment 108530 PARAMETER Experiment Name: Zm_Imbibed_Seeds_P Parameter: Plant Line Value: 35A19
  misc_feature: MA Experiment 108530 PARAMETER Experiment Name: Zm_Imbibed_Seeds_P Parameter: Tissue Value: Aerial vs. Embryo
  misc_feature: MA Experiment ID: 108543 Result: Down-regulated in Transcription
ccggcaaatcccgtatccaaatccaatagggtaaacctagccgcccatctgcccgccatgaaggcgtcgatcaagttccgcgacgacgaccgcccgctgctgcgcgccaaggtgccggtcggcgtgctggggctgcctttcttctcgggcctcgtggcggggggagacgccaaggacctccgcttcgacctctccaccgccttcacctccggcccggcgctccgcctctcgtaccgccccaacgaaccgctccagccctttgccctctccatccgcacggggctggggccgctggggtcccctgtccgagcccccttcgccctcgccgccgaattcaacctcacctcctcgaacccgcccgccttctcgctcgttttcaagccccggatcggagacttcgccgtcgccagctccgtccgctccccgccgccgccgccgcccgcatcaactctgcccccgctgtcggtcaagatgtccgacctcgtcaccaacggcgacgaccacgaccgcaaagcgcacggtaacgggttctccttctctgggaatgggttcgcggcgaacgtggcggccgccgccgggaccggcggcggcggcgtgggcgcgctgctgtccaggatgcggctcacgaccaggagtgtgctgccactgtggagtaaggcgagcctgcggttccagtgggggctgcgcgtgccgccggagatcaaggccgcgctcgcagacgacgggtacgggcgcaaggctgggagcctcgccatcagcaagctgccgctgctggtgatgaacaagatcaccatcgagcacacgcccaaggtgccttcgcagtctgaaacggataagaagaggaagaaagatgccccaccagcagccgagggcgaggtgttctcactaatgaagaggcaattggaggagctgaatgctgagagcaccatgctgcgtctggcagtcgaggacttgcgtgcagaggttggagccagcaaaggcgatggacgtaagctgccagcaacagtgccacatccacagcgttcattcgtgtcgaaaccagatcaccattttcacagcgatgctaaggatttgggagacagtgggacgaaaccggcctccaatgatgcaagtgaggggttgaagaaggcgctggaggccagacgaaagtaggaaacacctagataggggggccatagggcttgctgacactgcaagcgctacaatatgatatggctgctgacggctgtgtcaagttttgtgcttaataataatgcttcctcaatggagaagattggtaagggctgtgaggtagccattttccataggtgatgtagtagttttgcctatattctatttccattgtttgtgttaggatattatccgttctgtataaatccgcaacttgcgatctaaaatgaatgaaggattagttttttt

SEQ ID NO: 16533 - protein, 383 aa, Zea mays subsp. mays
  peptide (1)..(383): Ceres Seq. ID no. 12353173
  misc_feature (70)..(142): Homolog of NCBI NO: 21740989 NR Description: OSJNBa0019K04.27 [Oryza sativa (japonica
  misc_feature (20)..(372): Homolog of NCBI NO: 15230911 NR Description: putative protein
  misc_feature (20)..(381): Homolog of NCBI NO: 28411873 NR Description: OSJNBa0016N23.25 [Oryza sativa (japonica
PANPVSKSNRVNLAAHLPAMKASIKFRDDDRPLLRAKVPVGVLGLPFFSGLVAGGDAKDLRFDLSTAFTSGPALRLSYRPNEPLQPFALSIRTGLGPLGSPVRAPFALAAEFNLTSSNPPAFSLVFKPRIGDFAVASSVRSPPPPPPASTLPPLSVKMSDLVTNGDDHDRKAHGNGFSFSGNGFAANVAAAAGTGGGGVGALLSRMRLTTRSVLPLWSKASLRFQWGLRVPPEIKAALADDGYGRKAGSLAISKLPLLVMNKITIEHTPKVPSQSETDKKRKKDAPPAAEGEVFSLMKRQLEELNAESTMLRLAVEDLRAEVGASKGDGRKLPATVPHPQRSFVSKPDHHFHSDAKDLGDSGTKPASNDASEGLKKALEARRK

SEQ ID NO: 16534 - protein, 364 aa, Zea mays subsp. mays
  peptide (1)..(364): Ceres Seq. ID no. 12353174
  misc_feature (51)..(123): Homolog of NCBI NO: 21740989 NR Description: OSJNBa0019K04.27 [Oryza sativa (japonica
  misc_feature (1)..(353): Homolog of NCBI NO: 15230911 NR Description: putative protein
  misc_feature (1)..(362): Homolog of NCBI NO: 28411873 NR Description: OSJNBa0016N23.25 [Oryza sativa (japonica
MKASIKFRDDDRPLLRAKVPVGVLGLPFFSGLVAGGDAKDLRFDLSTAFTSGPALRLSYRPNEPLQPFALSIRTGLGPLGSPVRAPFALAAEFNLTSSNPPAFSLVFKPRIGDFAVASSVRSPPPPPPASTLPPLSVKMSDLVTNGDDHDRKAHGNGFSFSGNGFAANVAAAAGTGGGGVGALLSRMRLTTRSVLPLWSKASLRFQWGLRVPPEIKAALADDGYGRKAGSLAISKLPLLVMNKITIEHTPKVPSQSETDKKRKKDAPPAAEGEVFSLMKRQLEELNAESTMLRLAVEDLRAEVGASKGDGRKLPATVPHPQRSFVSKPDHHFHSDAKDLGDSGTKPASNDASEGLKKALEARRK

SEQ ID NO: 16535 - protein, 226 aa, Zea mays subsp. mays
  peptide (1)..(226): Ceres Seq. ID no. 12353175
  misc_feature (1)..(215): Homolog of NCBI NO: 15230911 NR Description: putative protein
  misc_feature (1)..(224): Homolog of NCBI NO: 28411873 NR Description: OSJNBa0016N23.25 [Oryza sativa (japonica
MSDLVTNGDDHDRKAHGNGFSFSGNGFAANVAAAAGTGGGGVGALLSRMRLTTRSVLPLWSKASLRFQWGLRVPPEIKAALADDGYGRKAGSLAISKLPLLVMNKITIEHTPKVPSQSETDKKRKKDAPPAAEGEVFSLMKRQLEELNAESTMLRLAVEDLRAEVGASKGDGRKLPATVPHPQRSFVSKPDHHFHSDAKDLGDSGTKPASNDASEGLKKALEARRK

SEQ ID NO: 16536 - DNA, 1621 bp, Zea mays subsp. mays
  misc_feature (1)..(1621): Ceres Seq. ID no. 12366091
  misc_feature: MA Experiment ID: 108543 Result: Down-regulated in Transcription
  misc_feature: MA Experiment ID: 108544 Result: Down-regulated in Transcription
caaaaatgggattggcttgccatattgcggaaattcatagccaggtaattgaggtggaggggtgcatgcaagtgtttttttcttctagtgctaggttgcattcttgcttcatattttttcttgaagctgttgctgcttgtactagtatctcgtactgctattcctttcacttactgttgggaccatgcttcgtcgccgaaggtcctgcagaaagaaacagcttcggctgaagttgctcgtacgcgatgccgaatgtgccatttcgtgaagcttcggaattacaaaccgacttaaagatagaatgaccttttagtccataagagtccgagtcattgttgtaaacttttacgagggctacgattgtaattcctcacgggttgtgtcctgtgcctataaatagtgaacaatattcctttactgttcatgcatccctgtaattgcaattgcatcactcggaaattaccctttgtcaaggcagaggtataaatgtgtctaaatattatgtttgaacatcttaaatttatagtatataaatgatgctatttatctccaatttacttgtctttaatgccttatgtcttacgttattttatattatctttgtgagttgaattatgaaggttaattctgccattataaccttcgtccgaagtacatccttagggaaataatgcttcagcggacgaagggcattgaaatttaacattttatgttgtcttgttcttaattcatagcatttgagaacaagtctccaacacttacaatttgctttgtctaggcgtcagtagagaacaacgcatgggaactgaaaataatacattgaggagctgtacttgcgatctgttaagcaggttctgctccttgtccatatcaaaggtggagttgatgcagctgcagctctttcttttcttgtactggtctgagctcaagggtaaggttactactggcctggcgttggttctgagcccatatggtggcaccccggtcgcctctgatatctttcgagaaggcctgatccctgataaggatacaaggaggatcatggagctcatggtatgcaaactaatcaagacgaacaagcagggtgacatcagggtcttggaggacacctcacacatgctaagacaaaggactgcatcaccaagcacaaacttcccgtcggtgagctcttcaaaggacttcatcgatgtgtcggcagccatggtggtcatgggcttacggccctccacctgcggctgcactatggggagaggagcaccgggctggtgacgaggcgtgatgccgaggtgcctgggttggtggtggtgaggcccgagagaaggctcgaccacgcgtggatggtttactccacgctgaagatgtgtagcgatgaggccgatgcaagcgagatgtgtgcgaggctctgctggccttgctcgttgagatcgacaggaagaaatttggctggccgtccggtcatgttggagtcctcgatggttttggttatagatgcaaatgtgtcgaaccagatagcacatgctacaaatgatcgatttgtttcctttgttcaaagcaaatatactgtggcaatatgctacttggctatgtaatgttcttcacattttaacttagttctatttgc

SEQ ID NO: 16537 - protein, 156 aa, Zea mays subsp. mays
  peptide (1)..(156): Ceres Seq. ID no. 12366092
  misc_feature (36)..(110): Homolog of NCBI NO: 30689883 NR Description: expressed protein [Arabidopsis thaliana]
  misc_feature (36)..(110): Homolog of NCBI NO: 18377628 NR Description: unknown protein [Arabidopsis thaliana]
  misc_feature (36)..(110): Homolog of NCBI NO: 7486943 NR Description: hypothetical protein At2g44970 [imported] -
MGTENNTLRSCTCDLLSRFCSLSISKVELMQLQLFLFLYWSELKGKVTTGLALVLSPYGGTPVASDIFREGLIPDKDTRRIMELMVCKLIKTNKQGDIRVLEDTSHMLRQRTASPSTNFPSVSSSKDFIDVSAAMVVMGLRPSTCGCTMGRGAPGW

SEQ ID NO: 16538 - protein, 127 aa, Zea mays subsp. mays
  peptide (1)..(127): Ceres Seq. ID no. 12366093
  misc_feature (7)..(81): Homolog of NCBI NO: 30689883 NR Description: expressed protein [Arabidopsis thaliana]
  misc_feature (7)..(81): Homolog of NCBI NO: 18377628 NR Description: unknown protein [Arabidopsis thaliana]
  misc_feature (7)..(81): Homolog of NCBI NO: 7486943 NR Description: hypothetical protein At2g44970 [imported] -
MQLQLFLFLYWSELKGKVTTGLALVLSPYGGTPVASDIFREGLIPDKDTRRIMELMVCKLIKTNKQGDIRVLEDTSHMLRQRTASPSTNFPSVSSSKDFIDVSAAMVVMGLRPSTCGCTMGRGAPGW

SEQ ID NO: 16539 - protein, 83 aa, Zea mays subsp. mays
  peptide (1)..(83): Ceres Seq. ID no. 12366094
  misc_feature (1)..(22): Homolog of NCBI NO: 30689883 NR Description: expressed protein [Arabidopsis thaliana]
  misc_feature (1)..(22): Homolog of NCBI NO: 18377628 NR Description: unknown protein [Arabidopsis thaliana]
  misc_feature (1)..(22): Homolog of NCBI NO: 7486943 NR Description: hypothetical protein At2g44970 [imported] -
MVYSTLKMCSDEADASEMCARLCWPCSLRSTGRNLAGRPVMLESSMVLVIDANVSNQIAHATNDRFVSFVQSKYTVAICYLAM

SEQ ID NO: 16540 - DNA, 1605 bp, Zea mays subsp. mays
  misc_feature (1)..(1605): Ceres Seq. ID no. 15180809
  misc_feature: MA Experiment ID: 108535 Result: Up-regulated in Transcription
  misc_feature: MA Experiment 108535 PARAMETER Experiment Name: Zm_Meristem_P Parameter: Age (day) Value: 8
  misc_feature: MA Experiment 108535 PARAMETER Experiment Name: Zm_Meristem_P Parameter: Organism Value: Zea mays
  misc_feature: MA Experiment 108535 PARAMETER Experiment Name: Zm_Meristem_P Parameter: Plant Line Value: 35A19
  misc_feature: MA Experiment 108535 PARAMETER Experiment Name: Zm_Meristem_P Parameter: Tissue Value: Root Meristem vs. Above Root Meristem
  misc_feature: MA Experiment ID: 20000477 Result: Down-regulated in Transcription
  misc_feature: MA Experiment 20000477 PARAMETER Experiment Name: Zm_5mM_SA_P Parameter: Age (day) Value: 10
  misc_feature: MA Experiment 20000477 PARAMETER Experiment Name: Zm_5mM_SA_P Parameter: Organism Value: Zea mays
  misc_feature: MA Experiment 20000477 PARAMETER Experiment Name: Zm_5mM_SA_P Parameter: Plant Line Value: 35A19
  misc_feature: MA Experiment 20000477 PARAMETER Experiment Name: Zm_5mM_SA_P Parameter: Timepoint (hr) Value: 48
  misc_feature: MA Experiment 20000477 PARAMETER Experiment Name: Zm_5mM_SA_P Parameter: Tissue Value: Aerial
  misc_feature: MA Experiment 20000477 PARAMETER Experiment Name: Zm_5mM_SA_P Parameter: Treatment Value: 5mM SA vs. No Treatment
  misc_feature: MA Experiment ID: 20000478 Result: Down-regulated in Transcription
  misc_feature: MA Experiment 20000478 PARAMETER Experiment Name: Zm_5mM_SA_P Parameter: Age (day) Value: 11
  misc_feature: MA Experiment 20000478 PARAMETER Experiment Name: Zm_5mM_SA_P Parameter: Organism Value: Zea mays
  misc_feature: MA Experiment 20000478 PARAMETER Experiment Name: Zm_5mM_SA_P Parameter: Plant Line Value: 35A19
  misc_feature: MA Experiment 20000478 PARAMETER Experiment Name: Zm_5mM_SA_P Parameter: Timepoint (hr) Value: 72
  misc_feature: MA Experiment 20000478 PARAMETER Experiment Name: Zm_5mM_SA_P Parameter: Tissue Value: Aerial
  misc_feature: MA Experiment 20000478 PARAMETER Experiment Name: Zm_5mM_SA_P Parameter: Treatment Value: 5mM SA vs. No Treatment
  misc_feature: MA Experiment ID: 20000479 Result: Down-regulated in Transcription
  misc_feature: MA Experiment 20000479 PARAMETER Experiment Name: Zm_Drought_P Parameter: Age (day) Value: 10
  misc_feature: MA Experiment 20000479 PARAMETER Experiment Name: Zm_Drought_P Parameter: Organism Value: Zea mays
  misc_feature: MA Experiment 20000479 PARAMETER Experiment Name: Zm_Drought_P Parameter: Plant Line Value: 35A19
  misc_feature: MA Experiment 20000479 PARAMETER Experiment Name: Zm_Drought_P Parameter: Timepoint (hr) Value: 48
  misc_feature: MA Experiment 20000479 PARAMETER Experiment Name: Zm_Drought_P Parameter: Tissue Value: Aerial
  misc_feature: MA Experiment 20000479 PARAMETER Experiment Name: Zm_Drought_P Parameter: Treatment Value: Drought vs. No Drought
  misc_feature: MA Experiment ID: 20000480 Result: Down-regulated in Transcription
  misc_feature: MA Experiment 20000480 PARAMETER Experiment Name: Zm_Drought_P Parameter: Age (day) Value: 11
  misc_feature: MA Experiment 20000480 PARAMETER Experiment Name: Zm_Drought_P Parameter: Organism Value: Zea mays
  misc_feature: MA Experiment 20000480 PARAMETER Experiment Name: Zm_Drought_P Parameter: Plant Line Value: 35A19
  misc_feature: MA Experiment 20000480 PARAMETER Experiment Name: Zm_Drought_P Parameter: Timepoint (hr) Value: 72
  misc_feature: MA Experiment 20000480 PARAMETER Experiment Name: Zm_Drought_P Parameter: Tissue Value: Aerial
  misc_feature: MA Experiment 20000480 PARAMETER Experiment Name: Zm_Drought_P Parameter: Treatment Value: Drought vs. No Drought
agaacatcctaatcgaaaagaaaccccagagctttaaagcttttccgattccgcaatgctcaccgttcggttccttctcgtaccgagccgcgggtagccagccaaccgccgacgcagtccacaagcgatgaagcgcttcttccagccagtgcccaaggacggctccccgtccaagaagcggctagcgggtgctgctgaaccgggcgacggccccacatcagccggtgccgccaccggcgctggcggggatgtagaggggaggcccaccgaggagccgttcaagttcctgacgtggaacgccaacagcctgctcctccggatgaagagcgactggcctgctttctcgcagctcgtcgcccgccttgaccccgacgtcatttgtgtccaggaagtgcggatgccggcagctggttccaaaggggcacctaaaaaccccagtgaactaaaagatgacacaagcttgtcacgggatgaaaagcaggtagttctacgtgctttgtcagcttcacctttcaaagactaccgtgtctggtggtctctttcagattcaaaatatgctgggacagctatgtttataaagaaaaagtttgagcctaagaaggtgtctttcaacttggatagaacatcttctaagcatgaagccgatgggcgtgttataattgcggaatttgaatcattccttttactgaacacttattctccaaacaatggatggaaggaggaggaaaatgcatttcaaagaagacgtaagtgggacaagaggatgctagaatttgttcaacacgtggataaacccttaatctggtgtggggacttgaatgtcagtcatgaagaaatcgacgtcagccatcctgatttctttagcagcgctaagctgaatggatacaccccacccaataaagaggactgtggacagccaggattcaccccagcagagagacggcgttttggcaacatattattccaaggaaagctggtagatgcttacaggcacctgcacaaagaaaaggacatagacggtggcttctcttggtccggtcatccaattggcaagtaccgaggaaagagaatgaggatcgactacttccttgtttcggaacagttaaaggacagaatagtttcatgtgaaatgcatggccgtggcattgaattggatggattttatggaagtgaccactgccctgtttcgcttgagctttccgaagctgtagcagaagaagcaccaggacagcccaagccatccatctaaatataccaccatggtggtcattgttgagacatttccggtccttcattaaacctgactgttccatgcattgcctactctaggtagctgaggtttgattgtaggtattattatgatcccagtaggttaccagttcctgtggtcagggctggtatagtttagggatcattgccatttaagcagtgcaatttggacatctcattctgcttgaaatgttgtttgtctaagagcagccatggactacctaatacctcatggggatcgaagagattaatcccttcgtatccaattttaactagcaagggatttaatccacccctaacaagcacaataaaatcttgttcgttttttctaccaca

SEQ ID NO: 16541 - protein, 373 aa, Zea mays subsp. mays
  peptide (1)..(373): Ceres Seq. ID no. 15180810
  misc_feature (118)..(357): Pfam Name: Endonuclease/Exonuclease/phosphatase family Pfam Description: Endonuclease/Exonuclease/phosphatase family
  misc_feature (101)..(357): Homolog of NCBI NO: 23957727 NR Description: AP endonuclease (DNA-(apurinic or apyrimidinic
  misc_feature (54)..(102): Homolog of NCBI NO: 23490314 NR Description: putative AP endonuclease-related [Plasmodium
  misc_feature (120)..(359): Homolog of NCBI NO: 23490314 NR Description: putative AP endonuclease-related [Plasmodium
  misc_feature (295)..(368): Homolog of NCBI NO: 14578320 NR Description: PV1H14200_P [Plasmodium vivax]
  misc_feature (1)..(290): Homolog of NCBI NO: 14578320 NR Description: PV1H14200_P [Plasmodium vivax]
  misc_feature (1)..(118): Homolog of NCBI NO: 18408629 NR Description: endonuclease/exonuclease/phosphatase family
  misc_feature (107)..(368): Homolog of NCBI NO: 18408629 NR Description: endonuclease/exonuclease/phosphatase family
  misc_feature (1)..(368): Homolog of NCBI NO: 7487536 NR Description: hypothetical protein T29H11.60 - Arabidopsis
  misc_feature (1)..(89): Homolog of NCBI NO: 18481705 NR Description: putative T29H11.60 protein [Sorghum bicolor]
  misc_feature (118)..(371): Homolog of NCBI NO: 18481705 NR Description: putative T29H11.60 protein [Sorghum bicolor]
MKRFFQPVPKDGSPSKKRLAGAAEPGDGPTSAGAATGAGGDVEGRPTEEPFKFLTWNANSLLLRMKSDWPAFSQLVARLDPDVICVQEVRMPAAGSKGAPKNPSELKDDTSLSRDEKQVVLRALSASPFKDYRVWWSLSDSKYAGTAMFIKKKFEPKKVSFNLDRTSSKHEADGRVIIAEFESFLLLNTYSPNNGWKEEENAFQRRRKWDKRMLEFVQHVDKPLIWCGDLNVSHEEIDVSHPDFFSSAKLNGYTPPNKEDCGQPGFTPAERRRFGNILFQGKLVDAYRHLHKEKDIDGGFSWSGHPIGKYRGKRMRIDYFLVSEQLKDRIVSCEMHGRGIELDGFYGSDHCPVSLELSEAVAEEAPGQPKPSI

SEQ ID NO: 16542 - protein, 309 aa, Zea mays subsp. mays
  peptide (1)..(309): Ceres Seq. ID no. 15180811
  misc_feature (54)..(293): Pfam Name: Endonuclease/Exonuclease/phosphatase family Pfam Description: Endonuclease/Exonuclease/phosphatase family
  misc_feature (37)..(293): Homolog of NCBI NO: 23957727 NR Description: AP endonuclease (DNA-(apurinic or apyrimidinic
  misc_feature (1)..(38): Homolog of NCBI NO: 23490314 NR Description: putative AP endonuclease-related [Plasmodium
  misc_feature (56)..(295): Homolog of NCBI NO: 23490314 NR Description: putative AP endonuclease-related [Plasmodium
  misc_feature (231)..(304): Homolog of NCBI NO: 14578320 NR Description: PV1H14200_P [Plasmodium vivax]
  misc_feature (1)..(226): Homolog of NCBI NO: 14578320 NR Description: PV1H14200_P [Plasmodium vivax]
  misc_feature (1)..(54): Homolog of NCBI NO: 18408629 NR Description: endonuclease/exonuclease/phosphatase family
  misc_feature (43)..(304): Homolog of NCBI NO: 18408629 NR Description: endonuclease/exonuclease/phosphatase family
  misc_feature (1)..(304): Homolog of NCBI NO: 7487536 NR Description: hypothetical protein T29H11.60 - Arabidopsis
  misc_feature (1)..(25): Homolog of NCBI NO: 18481705 NR Description: putative T29H11.60 protein [Sorghum bicolor]
  misc_feature (54)..(307): Homolog of NCBI NO: 18481705 NR Description: putative T29H11.60 protein [Sorghum bicolor]
MKSDWPAFSQLVARLDPDVICVQEVRMPAAGSKGAPKNPSELKDDTSLSRDEKQVVLRALSASPFKDYRVWWSLSDSKYAGTAMFIKKKFEPKKVSFNLDRTSSKHEADGRVIIAEFESFLLLNTYSPNNGWKEEENAFQRRRKWDKRMLEFVQHVDKPLIWCGDLNVSHEEIDVSHPDFFSSAKLNGYTPPNKEDCGQPGFTPAERRRFGNILFQGKLVDAYRHLHKEKDIDGGFSWSGHPIGKYRGKRMRIDYFLVSEQLKDRIVSCEMHGRGIELDGFYGSDHCPVSLELSEAVAEEAPGQPKPSI

SEQ ID NO: 16543 - protein, 283 aa, Zea mays subsp. mays
  peptide (1)..(283): Ceres Seq. ID no. 15180812
  misc_feature (28)..(267): Pfam Name: Endonuclease/Exonuclease/phosphatase family Pfam Description: Endonuclease/Exonuclease/phosphatase family
  misc_feature (1)..(204): Homolog of NCBI NO: 23957727 NR Description: AP endonuclease (DNA-(apurinic or apyrimidinic
  misc_feature (11)..(267): Homolog of NCBI NO: 23957727 NR Description: AP endonuclease (DNA-(apurinic or apyrimidinic
  misc_feature (1)..(12): Homolog of NCBI NO: 23490314 NR Description: putative AP endonuclease-related [Plasmodium
  misc_feature (30)..(269): Homolog of NCBI NO: 23490314 NR Description: putative AP endonuclease-related [Plasmodium
  misc_feature (205)..(278): Homolog of NCBI NO: 14578320 NR Description: PV1H14200_P [Plasmodium vivax]
  misc_feature (1)..(200): Homolog of NCBI NO: 14578320 NR Description: PV1H14200_P [Plasmodium vivax]
  misc_feature (1)..(28): Homolog of NCBI NO: 18408629 NR Description: endonuclease/exonuclease/phosphatase family
  misc_feature (17)..(278): Homolog of NCBI NO: 18408629 NR Description: endonuclease/exonuclease/phosphatase family
  misc_feature (1)..(278): Homolog of NCBI NO: 7487536 NR Description: hypothetical protein T29H11.60 - Arabidopsis
  misc_feature (28)..(281): Homolog of NCBI NO: 18481705 NR Description: putative T29H11.60 protein [Sorghum bicolor]
MPAAGSKGAPKNPSELKDDTSLSRDEKQVVLRALSASPFKDYRVWWSLSDSKYAGTAMFIKKKFEPKKVSFNLDRTSSKHEADGRVIIAEFESFLLLNTYSPNNGWKEEENAFQRRRKWDKRMLEFVQHVDKPLIWCGDLNVSHEEIDVSHPDFFSSAKLNGYTPPNKEDCGQPGFTPAERRRFGNILFQGKLVDAYRHLHKEKDIDGGFSWSGHPIGKYRGKRMRIDYFLVSEQLKDRIVSCEMHGRGIELDGFYGSDHCPVSLELSEAVAEEAPGQPKPSI

SEQ ID NO: 16544 - DNA, 1709 bp, Zea mays subsp. mays
  misc_feature (1)..(1709): Ceres Seq. ID no. 12372989
  misc_feature: MA Experiment ID: 108543 Result: Down-regulated in Transcription
  misc_feature: MA Experiment ID: 20000478 Result: Up-regulated in Transcription
  misc_feature: MA Experiment 20000478 PARAMETER Experiment Name: Zm_5mM_SA_P Parameter: Age (day) Value: 11
  misc_feature: MA Experiment 20000478 PARAMETER Experiment Name: Zm_5mM_SA_P Parameter: Organism Value: Zea mays
  misc_feature: MA Experiment 20000478 PARAMETER Experiment Name: Zm_5mM_SA_P Parameter: Plant Line Value: 35A19
  misc_feature: MA Experiment 20000478 PARAMETER Experiment Name: Zm_5mM_SA_P Parameter: Timepoint (hr) Value: 72
  misc_feature: MA Experiment 20000478 PARAMETER Experiment Name: Zm_5mM_SA_P Parameter: Tissue Value: Aerial
  misc_feature: MA Experiment 20000478 PARAMETER Experiment Name: Zm_5mM_SA_P Parameter: Treatment Value: 5mM SA vs. No Treatment
  misc_feature: MA Experiment ID: 20000480 Result: Up-regulated in Transcription
  misc_feature: MA Experiment 20000480 PARAMETER Experiment Name: Zm_Drought_P Parameter: Age (day) Value: 11
  misc_feature: MA Experiment 20000480 PARAMETER Experiment Name: Zm_Drought_P Parameter: Organism Value: Zea mays
  misc_feature: MA Experiment 20000480 PARAMETER Experiment Name: Zm_Drought_P Parameter: Plant Line Value: 35A19
  misc_feature: MA Experiment 20000480 PARAMETER Experiment Name: Zm_Drought_P Parameter: Timepoint (hr) Value: 72
  misc_feature: MA Experiment 20000480 PARAMETER Experiment Name: Zm_Drought_P Parameter: Tissue Value: Aerial
  misc_feature: MA Experiment 20000480 PARAMETER Experiment Name: Zm_Drought_P Parameter: Treatment Value: Drought vs. No Drought
gctcgctcgctcgctctcctccgctcgattccagtggccctgctcccctcgtcgtccctctcccgagcgagagcagcaccggcagttcggacaggagctgaagccttggaggagtaaaggtgtggtcttgccatggagcagccgcagcagcacaagggaggagcggttccggcgcctgcagcggcggccgcgaacggggccggggccggggccgcggagctgatcgggtacgtcgacgtgcacgtgcgtagcgcgcgggacatccagaacatctgcatctaccacaagcaggacgtgtacgcgcggctctcgctgccgggagacggcgcgccggcggcgtccacgcaggtggtcaacggcgggggccgcaacccggtgttcgaccagtcgctgcgcctcggcgtgcgcgcgggggacgtcgacgccgcgctccgctgcgaggtgtggatgctcagccgggtcaagaactacctgcaggaccagctgctgggcttcgcgctcgtgccgctcccggaggtcgtcgccgccgacggcggcacgctcgcccgcgacttcccgctcaccaccagcgacctcttccagaccccctcgggcttcctgcagctcgagctctcctacatcggggtcgtgccggaggtcgtgcccatctcgccgacgcccaagccggcgctggccgacccggacgaggaggagccggggaacaacgccgccgacggcgtcgggaacgggaaggagtacgagaagatcgagttcccggacctgaatctcgtggaggagaaccagatcatggtctccgagtacaccaggctgccgtgcgcggccgtggaaacgcagagctgcgacagcctcctgacctcggagcacgatgacggcgccacggccctgagccgggacgccgccgtgcgcctcgtggagagcttctcgacggacaacagcaccgccgactcggtgggcgccttccagagcgacacgccggttagcagcgtgtctaccacggagttcccggccacccctcagtctaactccagctcggagccgtccgggaacgcccactcgtcggcttaccacaaggcgaaggcggcgtcggagaccgccgacgcggaggtcgactcgtcccgcaccgtccaggaggtcgcggcggcgaactcgccctgcgccgcgtcggaggctgccgtgcacaagccggtgatcagcgtcaacatcgagcaggaggtgaaggtggacgggaaccaaatcatggacatgtacatgaagagtatgcagcaattcacggattccctggccaaaatgaagcttccagccttggacatagacaacggtagcagcgggatgagcagtcccgcagcagccacacccagcgcagactccactggtgccgactcgaccgcggtgaagaagccgaccgccgccgggcagcaggagaagccctctcccaaggtgttctacggcagccgggcgttcttctgatctccggttcgctgatcagcggtagcacaccgctccagccgccgagtaacgaagcaaagagacggcatttgcagtcgtctcagctgaatcttactagcgcagaggaataacaccttctcaggctcttgttctaggtttgtcagatcggggatgagttactgtcttaatgtatccgtcagtacttatgaaaaatggtttggtttctctgttttagtaatgatatttagatccttttttctgtt

SEQ ID NO: 16545 - protein, 444 aa, Zea mays subsp. mays
  peptide (1)..(444): Ceres Seq. ID no. 12372990
  misc_feature (34)..(123): Pfam Name: C2 domain Pfam Description: C2 domain
  misc_feature (26)..(333): Homolog of NCBI NO: 9758185 NR Description: gene_id:MTE17.25~pir||T07080~similar to unknown
  misc_feature (26)..(333): Homolog of NCBI NO: 28393796 NR Description: unknown protein [Arabidopsis thaliana]
  misc_feature (31)..(309): Homolog of NCBI NO: 24414275 NR Description: Unknown protein [Oryza sativa (japonica
  misc_feature (275)..(413): Homolog of NCBI NO: 25405379 NR Description: unknown protein [imported] - Arabidopsis thaliana
  misc_feature (31)..(187): Homolog of NCBI NO: 25405379 NR Description: unknown protein [imported] - Arabidopsis thaliana
  misc_feature (275)..(413): Homolog of NCBI NO: 21593485 NR Description: unknown [Arabidopsis thaliana]
  misc_feature (31)..(187): Homolog of NCBI NO: 21593485 NR Description: unknown [Arabidopsis thaliana]
  misc_feature (275)..(413): Homolog of NCBI NO: 18403117 NR Description: Expressed protein
  misc_feature (31)..(187): Homolog of NCBI NO: 18403117 NR Description: Expressed protein
  misc_feature (3)..(444): Homolog of NCBI NO: 34901084 NR Description: contains ESTs
MEQPQQHKGGAVPAPAAAAANGAGAGAAELIGYVDVHVRSARDIQNICIYHKQDVYARLSLPGDGAPAASTQVVNGGGRNPVFDQSLRLGVRAGDVDAALRCEVWMLSRVKNYLQDQLLGFALVPLPEVVAADGGTLARDFPLTTSDLFQTPSGFLQLELSYIGVVPEVVPISPTPKPALADPDEEEPGNNAADGVGNGKEYEKIEFPDLNLVEENQIMVSEYTRLPCAAVETQSCDSLLTSEHDDGATALSRDAAVRLVESFSTDNSTADSVGAFQSDTPVSSVSTTEFPATPQSNSSSEPSGNAHSSAYHKAKAASETADAEVDSSRTVQEVAAANSPCAASEAAVHKPVISVNIEQEVKVDGNQIMDMYMKSMQQFTDSLAKMKLPALDIDNGSSGMSSPAAATPSADSTGADSTAVKKPTAAGQQEKPSPKVFYGSRAFF

SEQ ID NO: 16546 - protein, 339 aa, Zea mays subsp. mays
  peptide (1)..(339): Ceres Seq. ID no. 12372991
  misc_feature (1)..(228): Homolog of NCBI NO: 9758185 NR Description: gene_id:MTE17.25~pir||T07080~similar to unknown
  misc_feature (1)..(228): Homolog of NCBI NO: 28393796 NR Description: unknown protein [Arabidopsis thaliana]
  misc_feature (1)..(204): Homolog of NCBI NO: 24414275 NR Description: Unknown protein [Oryza sativa (japonica
  misc_feature (170)..(308): Homolog of NCBI NO: 25405379 NR Description: unknown protein [imported] - Arabidopsis thaliana
  misc_feature (1)..(82): Homolog of NCBI NO: 25405379 NR Description: unknown protein [imported] - Arabidopsis thaliana
  misc_feature (170)..(308): Homolog of NCBI NO: 21593485 NR Description: unknown [Arabidopsis thaliana]
  misc_feature (1)..(82): Homolog of NCBI NO: 21593485 NR Description: unknown [Arabidopsis thaliana]
  misc_feature (170)..(308): Homolog of NCBI NO: 18403117 NR Description: Expressed protein
  misc_feature (1)..(82): Homolog of NCBI NO: 18403117 NR Description: Expressed protein
  misc_feature (1)..(339): Homolog of NCBI NO: 34901084 NR Description: contains ESTs
MLSRVKNYLQDQLLGFALVPLPEVVAADGGTLARDFPLTTSDLFQTPSGFLQLELSYIGVVPEVVPISPTPKPALADPDEEEPGNNAADGVGNGKEYEKIEFPDLNLVEENQIMVSEYTRLPCAAVETQSCDSLLTSEHDDGATALSRDAAVRLVESFSTDNSTADSVGAFQSDTPVSSVSTTEFPATPQSNSSSEPSGNAHSSAYHKAKAASETADAEVDSSRTVQEVAAANSPCAASEAAVHKPVISVNIEQEVKVDGNQIMDMYMKSMQQFTDSLAKMKLPALDIDNGSSGMSSPAAATPSADSTGADSTAVKKPTAAGQQEKPSPKVFYGSRAFF

SEQ ID NO: 16547 - protein, 226 aa, Zea mays subsp. mays
  peptide (1)..(226): Ceres Seq. ID no. 12372992
  misc_feature (1)..(115): Homolog of NCBI NO: 34906644 NR Description: P0431G06.18 [Oryza sativa (japonica
  misc_feature (88)..(226): Homolog of NCBI NO: 18416832 NR Description: putative protein; protein id: At5g12300.1
  misc_feature (1)..(115): Homolog of NCBI NO: 30696612 NR Description: C2 domain-containing protein [Arabidopsis
  misc_feature (1)..(115): Homolog of NCBI NO: 9758185 NR Description: gene_id:MTE17.25~pir||T07080~similar to unknown
  misc_feature (1)..(115): Homolog of NCBI NO: 28393796 NR Description: unknown protein [Arabidopsis thaliana]
  misc_feature (1)..(91): Homolog of NCBI NO: 24414275 NR Description: Unknown protein [Oryza sativa (japonica
  misc_feature (57)..(195): Homolog of NCBI NO: 25405379 NR Description: unknown protein [imported] - Arabidopsis thaliana
  misc_feature (57)..(195): Homolog of NCBI NO: 21593485 NR Description: unknown [Arabidopsis thaliana]
  misc_feature (57)..(195): Homolog of NCBI NO: 18403117 NR Description: Expressed protein
  misc_feature (1)..(226): Homolog of NCBI NO: 34901084 NR Description: contains ESTs
MVSEYTRLPCAAVETQSCDSLLTSEHDDGATALSRDAAVRLVESFSTDNSTADSVGAFQSDTPVSSVSTTEFPATPQSNSSSEPSGNAHSSAYHKAKAASETADAEVDSSRTVQEVAAANSPCAASEAAVHKPVISVNIEQEVKVDGNQIMDMYMKSMQQFTDSLAKMKLPALDIDNGSSGMSSPAAATPSADSTGADSTAVKKPTAAGQQEKPSPKVFYGSRAFF

SEQ ID NO: 16548 - DNA, 1157 bp, Zea mays subsp. mays
  misc_feature (1)..(1157): Ceres Seq. ID no. 12353179
  misc_feature: MA Experiment ID: 108529 Result: Up-regulated in Transcription
  misc_feature: MA Experiment 108529 PARAMETER Experiment Name: Zm_Imbibed_Seeds_P Parameter: Age (day) Value: 5 vs. 2
  misc_feature: MA Experiment 108529 PARAMETER Experiment Name: Zm_Imbibed_Seeds_P Parameter: Organism Value: Zea mays
  misc_feature: MA Experiment 108529 PARAMETER Experiment Name: Zm_Imbibed_Seeds_P Parameter: Plant Line Value: 35A19
  misc_feature: MA Experiment 108529 PARAMETER Experiment Name: Zm_Imbibed_Seeds_P Parameter: Tissue Value: Roots vs. Embryo
  misc_feature: MA Experiment ID: 108535 Result: Down-regulated in Transcription
  misc_feature: MA Experiment 108535 PARAMETER Experiment Name: Zm_Meristem_P Parameter: Age (day) Value: 8
  misc_feature: MA Experiment 108535 PARAMETER Experiment Name: Zm_Meristem_P Parameter: Organism Value: Zea mays
  misc_feature: MA Experiment 108535 PARAMETER Experiment Name: Zm_Meristem_P Parameter: Plant Line Value: 35A19
  misc_feature: MA Experiment 108535 PARAMETER Experiment Name: Zm_Meristem_P Parameter: Tissue Value: Root Meristem vs. Above Root Meristem
  misc_feature: MA Experiment ID: 108546 Result: Up-regulated in Transcription
  misc_feature: MA Experiment 108546 PARAMETER Experiment Name: Zm_Imbibed_Seeds_P Parameter: Age (day) Value: 3 vs. 2
  misc_feature: MA Experiment 108546 PARAMETER Experiment Name: Zm_Imbibed_Seeds_P Parameter: Organism Value: Zea mays
  misc_feature: MA Experiment 108546 PARAMETER Experiment Name: Zm_Imbibed_Seeds_P Parameter: Plant Line Value: 35A19
  misc_feature: MA Experiment 108546 PARAMETER Experiment Name: Zm_Imbibed_Seeds_P Parameter: Tissue Value: Roots vs. Embryo
  misc_feature: MA Experiment ID: 20000477 Result: Up-regulated in Transcription
  misc_feature: MA Experiment 20000477 PARAMETER Experiment Name: Zm_5mM_SA_P Parameter: Age (day) Value: 10
  misc_feature: MA Experiment 20000477 PARAMETER Experiment Name: Zm_5mM_SA_P Parameter: Organism Value: Zea mays
  misc_feature: MA Experiment 20000477 PARAMETER Experiment Name: Zm_5mM_SA_P Parameter: Plant Line Value: 35A19
  misc_feature: MA Experiment 20000477 PARAMETER Experiment Name: Zm_5mM_SA_P Parameter: Timepoint (hr) Value: 48
  misc_feature: MA Experiment 20000477 PARAMETER Experiment Name: Zm_5mM_SA_P Parameter: Tissue Value: Aerial
  misc_feature: MA Experiment 20000477 PARAMETER Experiment Name: Zm_5mM_SA_P Parameter: Treatment Value: 5mM SA vs. No Treatment
  misc_feature: MA Experiment ID: 20000534 Result: Down-regulated in Transcription
  misc_feature: MA Experiment 20000534 PARAMETER Experiment Name: Zm_Hybrid_Pollen_P Parameter: Age (day) Value: 8
  misc_feature: MA Experiment 20000534 PARAMETER Experiment Name: Zm_Hybrid_Pollen_P Parameter: Organism Value: Zea mays
  misc_feature: MA Experiment 20000534 PARAMETER Experiment Name: Zm_Hybrid_Pollen_P Parameter: Plant Line Value: 35A19
  misc_feature: MA Experiment 20000534 PARAMETER Experiment Name: Zm_Hybrid_Pollen_P Parameter: Tissue Value: Pollen vs. Aerial
  misc_feature: MA Experiment ID: 20000535 Result: Down-regulated in Transcription
  misc_feature: MA Experiment 20000535 PARAMETER Experiment Name: Zm_Hybrid_Seed_Dev_P Parameter: DAP Value: 30 vs. 12
  misc_feature: MA Experiment 20000535 PARAMETER Experiment Name: Zm_Hybrid_Seed_Dev_P Parameter: Organism Value: Zea mays
  misc_feature: MA Experiment 20000535 PARAMETER Experiment Name: Zm_Hybrid_Seed_Dev_P Parameter: Plant Line Value: 35A19
  misc_feature: MA Experiment 20000535 PARAMETER Experiment Name: Zm_Hybrid_Seed_Dev_P Parameter: Tissue Value: Embryo vs. Unfert Floret
ctctctctagtccagatttccagcggtccagaccgagagctcggctccctacacgacatcatcatggacgccgccccgctcctcgctctcctcctcgcggccgtgtccctctccgcggcggcggcgggcgacggcgcgcacccgggctactccgacgagggcacctgcacggtggacgccgccggagcgggcgtgggctcgggcccggagctgcggcgcctggaggagcgccggcccgggcgcatcatcgacatcacgcacgcgtacgtgccggaccttctggcgttcgcgccgggggctgtcacggggcccttggtccacctcaaggagtccatggcgaacgggtccgagtacaacctgtcggagctgcggttggagtgccacatgggcacccacgtcgacgcgccaggccacatgaaccaaggccacttcgccgccggcctcgacgtggacacgctcgacctcgacgtcctcaactgacctgcgttgctggttgatgttccgagggacacaaatataacagctgaagcgatggaattcctgaatatccctagaggagttcgccgagttctattcaggacgctgaacactgacaggaagttgatgtggaggaagggaggtgacatgagctatgttgggtttacagaggatggcgcacagtggctagttgacaacactgacataaagctagtcggaatcgacagtctatcggttgcagcatttgagcacttgatctctgcccatgtggtcttcttcaagaccccggatataatccctgtcgaaggcctgaagctagacaacattgagacgggaatatacatgctgcattgtttacctctcagactggttggagccgagggtgcaccgaccagatgcatcctcatcaagtgatcacccccctgctcttgctggaggtgacattgtatcatgccagctgagctgatgcttcatcgtggccaacgcattgattcgcagtcttcgtcttcgtctatatgaaacatagtgttgtatgcccatgtagatatgcttgtacggacaatagagacacagcaatacttccatcaaggaaatacttttgggtaagccggtaatgtaaaagacagacatacagttgactgaataaactagaggcctgagaggctgaggcctcgtgcttc

SEQ ID NO: 16549 - protein, 164 aa, Zea mays subsp. mays
  peptide (1)..(164): Ceres Seq. ID no. 12353180
LSSPDFQRSRPRARLPTRHHHGRRPAPRSPPRGRVPLRGGGGRRRAPGLLRRGHLHGGRRRSGRGLGPGAAAPGGAPARAHHRHHARVRAGPSGVRAGGCHGALGPPQGVHGERVRVQPVGAAVGVPHGHPRRRARPHEPRPLRRRPRRGHARPRRPQLTCVAG

SEQ ID NO: 16550 - protein, 159 aa, Zea mays subsp. mays
  peptide (1)..(159): Ceres Seq. ID no. 12353181
  misc_feature (82)..(159): Pfam Name: Putative cyclase Pfam Description: Putative cyclase
  misc_feature (24)..(159): Homolog of NCBI NO: 7486023 NR Description: hypothetical protein F23E12.220 - Arabidopsis
  misc_feature (82)..(159): Homolog of NCBI NO: 23056289 NR Description: hypothetical protein [Geobacter metallireducens]
  misc_feature (82)..(159): Homolog of NCBI NO: 16330650 NR Description: hypothetical protein [Synechocystis sp. PCC 6803]
  misc_feature (81)..(159): Homolog of NCBI NO: 39998438 NR Description: cyclase, putative [Geobacter sulfurreducens PCA]
  misc_feature (81)..(159): Homolog of NCBI NO: 23016903 NR Description: hypothetical protein [Magnetospirillum
  misc_feature (69)..(159): Homolog of NCBI NO: 7486287 NR Description: hypothetical protein F28A23.60 - Arabidopsis
  misc_feature (81)..(159): Homolog of NCBI NO: 15219416 NR Description: hypothetical protein; protein id: At1g44542.1
  misc_feature (69)..(159): Homolog of NCBI NO: 18418393 NR Description: putative protein
  misc_feature (24)..(159): Homolog of NCBI NO: 18418598 NR Description: putative protein
  misc_feature (25)..(159): Homolog of NCBI NO: 35215089 NR Description: hypothetical protein [Oryza sativa (japonica
LSLVQISSGPDRELGSLHDIIMDAAPLLALLLAAVSLSAAAAGDGAHPGYSDEGTCTVDAAGAGVGSGPELRRLEERRPGRIIDITHAYVPDLLAFAPGAVTGPLVHLKESMANGSEYNLSELRLECHMGTHVDAPGHMNQGHFAAGLDVDTLDLDVLN

SEQ ID NO: 16551 - protein, 138 aa, Zea mays subsp. mays
  peptide (1)..(138): Ceres Seq. ID no. 12353182
  misc_feature (61)..(138): Pfam Name: Putative cyclase Pfam Description: Putative cyclase
  misc_feature (3)..(138): Homolog of NCBI NO: 7486023 NR Description: hypothetical protein F23E12.220 - Arabidopsis
  misc_feature (61)..(138): Homolog of NCBI NO: 23056289 NR Description: hypothetical protein [Geobacter metallireducens]
  misc_feature (61)..(138): Homolog of NCBI NO: 16330650 NR Description: hypothetical protein [Synechocystis sp. PCC 6803]
  misc_feature (60)..(138): Homolog of NCBI NO: 39998438 NR Description: cyclase, putative [Geobacter sulfurreducens PCA]
  misc_feature (60)..(138): Homolog of NCBI NO: 23016903 NR Description: hypothetical protein [Magnetospirillum
  misc_feature (48)..(138): Homolog of NCBI NO: 7486287 NR Description: hypothetical protein F28A23.60 - Arabidopsis
  misc_feature (60)..(138): Homolog of NCBI NO: 15219416 NR Description: hypothetical protein; protein id: At1g44542.1
  misc_feature (48)..(138): Homolog of NCBI NO: 18418393 NR Description: putative protein
  misc_feature (3)..(138): Homolog of NCBI NO: 18418598 NR Description: putative protein
  misc_feature (4)..(138): Homolog of NCBI NO: 35215089 NR Description: hypothetical protein [Oryza sativa (japonica
MDAAPLLALLLAAVSLSAAAAGDGAHPGYSDEGTCTVDAAGAGVGSGPELRRLEERRPGRIIDITHAYVPDLLAFAPGAVTGPLVHLKESMANGSEYNLSELRLECHMGTHVDAPGHMNQGHFAAGLDVDTLDLDVLN

SEQ ID NO: 16552 - DNA, 1522 bp, Zea mays subsp. mays
  misc_feature (1)..(1522): Ceres Seq. ID no. 12372985
  misc_feature: MA Experiment ID: 108522 Result: Down-regulated in Transcription
  misc_feature: MA Experiment 108522 PARAMETER Experiment Name: Zm_42deg_Heat_P Parameter: Age (day) Value: 8
  misc_feature: MA Experiment 108522 PARAMETER Experiment Name: Zm_42deg_Heat_P Parameter: Organism Value: Zea mays
  misc_feature: MA Experiment 108522 PARAMETER Experiment Name: Zm_42deg_Heat_P Parameter: Plant Line Value: 35A19
  misc_feature: MA Experiment 108522 PARAMETER Experiment Name: Zm_42deg_Heat_P Parameter: Temperature (deg C) Value: 42 vs. 22
  misc_feature: MA Experiment 108522 PARAMETER Experiment Name: Zm_42deg_Heat_P Parameter: Timepoint (hr) Value: 1
  misc_feature: MA Experiment 108522 PARAMETER Experiment Name: Zm_42deg_Heat_P Parameter: Tissue Value: Aerial
  misc_feature: MA Experiment ID: 108528 Result: Up-regulated in Transcription
  misc_feature: MA Experiment 108528 PARAMETER Experiment Name: Zm_Imbibed_Seeds_P Parameter: Age (day) Value: 5 vs. 2
  misc_feature: MA Experiment 108528 PARAMETER Experiment Name: Zm_Imbibed_Seeds_P Parameter: Organism Value: Zea mays
  misc_feature: MA Experiment 108528 PARAMETER Experiment Name: Zm_Imbibed_Seeds_P Parameter: Plant Line Value: 35A19
  misc_feature: MA Experiment 108528 PARAMETER Experiment Name: Zm_Imbibed_Seeds_P Parameter: Tissue Value: Aerial vs. Embryo
  misc_feature: MA Experiment ID: 108529 Result: Up-regulated in Transcription
  misc_feature: MA Experiment 108529 PARAMETER Experiment Name: Zm_Imbibed_Seeds_P Parameter: Age (day) Value: 5 vs. 2
  misc_feature: MA Experiment 108529 PARAMETER Experiment Name: Zm_Imbibed_Seeds_P Parameter: Organism Value: Zea mays
  misc_feature: MA Experiment 108529 PARAMETER Experiment Name: Zm_Imbibed_Seeds_P Parameter: Plant Line Value: 35A19
  misc_feature: MA Experiment 108529 PARAMETER Experiment Name: Zm_Imbibed_Seeds_P Parameter: Tissue Value: Roots vs. Embryo
  misc_feature: MA Experiment ID: 108530 Result: Up-regulated in Transcription
  misc_feature: MA Experiment 108530 PARAMETER Experiment Name: Zm_Imbibed_Seeds_P Parameter: Age (day) Value: 6 vs. 2
  misc_feature: MA Experiment 108530 PARAMETER Experiment Name: Zm_Imbibed_Seeds_P Parameter: Organism Value: Zea mays
  misc_feature: MA Experiment 108530 PARAMETER Experiment Name: Zm_Imbibed_Seeds_P Parameter: Plant Line Value: 35A19
  misc_feature: MA Experiment 108530 PARAMETER Experiment Name: Zm_Imbibed_Seeds_P Parameter: Tissue Value: Aerial vs. Embryo
  misc_feature: MA Experiment ID: 108535 Result: Down-regulated in Transcription
  misc_feature: MA Experiment 108535 PARAMETER Experiment Name: Zm_Meristem_P Parameter: Age (day) Value: 8
  misc_feature: MA Experiment 108535 PARAMETER Experiment Name: Zm_Meristem_P Parameter: Organism Value: Zea mays
  misc_feature: MA Experiment 108535 PARAMETER Experiment Name: Zm_Meristem_P Parameter: Plant Line Value: 35A19
  misc_feature: MA Experiment 108535 PARAMETER Experiment Name: Zm_Meristem_P Parameter: Tissue Value: Root Meristem vs. Above Root Meristem
  misc_feature: MA Experiment ID: 108543 Result: Up-regulated in Transcription
  misc_feature: MA Experiment ID: 108545 Result: Up-regulated in Transcription
  misc_feature: MA Experiment 108545 PARAMETER Experiment Name: Zm_Imbibed_Seeds_P Parameter: Age (day) Value: 3 vs. 2
  misc_feature: MA Experiment 108545 PARAMETER Experiment Name: Zm_Imbibed_Seeds_P Parameter: Organism Value: Zea mays
  misc_feature: MA Experiment 108545 PARAMETER Experiment Name: Zm_Imbibed_Seeds_P Parameter: Plant Line Value: 35A19
  misc_feature: MA Experiment 108545 PARAMETER Experiment Name: Zm_Imbibed_Seeds_P Parameter: Tissue Value: Aerial vs. Embryo
  misc_feature: MA Experiment ID: 108546 Result: Up-regulated in Transcription
  misc_feature: MA Experiment 108546 PARAMETER Experiment Name: Zm_Imbibed_Seeds_P Parameter: Age (day) Value: 3 vs. 2
  misc_feature: MA Experiment 108546 PARAMETER Experiment Name: Zm_Imbibed_Seeds_P Parameter: Organism Value: Zea mays
  misc_feature: MA Experiment 108546 PARAMETER Experiment Name: Zm_Imbibed_Seeds_P Parameter: Plant Line Value: 35A19
  misc_feature: MA Experiment 108546 PARAMETER Experiment Name: Zm_Imbibed_Seeds_P Parameter: Tissue Value: Roots vs. Embryo
  misc_feature: MA Experiment ID: 108547 Result: Up-regulated in Transcription
  misc_feature: MA Experiment 108547 PARAMETER Experiment Name: Zm_Imbibed_Seeds_P Parameter: Age (day) Value: 4 vs. 2
  misc_feature: MA Experiment 108547 PARAMETER Experiment Name: Zm_Imbibed_Seeds_P Parameter: Organism Value: Zea mays
  misc_feature: MA Experiment 108547 PARAMETER Experiment Name: Zm_Imbibed_Seeds_P Parameter: Plant Line Value: 35A19
  misc_feature: MA Experiment 108547 PARAMETER Experiment Name: Zm_Imbibed_Seeds_P Parameter: Tissue Value: Aerial vs. Embryo
  misc_feature: MA Experiment ID: 108556 Result: Up-regulated in Transcription
  misc_feature: MA Experiment 108556 PARAMETER Experiment Name: Zm_Drought_P Parameter: Age (day) Value: 9
  misc_feature: MA Experiment 108556 PARAMETER Experiment Name: Zm_Drought_P Parameter: Organism Value: Zea mays
  misc_feature: MA Experiment 108556 PARAMETER Experiment Name: Zm_Drought_P Parameter: Plant Line Value: 35A19
  misc_feature: MA Experiment 108556 PARAMETER Experiment Name: Zm_Drought_P Parameter: Timepoint (hr) Value: 24
  misc_feature: MA Experiment 108556 PARAMETER Experiment Name: Zm_Drought_P Parameter: Tissue Value: Aerial
  misc_feature: MA Experiment 108556 PARAMETER Experiment Name: Zm_Drought_P Parameter: Treatment Value: Drought vs. No Drought
  misc_feature: MA Experiment ID: 108559 Result: Down-regulated in Transcription
  misc_feature: MA Experiment 108559 PARAMETER Experiment Name: Zm_5mM_NO_P Parameter: Age (day) Value: 8
  misc_feature: MA Experiment 108559 PARAMETER Experiment Name: Zm_5mM_NO_P Parameter: Organism Value: Zea mays
  misc_feature: MA Experiment 108559 PARAMETER Experiment Name: Zm_5mM_NO_P Parameter: Plant Line Value: 35A19
  misc_feature: MA Experiment 108559 PARAMETER Experiment Name: Zm_5mM_NO_P Parameter: Timepoint (hr) Value: 12
  misc_feature: MA Experiment 108559 PARAMETER Experiment Name: Zm_5mM_NO_P Parameter: Tissue Value: Aerial
  misc_feature: MA Experiment 108559 PARAMETER Experiment Name: Zm_5mM_NO_P Parameter: Treatment Value: 5mM NO vs. No Treatment
  misc_feature: MA Experiment ID: 20000108 Result: Down-regulated in Transcription
  misc_feature: MA Experiment 20000108 PARAMETER Experiment Name: Zm_Root-Tips_P Parameter: Age (day) Value: 12
  misc_feature: MA Experiment 20000108 PARAMETER Experiment Name: Zm_Root-Tips_P Parameter: Organism Value: Zea mays
  misc_feature: MA Experiment 20000108 PARAMETER Experiment Name: Zm_Root-Tips_P Parameter: Tissue Value: Root tips vs. Root mid region    35
  misc_feature: MA Experiment 20000108 PARAMETER Experiment Name: Zm_Root-Tips_P Parameter: Tissue Value: Root tips vs. Root mid region   Sequence Listing-Misc Features (4)
  misc_feature: MA Experiment ID: 20000478 Result: Down-regulated in Transcription
  misc_feature: MA Experiment 20000478 PARAMETER Experiment Name: Zm_5mM_SA_P Parameter: Age (day) Value: 11
  misc_feature: MA Experiment 20000478 PARAMETER Experiment Name: Zm_5mM_SA_P Parameter: Organism Value: Zea mays
  misc_feature: MA Experiment 20000478 PARAMETER Experiment Name: Zm_5mM_SA_P Parameter: Plant Line Value: 35A19
  misc_feature: MA Experiment 20000478 PARAMETER Experiment Name: Zm_5mM_SA_P Parameter: Timepoint (hr) Value: 72
  misc_feature: MA Experiment 20000478 PARAMETER Experiment Name: Zm_5mM_SA_P Parameter: Tissue Value: Aerial
  misc_feature: MA Experiment 20000478 PARAMETER Experiment Name: Zm_5mM_SA_P Parameter: Treatment Value: 5mM SA vs. No Treatment
  misc_feature: MA Experiment ID: 20000479 Result: Down-regulated in Transcription
  misc_feature: MA Experiment 20000479 PARAMETER Experiment Name: Zm_Drought_P Parameter: Age (day) Value: 10
  misc_feature: MA Experiment 20000479 PARAMETER Experiment Name: Zm_Drought_P Parameter: Organism Value: Zea mays
  misc_feature: MA Experiment 20000479 PARAMETER Experiment Name: Zm_Drought_P Parameter: Plant Line Value: 35A19
  misc_feature: MA Experiment 20000479 PARAMETER Experiment Name: Zm_Drought_P Parameter: Timepoint (hr) Value: 48
  misc_feature: MA Experiment 20000479 PARAMETER Experiment Name: Zm_Drought_P Parameter: Tissue Value: Aerial
  misc_feature: MA Experiment 20000479 PARAMETER Experiment Name: Zm_Drought_P Parameter: Treatment Value: Drought vs. No Drought
  misc_feature: MA Experiment ID: 20000535 Result: Down-regulated in Transcription
  misc_feature: MA Experiment 20000535 PARAMETER Experiment Name: Zm_Hybrid_Seed_Dev_P Parameter: DAP Value: 30 vs. 12
  misc_feature: MA Experiment 20000535 PARAMETER Experiment Name: Zm_Hybrid_Seed_Dev_P Parameter: Organism Value: Zea mays
  misc_feature: MA Experiment 20000535 PARAMETER Experiment Name: Zm_Hybrid_Seed_Dev_P Parameter: Plant Line Value: 35A19
  misc_feature: MA Experiment 20000535 PARAMETER Experiment Name: Zm_Hybrid_Seed_Dev_P Parameter: Tissue Value: Embryo vs. Unfert Floret
  misc_feature: MA Experiment ID: 20001608 Result: Down-regulated in Transcription
  misc_feature: MA Experiment 20001608 PARAMETER Experiment Name: Zm_50ppm_KNO3_L-to-H_P Parameter: Age (day) Value: 21
  misc_feature: MA Experiment 20001608 PARAMETER Experiment Name: Zm_50ppm_KNO3_L-to-H_P Parameter: Organism Value: Zea mays
  misc_feature: MA Experiment 20001608 PARAMETER Experiment Name: Zm_50ppm_KNO3_L-to-H_P Parameter: Plant Line Value: 35A19
  misc_feature: MA Experiment 20001608 PARAMETER Experiment Name: Zm_50ppm_KNO3_L-to-H_P Parameter: Timepoint (hr) Value: 48
  misc_feature: MA Experiment 20001608 PARAMETER Experiment Name: Zm_50ppm_KNO3_L-to-H_P Parameter: Tissue Value: Shoots
  misc_feature: MA Experiment 20001608 PARAMETER Experiment Name: Zm_50ppm_KNO3_L-to-H_P Parameter: Treatment Value: 50ppm KNO3 vs. 50ppm KCl
aacacctttcatcacaaccacaaagacagccagccagccagccatcattgatcatagcatcagcagcttagtataccgtaccgctccacatccgagtgctagaagatcagaagaagcccggcccggccagtacctatagctgcctagcggccggcgcgaacgaagcagagatatggcgagagcgctgccgctggtgctcgcggcgtccgtcctgctggcggccgcgctgctgctgctggccttcgcgccggcgccggccgccgcggtcgacttcggcgcggaggacctggcgtcggaggaggcgctgtgggcgctgtacgagcgctggcgcggccgccacgcgctggcgcgggacctgggcgacaaggcgcgccgcttcaacgtcttcaaggccaacgtgcgcctcatccacgagttcaaccgccgggacgagccctacaagctccgcctcaaccgcttcggcgacatgaccgccgacgagttccgacgccactacgcgggctccagggtcgcgcaccatcgcatgttccgcggcgacaggcagggctcctcggcgtcggcgtcgttcatgtacgccgacgcgcgcgatgtcccggcctccgtcgactggaggcagaagggcgctgtcaccgacgtcaaggaccagggccagtgcggtagctgctgggcgttctcgacgatcgccgccgtggagggcatcaacgcgatcaagaccaagaacctgacgtcgctgtcggagcagcagctggtggactgcgacaccaaggccaacgccggctgcaacgggggcctcatggactacgcgttccagtacatcgccaagcacggcggggtggcggcggaggacgcgtacccgtacagagcgcgccaggcgtcctgcaagaagtcgccggccccggtcgtcaccatcgacggctacgaggacgtgccggccaacgacgagtcggcgctcaagaaggcggtggcgcaccagcccgtgtccgtcgccatcgaggccagcggctcgcacttccagttctactccgagggggtgttctccggcaggtgcgggacggagctggaccacggcgtcacggcggtcggctacggggtcaccgcggacggcaccaagtactggctggtcaagaactcgtggggccccgagtggggcgagaaggggtacatccgcatggcgcgcgacgtggccgccaaggagggacactgcggcatcgccatggaggcatcctaccccgtcaagacctcgcccaaccccaaggtccacgccgtcgtcgacgaggacggctccagccacgacgagctctgaattgcgcactacactactacgtactagctatagcctatatagctatactatgattgatccatgtatgctcggacaggaacatcgccgactgtgaatgtctgaatggcatacgcacatcgtacacctgcattcatgtaataccagtcgagagttgatctaccagcaactttcatttcattcggttattattatattatttaactactgcttcctccgtcc

SEQ ID NO: 16553 - protein, 376 aa, Zea mays subsp. mays
  peptide (1)..(376): Ceres Seq. ID no. 12372986
  misc_feature (140)..(354): Pfam Name: Papain family cysteine protease Pfam Description: Papain family cysteine protease
  misc_feature (13)..(376): Homolog of NCBI NO: 4100157 NR Description: cysteine proteinase precursor [Hordeum vulgare]
  misc_feature (13)..(376): Homolog of NCBI NO: 7435797 NR Description: cysteine proteinase (EC 3.4.22.-) - barley
  misc_feature (13)..(359): Homolog of NCBI NO: 7435817 NR Description: cysteine endopeptidase (EC 3.4.22.-) precursor -
  misc_feature (13)..(360): Homolog of NCBI NO: 18423124 NR Description: cysteine proteinase
  misc_feature (15)..(368): Homolog of NCBI NO: 1173630 NR Description: cysteine proteinase
  misc_feature (12)..(368): Homolog of NCBI NO: 537437 NR Description: cysteine proteinase [Hemerocallis hybrid cultivar]
  misc_feature (13)..(376): Homolog of NCBI NO: 7435798 NR Description: probable cysteine proteinase (EC 3.4.22.-)
  misc_feature (9)..(368): Homolog of NCBI NO: 1169186 NR Description: Thiol protease SEN102 precursor
  misc_feature (15)..(368): Homolog of NCBI NO: 4731374 NR Description: papain-like cysteine protease [Sandersonia
  misc_feature (9)..(361): Homolog of NCBI NO: 40806500 NR Description: putative cysteine protease 2 [Iris hollandica]
MARALPLVLAASVLLAAALLLLAFAPAPAAAVDFGAEDLASEEALWALYERWRGRHALARDLGDKARRFNVFKANVRLIHEFNRRDEPYKLRLNRFGDMTADEFRRHYAGSRVAHHRMFRGDRQGSSASASFMYADARDVPASVDWRQKGAVTDVKDQGQCGSCWAFSTIAAVEGINAIKTKNLTSLSEQQLVDCDTKANAGCNGGLMDYAFQYIAKHGGVAAEDAYPYRARQASCKKSPAPVVTIDGYEDVPANDESALKKAVAHQPVSVAIEASGSHFQFYSEGVFSGRCGTELDHGVTAVGYGVTADGTKYWLVKNSWGPEWGEKGYIRMARDVAAKEGHCGIAMEASYPVKTSPNPKVHAVVDEDGSSHDEL

SEQ ID NO: 16554 - protein, 278 aa, Zea mays subsp. mays
  peptide (1)..(278): Ceres Seq. ID no. 12372987
  misc_feature (42)..(256): Pfam Name: Papain family cysteine protease Pfam Description: Papain family cysteine protease
  misc_feature (1)..(278): Homolog of NCBI NO: 4100157 NR Description: cysteine proteinase precursor [Hordeum vulgare]
  misc_feature (1)..(278): Homolog of NCBI NO: 7435797 NR Description: cysteine proteinase (EC 3.4.22.-) - barley
  misc_feature (1)..(261): Homolog of NCBI NO: 7435817 NR Description: cysteine endopeptidase (EC 3.4.22.-) precursor -
  misc_feature (1)..(262): Homolog of NCBI NO: 18423124 NR Description: cysteine proteinase
  misc_feature (1)..(270): Homolog of NCBI NO: 1173630 NR Description: cysteine proteinase
  misc_feature (1)..(270): Homolog of NCBI NO: 537437 NR Description: cysteine proteinase [Hemerocallis hybrid cultivar]
  misc_feature (1)..(278): Homolog of NCBI NO: 7435798 NR Description: probable cysteine proteinase (EC 3.4.22.-)
  misc_feature (1)..(270): Homolog of NCBI NO: 1169186 NR Description: Thiol protease SEN102 precursor
  misc_feature (1)..(270): Homolog of NCBI NO: 4731374 NR Description: papain-like cysteine protease [Sandersonia
  misc_feature (1)..(263): Homolog of NCBI NO: 40806500 NR Description: putative cysteine protease 2 [Iris hollandica]
MTADEFRRHYAGSRVAHHRMFRGDRQGSSASASFMYADARDVPASVDWRQKGAVTDVKDQGQCGSCWAFSTIAAVEGINAIKTKNLTSLSEQQLVDCDTKANAGCNGGLMDYAFQYIAKHGGVAAEDAYPYRARQASCKKSPAPVVTIDGYEDVPANDESALKKAVAHQPVSVAIEASGSHFQFYSEGVFSGRCGTELDHGVTAVGYGVTADGTKYWLVKNSWGPEWGEKGYIRMARDVAAKEGHCGIAMEASYPVKTSPNPKVHAVVDEDGSSHDEL

SEQ ID NO: 16555 - protein, 259 aa, Zea mays subsp. mays
  peptide (1)..(259): Ceres Seq. ID no. 12372988
  misc_feature (23)..(237): Pfam Name: Papain family cysteine protease Pfam Description: Papain family cysteine protease
  misc_feature (1)..(259): Homolog of NCBI NO: 4100157 NR Description: cysteine proteinase precursor [Hordeum vulgare]
  misc_feature (1)..(259): Homolog of NCBI NO: 7435797 NR Description: cysteine proteinase (EC 3.4.22.-) - barley
  misc_feature (1)..(242): Homolog of NCBI NO: 7435817 NR Description: cysteine endopeptidase (EC 3.4.22.-) precursor -
  misc_feature (1)..(243): Homolog of NCBI NO: 18423124 NR Description: cysteine proteinase
  misc_feature (1)..(251): Homolog of NCBI NO: 1173630 NR Description: cysteine proteinase
  misc_feature (1)..(251): Homolog of NCBI NO: 537437 NR Description: cysteine proteinase [Hemerocallis hybrid cultivar]
  misc_feature (1)..(259): Homolog of NCBI NO: 7435798 NR Description: probable cysteine proteinase (EC 3.4.22.-)
  misc_feature (1)..(251): Homolog of NCBI NO: 1169186 NR Description: Thiol protease SEN102 precursor
  misc_feature (1)..(251): Homolog of NCBI NO: 4731374 NR Description: papain-like cysteine protease [Sandersonia
  misc_feature (1)..(244): Homolog of NCBI NO: 40806500 NR Description: putative cysteine protease 2 [Iris hollandica]
MFRGDRQGSSASASFMYADARDVPASVDWRQKGAVTDVKDQGQCGSCWAFSTIAAVEGINAIKTKNLTSLSEQQLVDCDTKANAGCNGGLMDYAFQYIAKHGGVAAEDAYPYRARQASCKKSPAPVVTIDGYEDVPANDESALKKAVAHQPVSVAIEASGSHFQFYSEGVFSGRCGTELDHGVTAVGYGVTADGTKYWLVKNSWGPEWGEKGYIRMARDVAAKEGHCGIAMEASYPVKTSPNPKVHAVVDEDGSSHDEL

SEQ ID NO: 16556 - DNA, 1682 bp, Zea mays subsp. mays
  misc_feature (1)..(1682): Ceres Seq. ID no. 12352831
  misc_feature: MA Experiment ID: 108556 Result: Down-regulated in Transcription
  misc_feature: MA Experiment 108556 PARAMETER Experiment Name: Zm_Drought_P Parameter: Age (day) Value: 9
  misc_feature: MA Experiment 108556 PARAMETER Experiment Name: Zm_Drought_P Parameter: Organism Value: Zea mays
  misc_feature: MA Experiment 108556 PARAMETER Experiment Name: Zm_Drought_P Parameter: Plant Line Value: 35A19
  misc_feature: MA Experiment 108556 PARAMETER Experiment Name: Zm_Drought_P Parameter: Timepoint (hr) Value: 24
  misc_feature: MA Experiment 108556 PARAMETER Experiment Name: Zm_Drought_P Parameter: Tissue Value: Aerial
  misc_feature: MA Experiment 108556 PARAMETER Experiment Name: Zm_Drought_P Parameter: Treatment Value: Drought vs. No Drought
  misc_feature: MA Experiment ID: 108689 Result: Down-regulated in Transcription
  misc_feature: MA Experiment 108689 PARAMETER Experiment Name: Zm_Drought_Roots_P Parameter: Age (day) Value: 9
  misc_feature: MA Experiment 108689 PARAMETER Experiment Name: Zm_Drought_Roots_P Parameter: Organism Value: Zea mays
  misc_feature: MA Experiment 108689 PARAMETER Experiment Name: Zm_Drought_Roots_P Parameter: Plant Line Value: 35A19
  misc_feature: MA Experiment 108689 PARAMETER Experiment Name: Zm_Drought_Roots_P Parameter: Timepoint (hr) Value: 24
  misc_feature: MA Experiment 108689 PARAMETER Experiment Name: Zm_Drought_Roots_P Parameter: Tissue Value: Roots
  misc_feature: MA Experiment 108689 PARAMETER Experiment Name: Zm_Drought_Roots_P Parameter: Treatment Value: Drought vs. No Drought
  misc_feature: MA Experiment ID: 20000480 Result: Down-regulated in Transcription
  misc_feature: MA Experiment 20000480 PARAMETER Experiment Name: Zm_Drought_P Parameter: Age (day) Value: 11
  misc_feature: MA Experiment 20000480 PARAMETER Experiment Name: Zm_Drought_P Parameter: Organism Value: Zea mays
  misc_feature: MA Experiment 20000480 PARAMETER Experiment Name: Zm_Drought_P Parameter: Plant Line Value: 35A19
  misc_feature: MA Experiment 20000480 PARAMETER Experiment Name: Zm_Drought_P Parameter: Timepoint (hr) Value: 72
  misc_feature: MA Experiment 20000480 PARAMETER Experiment Name: Zm_Drought_P Parameter: Tissue Value: Aerial
  misc_feature: MA Experiment 20000480 PARAMETER Experiment Name: Zm_Drought_P Parameter: Treatment Value: Drought vs. No Drought
  misc_feature: MA Experiment ID: 20000492 Result: Down-regulated in Transcription
  misc_feature: MA Experiment 20000492 PARAMETER Experiment Name: Zm_Hybrid_Seed_Dev_P Parameter: DAP Value: 12
  misc_feature: MA Experiment 20000492 PARAMETER Experiment Name: Zm_Hybrid_Seed_Dev_P Parameter: Organism Value: Zea mays
  misc_feature: MA Experiment 20000492 PARAMETER Experiment Name: Zm_Hybrid_Seed_Dev_P Parameter: Plant Line Value: 35A19
  misc_feature: MA Experiment 20000492 PARAMETER Experiment Name: Zm_Hybrid_Seed_Dev_P Parameter: Tissue Value: Fert Kernel vs. Unfert Floret
acaaacgccatcatcgcaccgactctgatccaatttcacacgcatactagcgccgccggtagcagcaccggcagccgcgttcccctccgccatggatcccgcgaacagcagcgcgggcgccgagctcgacgacgcgtccgagtggcgcacccgggcgctgggcggcacggagtacagctggctccgcgccgtgccgggcggcacgggcaccacgctgctcgcgctccgcctatcccacggcgacgcggccgaggcggcgctgcgctccctgcgggacgcgcaccccgtcctccgcgcccgcctccggacctcttctccctccggcccgacgctggcgttccccgatccggcaccgccgttcctgctggcgccgatcccggccccgggctccgcgcccgacttccacgcgctcctcgagcacgagctcaaccgcaacccgtgggccgacgaccccgcgtcctccgacgacgccccggtcctcttcgcgacgctctacgagctcccagccgccacgggcggcgcggcgctgttcgtccggatccacacggtcgcgtgcgaccgctcggcggcgagtgcgctggccagggagctcgtcgcgctgctggccggcgccggcggcgaggagcccgacccggaggatgcggcggcggaagcggggctggaggcgaggatccctcagagggacatctggaagccgttctgggcgcgcgggttggatatggtgggctactccatcaacggcctgcggacgtccacgctgccgttcgtggagaccggcacggagaggtccacgcagatgctgcggctcgggctcggcctcgacgagacgacgaggctgctcgacgcgtgcaaggagaatggggtgaggttgtgctccgccgtggccgccgcgacgatgctcgccgcgcggcagtcgaagccgatggagagcggccagcaggagacgtactctgtcgtgacccttatcaattgccgcaagtttcttgagccagtcttggaggaccgcaacgttgggttcttctactctgccatcaccaacacgcacacgatccacggcggggaagggctgtgggagctggccaagaggtgccaggactcgtacaccagcgccaagagcaacaagaaacacctcaccgacatcagcgacctcaacttcctcatgtgccgggccatcgagaacccccagctgacgaccgccggcgcgctccggacggcgctcgtctccgtgttcgaggaccccgtggtcgccgacgtggccgaggcgcagagcaaggccggcgtggaggactgcgtctgctgcgccaccgtgcacggcatcggcccgtcgatcggcgtgttcgactcgatcaaggacggcaagctggactgggcgtgcgtctacccttctcctctgcactccaggaagcaggtccaggagatattcgacaaggtgaagcagattttgcgccatgcggctgcggctgaggagaattttgaagactgcacctaagtacctaacgatgtcgtcgggagctttatggggcatctcggtagagctattgctccatttgtgtctttgtgaggcattcttttctcgtgagggttgtaatgtaagtatagtgaaccttgtgttagcctttttattctttcaattctcggcgcaatgaaaattttccggtgggaggctggtagctttatgatcc

SEQ ID NO: 16557 - protein, 465 aa, Zea mays subsp. mays
  peptide (1)..(465): Ceres Seq. ID no. 12352832
  misc_feature (20)..(117): Homolog of NCBI NO: 7485998 NR Description: hypothetical protein F22O6.10 - Arabidopsis
  misc_feature (107)..(227): Homolog of NCBI NO: 7485998 NR Description: hypothetical protein F22O6.10 - Arabidopsis
  misc_feature (1)..(124): Homolog of NCBI NO: 34908510 NR Description: P0679C12.25 [Oryza sativa (japonica
  misc_feature (20)..(117): Homolog of NCBI NO: 14334448 NR Description: unknown protein [Arabidopsis thaliana]
  misc_feature (98)..(457): Homolog of NCBI NO: 14334448 NR Description: unknown protein [Arabidopsis thaliana]
  misc_feature (20)..(117): Homolog of NCBI NO: 18409645 NR Description: expressed protein
  misc_feature (20)..(117): Homolog of NCBI NO: 11357759 NR Description: hypothetical protein F3C22.10 - Arabidopsis
  misc_feature (107)..(457): Homolog of NCBI NO: 18409645 NR Description: expressed protein
  misc_feature (107)..(457): Homolog of NCBI NO: 11357759 NR Description: hypothetical protein F3C22.10 - Arabidopsis
  misc_feature (54)..(465): Homolog of NCBI NO: 34908510 NR Description: P0679C12.25 [Oryza sativa (japonica
MDPANSSAGAELDDASEWRTRALGGTEYSWLRAVPGGTGTTLLALRLSHGDAAEAALRSLRDAHPVLRARLRTSSPSGPTLAFPDPAPPFLLAPIPAPGSAPDFHALLEHELNRNPWADDPASSDDAPVLFATLYELPAATGGAALFVRIHTVACDRSAASALARELVALLAGAGGEEPDPEDAAAEAGLEARIPQRDIWKPFWARGLDMVGYSINGLRTSTLPFVETGTERSTQMLRLGLGLDETTRLLDACKENGVRLCSAVAAATMLAARQSKPMESGQQETYSVVTLINCRKFLEPVLEDRNVGFFYSAITNTHTIHGGEGLWELAKRCQDSYTSAKSNKKHLTDISDLNFLMCRAIENPQLTTAGALRTALVSVFEDPVVADVAEAQSKAGVEDCVCCATVHGIGPSIGVFDSIKDGKLDWACVYPSPLHSRKQVQEIFDKVKQILRHAAAAEENFEDCT

SEQ ID NO: 16558 - protein, 328 aa, Zea mays subsp. mays
  peptide (1)..(328): Ceres Seq. ID no. 12352833
  misc_feature (17)..(213): Homolog of NCBI NO: 23018055 NR Description: hypothetical protein [Thermobifida fusca]
  misc_feature (20)..(298): Homolog of NCBI NO: 29247944 NR Description: GLP_26_54603_52153 [Giardia lamblia ATCC 50803]
  misc_feature (26)..(328): Homolog of NCBI NO: 23106420 NR Description: hypothetical protein [Azotobacter vinelandii]
TNAIIAPTLIQFHTHTSAAGSSTGSRVPLRHGSREQQRGRRARRRVRVAHPGAGRHGVQLAPRRAGRHGHHAARAPPIPRRRGRGGAALPAGRAPRPPRPPPDLFSLRPDAGVPRSGTAVPAGADPGPGLRARLPRAPRARAQPQPVGRRPRVLRRRPGPLRDALRAPSRHGRRGAVRPDPHGRVRPLGGECAGQGARRAAGRRRRRGARPGGCGGGSGAGGEDPSEGHLEAVLGARVGYGGLLHQRPADVHAAVRGDRHGEVHADAAARARPRRDDEAARRVQGEWGEVVLRRGRRDDARRAAVEADGERPAGDVLCRDPYQLPQVS

SEQ ID NO: 16559 - protein, 256 aa, Zea mays subsp. mays
  peptide (1)..(256): Ceres Seq. ID no. 12352834
  misc_feature (1)..(18): Homolog of NCBI NO: 7485998 NR Description: hypothetical protein F22O6.10 - Arabidopsis
  misc_feature (1)..(248): Homolog of NCBI NO: 14334448 NR Description: unknown protein [Arabidopsis thaliana]
  misc_feature (1)..(248): Homolog of NCBI NO: 18409645 NR Description: expressed protein
  misc_feature (1)..(248): Homolog of NCBI NO: 11357759 NR Description: hypothetical protein F3C22.10 - Arabidopsis
  misc_feature (1)..(256): Homolog of NCBI NO: 34908510 NR Description: P0679C12.25 [Oryza sativa (japonica
MVGYSINGLRTSTLPFVETGTERSTQMLRLGLGLDETTRLLDACKENGVRLCSAVAAATMLAARQSKPMESGQQETYSVVTLINCRKFLEPVLEDRNVGFFYSAITNTHTIHGGEGLWELAKRCQDSYTSAKSNKKHLTDISDLNFLMCRAIENPQLTTAGALRTALVSVFEDPVVADVAEAQSKAGVEDCVCCATVHGIGPSIGVFDSIKDGKLDWACVYPSPLHSRKQVQEIFDKVKQILRHAAAAEENFEDCT

SEQ ID NO: 16560 - DNA, 1759 bp, Zea mays subsp. mays
  misc_feature (1)..(1759): Ceres Seq. ID no. 12407100
  misc_feature: MA Experiment ID: 108543 Result: Up-regulated in Transcription
  misc_feature: MA Experiment ID: 108546 Result: Up-regulated in Transcription
  misc_feature: MA Experiment 108546 PARAMETER Experiment Name: Zm_Imbibed_Seeds_P Parameter: Age (day) Value: 3 vs. 2
  misc_feature: MA Experiment 108546 PARAMETER Experiment Name: Zm_Imbibed_Seeds_P Parameter: Organism Value: Zea mays
  misc_feature: MA Experiment 108546 PARAMETER Experiment Name: Zm_Imbibed_Seeds_P Parameter: Plant Line Value: 35A19
  misc_feature: MA Experiment 108546 PARAMETER Experiment Name: Zm_Imbibed_Seeds_P Parameter: Tissue Value: Roots vs. Embryo
  misc_feature: MA Experiment ID: 108689 Result: Down-regulated in Transcription
  misc_feature: MA Experiment 108689 PARAMETER Experiment Name: Zm_Drought_Roots_P Parameter: Age (day) Value: 9
  misc_feature: MA Experiment 108689 PARAMETER Experiment Name: Zm_Drought_Roots_P Parameter: Organism Value: Zea mays
  misc_feature: MA Experiment 108689 PARAMETER Experiment Name: Zm_Drought_Roots_P Parameter: Plant Line Value: 35A19
  misc_feature: MA Experiment 108689 PARAMETER Experiment Name: Zm_Drought_Roots_P Parameter: Timepoint (hr) Value: 24
  misc_feature: MA Experiment 108689 PARAMETER Experiment Name: Zm_Drought_Roots_P Parameter: Tissue Value: Roots
  misc_feature: MA Experiment 108689 PARAMETER Experiment Name: Zm_Drought_Roots_P Parameter: Treatment Value: Drought vs. No Drought
  misc_feature: MA Experiment ID: 20000478 Result: Down-regulated in Transcription
  misc_feature: MA Experiment 20000478 PARAMETER Experiment Name: Zm_5mM_SA_P Parameter: Age (day) Value: 11
  misc_feature: MA Experiment 20000478 PARAMETER Experiment Name: Zm_5mM_SA_P Parameter: Organism Value: Zea mays
  misc_feature: MA Experiment 20000478 PARAMETER Experiment Name: Zm_5mM_SA_P Parameter: Plant Line Value: 35A19
  misc_feature: MA Experiment 20000478 PARAMETER Experiment Name: Zm_5mM_SA_P Parameter: Timepoint (hr) Value: 72
  misc_feature: MA Experiment 20000478 PARAMETER Experiment Name: Zm_5mM_SA_P Parameter: Tissue Value: Aerial
  misc_feature: MA Experiment 20000478 PARAMETER Experiment Name: Zm_5mM_SA_P Parameter: Treatment Value: 5mM SA vs. No Treatment
  misc_feature: MA Experiment ID: 20000479 Result: Down-regulated in Transcription
  misc_feature: MA Experiment 20000479 PARAMETER Experiment Name: Zm_Drought_P Parameter: Age (day) Value: 10
  misc_feature: MA Experiment 20000479 PARAMETER Experiment Name: Zm_Drought_P Parameter: Organism Value: Zea mays
  misc_feature: MA Experiment 20000479 PARAMETER Experiment Name: Zm_Drought_P Parameter: Plant Line Value: 35A19
  misc_feature: MA Experiment 20000479 PARAMETER Experiment Name: Zm_Drought_P Parameter: Timepoint (hr) Value: 48
  misc_feature: MA Experiment 20000479 PARAMETER Experiment Name: Zm_Drought_P Parameter: Tissue Value: Aerial
  misc_feature: MA Experiment 20000479 PARAMETER Experiment Name: Zm_Drought_P Parameter: Treatment Value: Drought vs. No Drought
  misc_feature: MA Experiment ID: 20000480 Result: Down-regulated in Transcription
  misc_feature: MA Experiment 20000480 PARAMETER Experiment Name: Zm_Drought_P Parameter: Age (day) Value: 11
  misc_feature: MA Experiment 20000480 PARAMETER Experiment Name: Zm_Drought_P Parameter: Organism Value: Zea mays
  misc_feature: MA Experiment 20000480 PARAMETER Experiment Name: Zm_Drought_P Parameter: Plant Line Value: 35A19
  misc_feature: MA Experiment 20000480 PARAMETER Experiment Name: Zm_Drought_P Parameter: Timepoint (hr) Value: 72
  misc_feature: MA Experiment 20000480 PARAMETER Experiment Name: Zm_Drought_P Parameter: Tissue Value: Aerial
  misc_feature: MA Experiment 20000480 PARAMETER Experiment Name: Zm_Drought_P Parameter: Treatment Value: Drought vs. No Drought
  misc_feature: MA Experiment ID: 20000492 Result: Down-regulated in Transcription
  misc_feature: MA Experiment 20000492 PARAMETER Experiment Name: Zm_Hybrid_Seed_Dev_P Parameter: DAP Value: 12
  misc_feature: MA Experiment 20000492 PARAMETER Experiment Name: Zm_Hybrid_Seed_Dev_P Parameter: Organism Value: Zea mays
  misc_feature: MA Experiment 20000492 PARAMETER Experiment Name: Zm_Hybrid_Seed_Dev_P Parameter: Plant Line Value: 35A19
  misc_feature: MA Experiment 20000492 PARAMETER Experiment Name: Zm_Hybrid_Seed_Dev_P Parameter: Tissue Value: Fert Kernel vs. Unfert Floret
  misc_feature: MA Experiment ID: 20000535 Result: Down-regulated in Transcription
  misc_feature: MA Experiment 20000535 PARAMETER Experiment Name: Zm_Hybrid_Seed_Dev_P Parameter: DAP Value: 30 vs. 12
  misc_feature: MA Experiment 20000535 PARAMETER Experiment Name: Zm_Hybrid_Seed_Dev_P Parameter: Organism Value: Zea mays
  misc_feature: MA Experiment 20000535 PARAMETER Experiment Name: Zm_Hybrid_Seed_Dev_P Parameter: Plant Line Value: 35A19
  misc_feature: MA Experiment 20000535 PARAMETER Experiment Name: Zm_Hybrid_Seed_Dev_P Parameter: Tissue Value: Embryo vs. Unfert Floret
gccgagaagcttcggactagctagcaagctagctagctacctacccgtgctttggttcggttggttggcgccatagccattgccgaggagcgagggagcagccgggcgggcagtcaggaggcggcgagtaagcatgctgggagcgagccccaggggcaggaaggccgccgcgccgccggtgaagctggggtcggcgaaggaggcgccggcggccggtggaggagggagcggctgcaaggtgccggcggaggaggtgtgggaggtgcggcccggcgggatgctggtgcagaagaggggcggcggcgacgacgagccgtcgcccaacgtgaagcccgtgcccaccatccgggtcaaggtcaagcacgccggcgtcacgcacgagatgtacatcagttccgaggcctccttcggggagctgaagaagctggtggccgccaagacggggctgcaccccgacgaccagaaggtgctgtacaaggacagggagcgtgactccaaggcgttcctggacacggctggcgtcagagaccgctccaaggtggtggtgctggaggaccccgaggcccgcgcgcgccgactcatcggggagcgccgcagcggccacctccagaaggccgccagggccgtcgccgcggtcaccgccgaggtcgacaagctggcacccaaggtggcggcgctggacgcgtcggtgcgcaggggggagaaggtcgcggagaaggacgtggtgcaggtgacggagctgctaatgaacgagctgctcaggctcgacgccgtggtcgcggacggcgacgtcaaggcgcagaggcggatgcaggtgaagcgcgtccagaagtacgtggagacgctggacgcggtggcggccaagaacgccgccctcgtcggcaagtccggcgagaaggccgcggccaagccggcgccggcgccggccccggccccgccgccgcggcagcagggacaggggcagacgcggtgggagatgttcgacctgctgtcgtcgctgccgtccacgtcctcggcctcgtcaacgacgaccgtgagctccacggcgtcctccggcgcgccgccgccgaaccgcccggactggatgctcttctgacgagtggacggcggtcccgcaccggccggccaccggcgcaaaagcgaaaggcgagtgcttgatcgatgcgatgcgatgcttgtgtgccaagaattgcaccccaaatctggtagctcgtcgagtgtcctgatgaggccatgattgggcaggcggggggctatctagcttggccacacagctgcattgcgttgggctgcatggtacccgtaccagccaattcgagttcatcaatcatgtggtgtgagagtatttttcttcttcacctctcctttttctttctttccttttgagcttttttttccctcctcctcctcctcctcctcctcttcttcttgttcatggaaggtttgggattcttttggagtgcatactatactattcagatagagaaacagaaagatggagttggttagggcaagtgaaacgtcttcagatagggaaataaataaaactagtcggtgtccaaactctgaagaaacgaacaaagaggtgcatggattgttagcttatcacactgttgtttgagagtgatgagagatgtatcgatcaagaggccacttggtcggtagtctgtcactccttgttgctgccgagtttcttcctcctcatcatcatcctgtataatgtaatcaagcaataatacaaaataaaaaaagcgttttg

SEQ ID NO: 16561 - protein, 320 aa, Zea mays subsp. mays
  peptide (1)..(320): Ceres Seq. ID no. 12407101
  misc_feature (161)..(241): Pfam Name: BAG domain Pfam Description: BAG domain
  misc_feature (43)..(246): Homolog of NCBI NO: 30697627 NR Description: BAG domain containing protein [Arabidopsis
  misc_feature (43)..(246): Homolog of NCBI NO: 21553443 NR Description: unknown [Arabidopsis thaliana]
  misc_feature (42)..(284): Homolog of NCBI NO: 6624711 NR Description: hypothetical protein [Oryza sativa (indica
  misc_feature (42)..(284): Homolog of NCBI NO: 38344334 NR Description: OSJNBa0058K23.16 [Oryza sativa (japonica
  misc_feature (43)..(294): Homolog of NCBI NO: 30697630 NR Description: BAG domain containing protein [Arabidopsis
  misc_feature (28)..(320): Homolog of NCBI NO: 21537107 NR Description: unknown [Arabidopsis thaliana]
  misc_feature (16)..(320): Homolog of NCBI NO: 15240726 NR Description: putative protein
  misc_feature (26)..(273): Homolog of NCBI NO: 15242267 NR Description: putative protein; protein id: At5g52060.1
  misc_feature (10)..(320): Homolog of NCBI NO: 34898024 NR Description: ESTs AU082174(S13676),AU032395(R3986) correspond a region of the predicted gene.~Similar to Arabidopsis thaliana
  misc_feature (1)..(320): Homolog of NCBI NO: 25553557 NR Description: OSJNBa0038F22.4 [Oryza sativa (japonica
MLGASPRGRKAAAPPVKLGSAKEAPAAGGGGSGCKVPAEEVWEVRPGGMLVQKRGGGDDEPSPNVKPVPTIRVKVKHAGVTHEMYISSEASFGELKKLVAAKTGLHPDDQKVLYKDRERDSKAFLDTAGVRDRSKVVVLEDPEARARRLIGERRSGHLQKAARAVAAVTAEVDKLAPKVAALDASVRRGEKVAEKDVVQVTELLMNELLRLDAVVADGDVKAQRRMQVKRVQKYVETLDAVAAKNAALVGKSGEKAAAKPAPAPAPAPPPRQQGQGQTRWEMFDLLSSLPSTSSASSTTTVSSTASSGAPPPNRPDWMLF

SEQ ID NO: 16562 - protein, 272 aa, Zea mays subsp. mays
  peptide (1)..(272): Ceres Seq. ID no. 12407102
  misc_feature (113)..(193): Pfam Name: BAG domain Pfam Description: BAG domain
  misc_feature (1)..(225): Homolog of NCBI NO: 15242267 NR Description: putative protein; protein id: At5g52060.1
  misc_feature (1)..(272): Homolog of NCBI NO: 34898024 NR Description: ESTs AU082174(S13676),AU032395(R3986) correspond a region of the predicted gene.~Similar to Arabidopsis thaliana
  misc_feature (1)..(198): Homolog of NCBI NO: 21553443 NR Description: unknown [Arabidopsis thaliana]
  misc_feature (1)..(236): Homolog of NCBI NO: 38344334 NR Description: OSJNBa0058K23.16 [Oryza sativa (japonica
  misc_feature (1)..(272): Homolog of NCBI NO: 21537107 NR Description: unknown [Arabidopsis thaliana]
  misc_feature (1)..(272): Homolog of NCBI NO: 15240726 NR Description: putative protein
  misc_feature (1)..(246): Homolog of NCBI NO: 30697630 NR Description: BAG domain containing protein [Arabidopsis
  misc_feature (1)..(236): Homolog of NCBI NO: 6624711 NR Description: hypothetical protein [Oryza sativa (indica
  misc_feature (1)..(198): Homolog of NCBI NO: 30697627 NR Description: BAG domain containing protein [Arabidopsis
  misc_feature (1)..(272): Homolog of NCBI NO: 25553557 NR Description: OSJNBa0038F22.4 [Oryza sativa (japonica
MLVQKRGGGDDEPSPNVKPVPTIRVKVKHAGVTHEMYISSEASFGELKKLVAAKTGLHPDDQKVLYKDRERDSKAFLDTAGVRDRSKVVVLEDPEARARRLIGERRSGHLQKAARAVAAVTAEVDKLAPKVAALDASVRRGEKVAEKDVVQVTELLMNELLRLDAVVADGDVKAQRRMQVKRVQKYVETLDAVAAKNAALVGKSGEKAAAKPAPAPAPAPPPRQQGQGQTRWEMFDLLSSLPSTSSASSTTTVSSTASSGAPPPNRPDWMLF

SEQ ID NO: 16563 - protein, 237 aa, Zea mays subsp. mays
  peptide (1)..(237): Ceres Seq. ID no. 12407103
  misc_feature (78)..(158): Pfam Name: BAG domain Pfam Description: BAG domain
  misc_feature (1)..(163): Homolog of NCBI NO: 30697627 NR Description: BAG domain containing protein [Arabidopsis
  misc_feature (1)..(163): Homolog of NCBI NO: 21553443 NR Description: unknown [Arabidopsis thaliana]
  misc_feature (1)..(201): Homolog of NCBI NO: 6624711 NR Description: hypothetical protein [Oryza sativa (indica
  misc_feature (1)..(201): Homolog of NCBI NO: 38344334 NR Description: OSJNBa0058K23.16 [Oryza sativa (japonica
  misc_feature (1)..(211): Homolog of NCBI NO: 30697630 NR Description: BAG domain containing protein [Arabidopsis
  misc_feature (1)..(237): Homolog of NCBI NO: 21537107 NR Description: unknown [Arabidopsis thaliana]
  misc_feature (1)..(237): Homolog of NCBI NO: 15240726 NR Description: putative protein
  misc_feature (1)..(190): Homolog of NCBI NO: 15242267 NR Description: putative protein; protein id: At5g52060.1
  misc_feature (1)..(237): Homolog of NCBI NO: 34898024 NR Description: ESTs AU082174(S13676),AU032395(R3986) correspond a region of the predicted gene.~Similar to Arabidopsis thaliana
  misc_feature (1)..(237): Homolog of NCBI NO: 25553557 NR Description: OSJNBa0038F22.4 [Oryza sativa (japonica
MYISSEASFGELKKLVAAKTGLHPDDQKVLYKDRERDSKAFLDTAGVRDRSKVVVLEDPEARARRLIGERRSGHLQKAARAVAAVTAEVDKLAPKVAALDASVRRGEKVAEKDVVQVTELLMNELLRLDAVVADGDVKAQRRMQVKRVQKYVETLDAVAAKNAALVGKSGEKAAAKPAPAPAPAPPPRQQGQGQTRWEMFDLLSSLPSTSSASSTTTVSSTASSGAPPPNRPDWMLF

SEQ ID NO: 16564 - DNA, 1890 bp, Zea mays subsp. mays
  misc_feature (1)..(1890): Ceres Seq. ID no. 12352835
  misc_feature: MA Experiment ID: 108544 Result: Down-regulated in Transcription
  misc_feature: MA Experiment ID: 20000478 Result: Down-regulated in Transcription
  misc_feature: MA Experiment 20000478 PARAMETER Experiment Name: Zm_5mM_SA_P Parameter: Age (day) Value: 11
  misc_feature: MA Experiment 20000478 PARAMETER Experiment Name: Zm_5mM_SA_P Parameter: Organism Value: Zea mays
  misc_feature: MA Experiment 20000478 PARAMETER Experiment Name: Zm_5mM_SA_P Parameter: Plant Line Value: 35A19
  misc_feature: MA Experiment 20000478 PARAMETER Experiment Name: Zm_5mM_SA_P Parameter: Timepoint (hr) Value: 72
  misc_feature: MA Experiment 20000478 PARAMETER Experiment Name: Zm_5mM_SA_P Parameter: Tissue Value: Aerial
  misc_feature: MA Experiment 20000478 PARAMETER Experiment Name: Zm_5mM_SA_P Parameter: Treatment Value: 5mM SA vs. No Treatment
  misc_feature: MA Experiment ID: 20000535 Result: Down-regulated in Transcription
  misc_feature: MA Experiment 20000535 PARAMETER Experiment Name: Zm_Hybrid_Seed_Dev_P Parameter: DAP Value: 30 vs. 12
  misc_feature: MA Experiment 20000535 PARAMETER Experiment Name: Zm_Hybrid_Seed_Dev_P Parameter: Organism Value: Zea mays
  misc_feature: MA Experiment 20000535 PARAMETER Experiment Name: Zm_Hybrid_Seed_Dev_P Parameter: Plant Line Value: 35A19
  misc_feature: MA Experiment 20000535 PARAMETER Experiment Name: Zm_Hybrid_Seed_Dev_P Parameter: Tissue Value: Embryo vs. Unfert Floret
  misc_feature: MA Experiment ID: 20000632 Result: Down-regulated in Transcription
  misc_feature: MA Experiment 20000632 PARAMETER Experiment Name: Zm_Herbicide-Treatments_P Parameter: Timepoint (hr) Value: 4
  misc_feature: MA Experiment 20000632 PARAMETER Experiment Name: Zm_Herbicide-Treatments_P Parameter: Tissue Value: Aerial
  misc_feature: MA Experiment 20000632 PARAMETER Experiment Name: Zm_Herbicide-Treatments_P Parameter: Treatment Value: Glean vs. No Treatment
aattgctttataaataacataacatacaatataaaattgtatcgtctcctctccttcctgacattggcactggcagctgcactcaccggaagccatggaagacttgctctactactccctcaccatagccatctgcatcgcagtcatcgccctcctctccatccttcgttcgttcaccgctaccggaccgccgccggcgctcccgcccggcccgtcgctgctgtcgctgatcaccccgctcctcttcctcggccgaacgaacttcggcatcgagcggatcctctccgccgcgcggtcccgctacggccccgtcttcacgctctacctgctcccgtcccgcccggccatcttcatcgccgaccacgccgtggcgcaccgcgtgctggtgcagggcggcgccgccttcgccgacaggccgccggccagcctccccttccgcctcttctccagtgaccagcgcaacatcacatccggcgcctacggcccggtctggcgcgcgctccgtcacaacctcacgggcaacgtgttccacccgtcgcgcatgggccggttcgccgccgcccgccgccgcgcgctgcgggggctcgtcgccggcgtcgcgcgcgacgccggcagcggggccgtcgtcgtcgaggggctcctgcaccgggccatgttccacgtcctcgtcaccatgtgcttcggcgagggcctcgccaccgacgccgtcgtcgcgtccgtggaggcgctgcagcgggagttcctcacgtcggtgctcggctttcaagtgttcgacgtgtgccccgcgctcaccagcctcctgttccggcgccggtggaagcagatgctgtccctccgccgccggcaggaggagctcttcgcccctctcatacgggcgtgccgcgcgcaacgaggctccgacgccaacgccggcgcggacacgtacgtggacacgctgctcgacctccggatcccccgaggacggggggcaggaacctcacggagggcgagatggtgagcttgtgcgccgagttcgtggccgtcggcaccgacaacacggcgaccgaggcgcaatggatcatggccaacctcgtggcgcatccggagatccaagcaaggctccgggccgagatccaccaggtcaccggcggcgcgggcgtccaggagcaggacctgccgcggatgccgtaccttcgcgcagtggtcctggaggggctccgccgccacccgccgggccacttcgcgatcccgcacgccgcgaccggcatccaagacgacggcggcggcggcgaccacgcgaccatcgaaggcttccgcgtgccgcggcgcgcgtccctcaacttcacgctcgtcgcgctggggctcgacgaggcggtgtggcccgacccgctgcggttccggccggagcggttcctgccccggcggcgagggcgcggacgttgacctcaccggcgcgaaggaggtcaagatgataccgttcggcgccgggcggcggatctgccccgggatggcgctcgctctgctgcacctcgagttcttcgtggccagtctcgtcgccgagttcgagtggctccaggtccccggtgagccggtggagttcgccgagaagcaggagctgtccgtcgtgatgcgccggccgctccgtgccaccgtcgtccggtgcacaaggaacgccaactgaccacacgggttgtcgttgtcgaaccgaacgtctgcacttttctgctcttgtttgttgctgcatgcatgtgcttttctttcagtgaagttcagcgaatttcgtaaaaaattcgctaccaactttcctgtggacttgtggagtcatgttgttagcatgccctgctcttgttggctagaggctttcatgtatttgcactgcactgctctgattgtcctaaaagttataatatt

SEQ ID NO: 16565 - protein, 300 aa, Zea mays subsp. mays
  peptide (1)..(300): Ceres Seq. ID no. 12352836
  misc_feature (37)..(287): Pfam Name: Cytochrome P450 Pfam Description: Cytochrome P450
  misc_feature (23)..(287): Homolog of NCBI NO: 1432145 NR Description: cytochrome P450 [Arabidopsis thaliana]
  misc_feature (10)..(286): Homolog of NCBI NO: 13661764 NR Description: putative cytochrome P450 [Lolium rigidum]
  misc_feature (36)..(287): Homolog of NCBI NO: 15450601 NR Description: At1g64950/F13O11_25 [Arabidopsis thaliana]
  misc_feature (36)..(287): Homolog of NCBI NO: 15217801 NR Description: cytochrome p450, putative
  misc_feature (11)..(291): Homolog of NCBI NO: 37536034 NR Description: putative cytochrome P450 [Oryza sativa (japonica
  misc_feature (36)..(287): Homolog of NCBI NO: 15217800 NR Description: cytochrome p450, putative; protein id:
  misc_feature (12)..(287): Homolog of NCBI NO: 15224379 NR Description: cytochrome p450, putative; protein id:
  misc_feature (3)..(291): Homolog of NCBI NO: 34895180 NR Description: putative cytochrome P450 [Oryza sativa (japonica
  misc_feature (9)..(287): Homolog of NCBI NO: 15217771 NR Description: cytochrome p450, putative
  misc_feature (1)..(293): Homolog of NCBI NO: 28971944 NR Description: putative cytochrome P450 [Oryza sativa (japonica
MEDLLYYSLTIAICIAVIALLSILRSFTATGPPPALPPGPSLLSLITPLLFLGRTNFGIERILSAARSRYGPVFTLYLLPSRPAIFIADHAVAHRVLVQGGAAFADRPPASLPFRLFSSDQRNITSGAYGPVWRALRHNLTGNVFHPSRMGRFAAARRRALRGLVAGVARDAGSGAVVVEGLLHRAMFHVLVTMCFGEGLATDAVVASVEALQREFLTSVLGFQVFDVCPALTSLLFRRRWKQMLSLRRRQEELFAPLIRACRAQRGSDANAGADTYVDTLLDLRIPRGRGAGTSRRARW

SEQ ID NO: 16566 - protein, 151 aa, Zea mays subsp. mays
  peptide (1)..(151): Ceres Seq. ID no. 12352837
  misc_feature (1)..(138): Pfam Name: Cytochrome P450 Pfam Description: Cytochrome P450
  misc_feature (1)..(138): Homolog of NCBI NO: 1432145 NR Description: cytochrome P450 [Arabidopsis thaliana]
  misc_feature (1)..(137): Homolog of NCBI NO: 13661764 NR Description: putative cytochrome P450 [Lolium rigidum]
  misc_feature (1)..(138): Homolog of NCBI NO: 15450601 NR Description: At1g64950/F13O11_25 [Arabidopsis thaliana]
  misc_feature (1)..(138): Homolog of NCBI NO: 15217801 NR Description: cytochrome p450, putative
  misc_feature (1)..(142): Homolog of NCBI NO: 37536034 NR Description: putative cytochrome P450 [Oryza sativa (japonica
  misc_feature (1)..(138): Homolog of NCBI NO: 15217800 NR Description: cytochrome p450, putative; protein id:
  misc_feature (1)..(138): Homolog of NCBI NO: 15224379 NR Description: cytochrome p450, putative; protein id:
  misc_feature (1)..(142): Homolog of NCBI NO: 34895180 NR Description: putative cytochrome P450 [Oryza sativa (japonica
  misc_feature (1)..(138): Homolog of NCBI NO: 15217771 NR Description: cytochrome p450, putative
  misc_feature (1)..(144): Homolog of NCBI NO: 28971944 NR Description: putative cytochrome P450 [Oryza sativa (japonica
MGRFAAARRRALRGLVAGVARDAGSGAVVVEGLLHRAMFHVLVTMCFGEGLATDAVVASVEALQREFLTSVLGFQVFDVCPALTSLLFRRRWKQMLSLRRRQEELFAPLIRACRAQRGSDANAGADTYVDTLLDLRIPRGRGAGTSRRARW

SEQ ID NO: 16567 - protein, 150 aa, Zea mays subsp. mays
  peptide (1)..(150): Ceres Seq. ID no. 12352838
NCFINNITYNIKLYRLLSFLTLALAAALTGSHGRLALLLPHHSHLHRSHRPPLHPSFVHRYRTAAGAPARPVAAVADHPAPLPRPNELRHRADPLRRAVPLRPRLHALPAPVPPGHLHRRPRRGAPRAGAGRRRLRRQAAGQPPLPPLLQ

SEQ ID NO: 16568 - DNA, 1620 bp, Zea mays subsp. mays
  misc_feature (1)..(1620): Ceres Seq. ID no. 12363441
  misc_feature: MA Experiment ID: 20000534 Result: Up-regulated in Transcription
  misc_feature: MA Experiment 20000534 PARAMETER Experiment Name: Zm_Hybrid_Pollen_P Parameter: Age (day) Value: 8
  misc_feature: MA Experiment 20000534 PARAMETER Experiment Name: Zm_Hybrid_Pollen_P Parameter: Organism Value: Zea mays
  misc_feature: MA Experiment 20000534 PARAMETER Experiment Name: Zm_Hybrid_Pollen_P Parameter: Plant Line Value: 35A19
  misc_feature: MA Experiment 20000534 PARAMETER Experiment Name: Zm_Hybrid_Pollen_P Parameter: Tissue Value: Pollen vs. Aerial
aacctgaggtggagagatcgcacgcgccctctgccgcttgttcgttcctcgcgctcgccaccaggcaccaccacacacatcccaatctcgcgagggcaagcagcagggtctgcggcggcggcggcggccgcgcttccggctccccttcccattggcctccacgatggcgctccgcctcaangacgtcgcgctntgcctctcnccgccgctnnncgcccgccgccgccgccgcagcagcggcaggttcgtcgccgtcgcctccatgacgtccgccgtctccaccaaggtcgagaataagaagccatttgctcctccaagggaggtacatgtccaggttacacattcaatgccacctcacaagattgaaattttcaagtcgcttgatgattgggctagagataatatcttgacgcatctcaagccagtcgagaagtgttggcagccacaggatttcctcccggacccagcatctgaaggatttcatgatgaagttaaggagctcagagaacgtgccaaggaaatccctgatgattattttgtttgtttggtgggagacatgattaccgaggaagctctaccaacataccagactatgcttaacaccctcgacggtgtcagagatgagacaggtgcaagccccactgcctgggctgtttggacgagggcatggactgctgaggagaacaggcatggtgatctgctcaacaagtatatgtacctcactgggagggtggatatgaggcagattgagaagacaattcagtatcttattggctctggaatggatcctaggactgagaataatccttatcttggtttcatctacacctccttccaagagcgggcgaccttcatctcacacgggaacactgctcgtcacgccaaggactttggcgacttaaagcttgcacaaatctgcggcatcatcgcctcagatgagaagcgacatgaaactgcgtacaccaagatcgtggagaagctgtttgagatcgaccctgatggtaccgtggtcgctctggctgacatgatgaggaagaagatctcaatgcctgcccacctgatgtttgacgggcaggacgacaagctgttcgagcacttctccatggtcgcgcagaggcttggcgtttacaccgccagggactacgccgacatcctcgagttcctcgtcgacaggtggaaggtggcgagcctgactggtctgtcgggtgaagggaacaaggcgcaggactacctttgcacccttgcttcaagaatcaggaggctggaggagagggcccagagcagagccaagaaagccggcacgctgcctttcagctgggtatacggtagggacgtccaactgtgagatcggaaacctgctgcggactgcttagacaagacctgctgtgtctgcgttacataggtctccaggttttgatcaaatggtcccgtgtcgtcttatagagcgataggagaacgtgttggtctgtggtgtagctttgtttttattttgtatttttctgctttgatgtacaacctgtggccgcatgaactggggcgtggagatgggagcgaccatgccgtactttgtctgtcgctggcggtgtgtttcggtatgttatttgagttgctcagatctgg

SEQ ID NO: 16569 - protein, 393 aa, Zea mays subsp. mays
  peptide (1)..(393): Ceres Seq. ID no. 12363442
  misc_feature (1)..(393): Homolog of NCBI NO: 134944 NR Description: Acyl-
  misc_feature (14)..(393): Homolog of NCBI NO: 134943 NR Description: Acyl-
  misc_feature (14)..(393): Homolog of NCBI NO: 512398 NR Description: Stearoyl-acyl carrier protein desaturase
  misc_feature (1)..(393): Homolog of NCBI NO: 7433271 NR Description: acyl-
  misc_feature (1)..(393): Homolog of NCBI NO: 134945 NR Description: Acyl-
  misc_feature (25)..(393): Homolog of NCBI NO: 27804770 NR Description: putative stearoyl-acyl carrier protein desaturase
  misc_feature (1)..(393): Homolog of NCBI NO: 951427 NR Description: stearoyl-acyl-carrier protein desaturase
  misc_feature (1)..(393): Homolog of NCBI NO: 3915024 NR Description: Acyl-
  misc_feature (1)..(393): Homolog of NCBI NO: 1785862 NR Description: stearoyl-Acyl-carrier protein desaturase [Elaeis
  misc_feature (1)..(393): Homolog of NCBI NO: 19386730 NR Description: putative stearoyl-acyl-carrier protein desaturase
  misc_feature (6)..(6): Xaa is any aa, unknown or other
  misc_feature (10)..(10): Xaa is any aa, unknown or other
  misc_feature (13)..(13): Xaa is any aa, unknown or other
  misc_feature (16)..(16): Xaa is any aa, unknown or other
  misc_feature (17)..(17): Xaa is any aa, unknown or other
MALRLXDVAXCLXPPXXARRRRRSSGRFVAVASMTSAVSTKVENKKPFAPPREVHVQVTHSMPPHKIEIFKSLDDWARDNILTHLKPVEKCWQPQDFLPDPASEGFHDEVKELRERAKEIPDDYFVCLVGDMITEEALPTYQTMLNTLDGVRDETGASPTAWAVWTRAWTAEENRHGDLLNKYMYLTGRVDMRQIEKTIQYLIGSGMDPRTENNPYLGFIYTSFQERATFISHGNTARHAKDFGDLKLAQICGIIASDEKRHETAYTKIVEKLFEIDPDGTVVALADMMRKKISMPAHLMFDGQDDKLFEHFSMVAQRLGVYTARDYADILEFLVDRWKVASLTGLSGEGNKAQDYLCTLASRIRRLEERAQSRAKKAGTLPFSWVYGRDVQL

SEQ ID NO: 16570 - protein, 360 aa, Zea mays subsp. mays
  peptide (1)..(360): Ceres Seq. ID no. 12363443
  misc_feature (1)..(360): Homolog of NCBI NO: 134944 NR Description: Acyl-
  misc_feature (1)..(360): Homolog of NCBI NO: 134943 NR Description: Acyl-
  misc_feature (1)..(360): Homolog of NCBI NO: 512398 NR Description: Stearoyl-acyl carrier protein desaturase
  misc_feature (1)..(360): Homolog of NCBI NO: 7433271 NR Description: acyl-
  misc_feature (1)..(360): Homolog of NCBI NO: 134945 NR Description: Acyl-
  misc_feature (1)..(360): Homolog of NCBI NO: 27804770 NR Description: putative stearoyl-acyl carrier protein desaturase
  misc_feature (1)..(360): Homolog of NCBI NO: 951427 NR Description: stearoyl-acyl-carrier protein desaturase
  misc_feature (1)..(360): Homolog of NCBI NO: 3915024 NR Description: Acyl-
  misc_feature (1)..(360): Homolog of NCBI NO: 1785862 NR Description: stearoyl-Acyl-carrier protein desaturase [Elaeis
  misc_feature (1)..(360): Homolog of NCBI NO: 19386730 NR Description: putative stearoyl-acyl-carrier protein desaturase
MTSAVSTKVENKKPFAPPREVHVQVTHSMPPHKIEIFKSLDDWARDNILTHLKPVEKCWQPQDFLPDPASEGFHDEVKELRERAKEIPDDYFVCLVGDMITEEALPTYQTMLNTLDGVRDETGASPTAWAVWTRAWTAEENRHGDLLNKYMYLTGRVDMRQIEKTIQYLIGSGMDPRTENNPYLGFIYTSFQERATFISHGNTARHAKDFGDLKLAQICGIIASDEKRHETAYTKIVEKLFEIDPDGTVVALADMMRKKISMPAHLMFDGQDDKLFEHFSMVAQRLGVYTARDYADILEFLVDRWKVASLTGLSGEGNKAQDYLCTLASRIRRLEERAQSRAKKAGTLPFSWVYGRDVQL

SEQ ID NO: 16571 - protein, 332 aa, Zea mays subsp. mays
  peptide (1)..(332): Ceres Seq. ID no. 12363444
  misc_feature (1)..(332): Homolog of NCBI NO: 134944 NR Description: Acyl-
  misc_feature (1)..(332): Homolog of NCBI NO: 134943 NR Description: Acyl-
  misc_feature (1)..(332): Homolog of NCBI NO: 512398 NR Description: Stearoyl-acyl carrier protein desaturase
  misc_feature (1)..(332): Homolog of NCBI NO: 7433271 NR Description: acyl-
  misc_feature (1)..(332): Homolog of NCBI NO: 134945 NR Description: Acyl-
  misc_feature (1)..(332): Homolog of NCBI NO: 27804770 NR Description: putative stearoyl-acyl carrier protein desaturase
  misc_feature (1)..(332): Homolog of NCBI NO: 951427 NR Description: stearoyl-acyl-carrier protein desaturase
  misc_feature (1)..(332): Homolog of NCBI NO: 3915024 NR Description: Acyl-
  misc_feature (1)..(332): Homolog of NCBI NO: 1785862 NR Description: stearoyl-Acyl-carrier protein desaturase [Elaeis
  misc_feature (1)..(332): Homolog of NCBI NO: 19386730 NR Description: putative stearoyl-acyl-carrier protein desaturase
MPPHKIEIFKSLDDWARDNILTHLKPVEKCWQPQDFLPDPASEGFHDEVKELRERAKEIPDDYFVCLVGDMITEEALPTYQTMLNTLDGVRDETGASPTAWAVWTRAWTAEENRHGDLLNKYMYLTGRVDMRQIEKTIQYLIGSGMDPRTENNPYLGFIYTSFQERATFISHGNTARHAKDFGDLKLAQICGIIASDEKRHETAYTKIVEKLFEIDPDGTVVALADMMRKKISMPAHLMFDGQDDKLFEHFSMVAQRLGVYTARDYADILEFLVDRWKVASLTGLSGEGNKAQDYLCTLASRIRRLEERAQSRAKKAGTLPFSWVYGRDVQL

SEQ ID NO: 16572 - DNA, 1097 bp, Zea mays subsp. mays
  misc_feature (1)..(1097): Ceres Seq. ID no. 12350672
  misc_feature: MA Experiment ID: 108527 Result: Down-regulated in Transcription
  misc_feature: MA Experiment 108527 PARAMETER Experiment Name: Zm_5mM_NO_P Parameter: Age (day) Value: 8
  misc_feature: MA Experiment 108527 PARAMETER Experiment Name: Zm_5mM_NO_P Parameter: Organism Value: Zea mays
  misc_feature: MA Experiment 108527 PARAMETER Experiment Name: Zm_5mM_NO_P Parameter: Plant Line Value: 35A19
  misc_feature: MA Experiment 108527 PARAMETER Experiment Name: Zm_5mM_NO_P Parameter: Timepoint (hr) Value: 6
  misc_feature: MA Experiment 108527 PARAMETER Experiment Name: Zm_5mM_NO_P Parameter: Tissue Value: Aerial
  misc_feature: MA Experiment 108527 PARAMETER Experiment Name: Zm_5mM_NO_P Parameter: Treatment Value: 5mM NO vs. No Treatment
  misc_feature: MA Experiment ID: 108528 Result: Up-regulated in Transcription
  misc_feature: MA Experiment 108528 PARAMETER Experiment Name: Zm_Imbibed_Seeds_P Parameter: Age (day) Value: 5 vs. 2
  misc_feature: MA Experiment 108528 PARAMETER Experiment Name: Zm_Imbibed_Seeds_P Parameter: Organism Value: Zea mays
  misc_feature: MA Experiment 108528 PARAMETER Experiment Name: Zm_Imbibed_Seeds_P Parameter: Plant Line Value: 35A19
  misc_feature: MA Experiment 108528 PARAMETER Experiment Name: Zm_Imbibed_Seeds_P Parameter: Tissue Value: Aerial vs. Embryo
  misc_feature: MA Experiment ID: 108530 Result: Up-regulated in Transcription
  misc_feature: MA Experiment 108530 PARAMETER Experiment Name: Zm_Imbibed_Seeds_P Parameter: Age (day) Value: 6 vs. 2
  misc_feature: MA Experiment 108530 PARAMETER Experiment Name: Zm_Imbibed_Seeds_P Parameter: Organism Value: Zea mays
  misc_feature: MA Experiment 108530 PARAMETER Experiment Name: Zm_Imbibed_Seeds_P Parameter: Plant Line Value: 35A19
  misc_feature: MA Experiment 108530 PARAMETER Experiment Name: Zm_Imbibed_Seeds_P Parameter: Tissue Value: Aerial vs. Embryo
  misc_feature: MA Experiment ID: 108534 Result: Down-regulated in Transcription
  misc_feature: MA Experiment 108534 PARAMETER Experiment Name: Zm_4deg_Cold_P Parameter: Age (hr) Value: 8
  misc_feature: MA Experiment 108534 PARAMETER Experiment Name: Zm_4deg_Cold_P Parameter: Organism Value: Zea mays
  misc_feature: MA Experiment 108534 PARAMETER Experiment Name: Zm_4deg_Cold_P Parameter: Plant Line Value: 35A19
  misc_feature: MA Experiment 108534 PARAMETER Experiment Name: Zm_4deg_Cold_P Parameter: Temperature (deg C) Value: 4 vs. 22
  misc_feature: MA Experiment 108534 PARAMETER Experiment Name: Zm_4deg_Cold_P Parameter: Timepoint (hr) Value: 6
  misc_feature: MA Experiment 108534 PARAMETER Experiment Name: Zm_4deg_Cold_P Parameter: Tissue Value: Aerial
  misc_feature: MA Experiment ID: 108536 Result: Down-regulated in Transcription
  misc_feature: MA Experiment 108536 PARAMETER Experiment Name: Zm_Meristem_P Parameter: Age (day) Value: 8
  misc_feature: MA Experiment 108536 PARAMETER Experiment Name: Zm_Meristem_P Parameter: Organism Value: Zea mays
  misc_feature: MA Experiment 108536 PARAMETER Experiment Name: Zm_Meristem_P Parameter: Plant Line Value: 35A19
  misc_feature: MA Experiment 108536 PARAMETER Experiment Name: Zm_Meristem_P Parameter: Tissue Value: Shoot Meristem vs. Above Shoot Meristem
  misc_feature: MA Experiment ID: 108544 Result: Up-regulated in Transcription
  misc_feature: MA Experiment ID: 108545 Result: Up-regulated in Transcription
  misc_feature: MA Experiment 108545 PARAMETER Experiment Name: Zm_Imbibed_Seeds_P Parameter: Age (day) Value: 3 vs. 2
  misc_feature: MA Experiment 108545 PARAMETER Experiment Name: Zm_Imbibed_Seeds_P Parameter: Organism Value: Zea mays
  misc_feature: MA Experiment 108545 PARAMETER Experiment Name: Zm_Imbibed_Seeds_P Parameter: Plant Line Value: 35A19
  misc_feature: MA Experiment 108545 PARAMETER Experiment Name: Zm_Imbibed_Seeds_P Parameter: Tissue Value: Aerial vs. Embryo
  misc_feature: MA Experiment ID: 108547 Result: Up-regulated in Transcription
  misc_feature: MA Experiment 108547 PARAMETER Experiment Name: Zm_Imbibed_Seeds_P Parameter: Age (day) Value: 4 vs. 2
  misc_feature: MA Experiment 108547 PARAMETER Experiment Name: Zm_Imbibed_Seeds_P Parameter: Organism Value: Zea mays
  misc_feature: MA Experiment 108547 PARAMETER Experiment Name: Zm_Imbibed_Seeds_P Parameter: Plant Line Value: 35A19
  misc_feature: MA Experiment 108547 PARAMETER Experiment Name: Zm_Imbibed_Seeds_P Parameter: Tissue Value: Aerial vs. Embryo
  misc_feature: MA Experiment ID: 108556 Result: Up-regulated in Transcription
  misc_feature: MA Experiment 108556 PARAMETER Experiment Name: Zm_Drought_P Parameter: Age (day) Value: 9
  misc_feature: MA Experiment 108556 PARAMETER Experiment Name: Zm_Drought_P Parameter: Organism Value: Zea mays
  misc_feature: MA Experiment 108556 PARAMETER Experiment Name: Zm_Drought_P Parameter: Plant Line Value: 35A19
  misc_feature: MA Experiment 108556 PARAMETER Experiment Name: Zm_Drought_P Parameter: Timepoint (hr) Value: 24
  misc_feature: MA Experiment 108556 PARAMETER Experiment Name: Zm_Drought_P Parameter: Tissue Value: Aerial
  misc_feature: MA Experiment 108556 PARAMETER Experiment Name: Zm_Drought_P Parameter: Treatment Value: Drought vs. No Drought
  misc_feature: MA Experiment ID: 108597 Result: Up-regulated in Transcription
  misc_feature: MA Experiment 108597 PARAMETER Experiment Name: Zm_100uM_ABA_P Parameter: Age (day) Value: 9
  misc_feature: MA Experiment 108597 PARAMETER Experiment Name: Zm_100uM_ABA_P Parameter: Organism Value: Zea mays
  misc_feature: MA Experiment 108597 PARAMETER Experiment Name: Zm_100uM_ABA_P Parameter: Plant Line Value: 35A19
  misc_feature: MA Experiment 108597 PARAMETER Experiment Name: Zm_100uM_ABA_P Parameter: Timepoint (hr) Value: 24
  misc_feature: MA Experiment 108597 PARAMETER Experiment Name: Zm_100uM_ABA_P Parameter: Tissue Value: Aerial
  misc_feature: MA Experiment 108597 PARAMETER Experiment Name: Zm_100uM_ABA_P Parameter: Treatment Value: 100uM ABA vs. No Treatment
  misc_feature: MA Experiment ID: 108689 Result: Up-regulated in Transcription
  misc_feature: MA Experiment 108689 PARAMETER Experiment Name: Zm_Drought_Roots_P Parameter: Age (day) Value: 9
  misc_feature: MA Experiment 108689 PARAMETER Experiment Name: Zm_Drought_Roots_P Parameter: Organism Value: Zea mays
  misc_feature: MA Experiment 108689 PARAMETER Experiment Name: Zm_Drought_Roots_P Parameter: Plant Line Value: 35A19
  misc_feature: MA Experiment 108689 PARAMETER Experiment Name: Zm_Drought_Roots_P Parameter: Timepoint (hr) Value: 24
  misc_feature: MA Experiment 108689 PARAMETER Experiment Name: Zm_Drought_Roots_P Parameter: Tissue Value: Roots
  misc_feature: MA Experiment 108689 PARAMETER Experiment Name: Zm_Drought_Roots_P Parameter: Treatment Value: Drought vs. No Drought
cattgtgtaatcctcatcctccgtcgagatcaaggaagaaagaaagaaagaaagcaaccatggcggcaaccgcaatgtgcccctccccctcggccgcaataactcgccacatccatgctcgtcgctcctgtgctgctgcttccttgtccctccgccgctcgggcttcctggggcgcgtcgtgctggccgcggtgccggtggccgtggacgccacccggcgccgccgcgtctccgtgtcggtgcggatggcctgggacggtccgctctcgtcggtgcgcctcatcatgcagagcaggaacgcgaagctgagcgagaagctcaaggagcacatcgaggacaaggtgggtcgggcggtgtccaagcactgccacctggtccgggaggtagacgtgcgcctctccgcgcgcggcggcgagctcggccggggccccaagacgtcgcgctgcgagatcaccctcttcaccaagcgccatggcgtcctgcgcgccgaggaggacgccgagtccacctacgccagcatcgacctcgccgccgccatcgtcaagcgcaagctccgcaagatcaaggagaaggagacggaggtgcgccgcggcggagacgctgacggcgtctgggacgagatcccgccggccgacctgctgccccccgccgaggccgacgacctggaggcggccgtgggcgctgaggacgaggagacggtgctcgccaaggtggtgcgcaccaaggtgttcgagatgccgccgctcacggtggaggaggcgctggagcagctggagaacgtggaccacgacttctactgcttcagggacgaggccacggggcaggtgaacatcctctaccgcaggaaggaaggcggatacggcctcatcatccccaagaacgacggcaaagtggataccgttggcgttgtgccaccacccgccgtcgctgcggagccggagccggagccgtcctacgcagtgcacgccgctgacaacaacaactcctgaactgagcactcgtcgacgtctcatccaaccaaaaccaaaacgagagagaatgcttgcttggtactgtaaaaataaaacaaacgcagtcgtcgacgacgtctcatctgc

SEQ ID NO: 16573 - protein, 328 aa, Zea mays subsp. mays
  peptide (1)..(328): Ceres Seq. ID no. 12350673
  misc_feature (92)..(193): Pfam Name: Sigma 54 modulation protein / S30EA ribosomal protein Pfam Description: Sigma 54 modulation protein / S30EA ribosomal
  misc_feature (91)..(291): Homolog of NCBI NO: 16331216 NR Description: light repressed protein [Synechocystis sp. PCC
  misc_feature (91)..(294): Homolog of NCBI NO: 17230676 NR Description: light-repressed protein [Nostoc sp. PCC 7120]
  misc_feature (91)..(301): Homolog of NCBI NO: 23125050 NR Description: hypothetical protein [Nostoc punctiforme]
  misc_feature (91)..(301): Homolog of NCBI NO: 23041481 NR Description: hypothetical protein [Trichodesmium erythraeum
  misc_feature (91)..(292): Homolog of NCBI NO: 22298376 NR Description: ORF_ID:tlr0833~light repressed protein A homolog
  misc_feature (18)..(193): Homolog of NCBI NO: 227070 NR Description: ribosomal protein CS-S5
  misc_feature (75)..(304): Homolog of NCBI NO: 18420800 NR Description: putative protein
  misc_feature (18)..(319): Homolog of NCBI NO: 170131 NR Description: ribosomal protein 30S subunit
  misc_feature (18)..(319): Homolog of NCBI NO: 134034 NR Description: Plastid-specific 30S ribosomal protein 1,
  misc_feature (18)..(295): Homolog of NCBI NO: 30102988 NR Description: putative ribosomal protein
LCNPHPPSRSRKKERKKATMAATAMCPSPSAAITRHIHARRSCAAASLSLRRSGFLGRVVLAAVPVAVDATRRRRVSVSVRMAWDGPLSSVRLIMQSRNAKLSEKLKEHIEDKVGRAVSKHCHLVREVDVRLSARGGELGRGPKTSRCEITLFTKRHGVLRAEEDAESTYASIDLAAAIVKRKLRKIKEKETEVRRGGDADGVWDEIPPADLLPPAEADDLEAAVGAEDEETVLAKVVRTKVFEMPPLTVEEALEQLENVDHDFYCFRDEATGQVNILYRRKEGGYGLIIPKNDGKVDTVGVVPPPAVAAEPEPEPSYAVHAADNNNS

SEQ ID NO: 16574 - protein, 309 aa, Zea mays subsp. mays
  peptide (1)..(309): Ceres Seq. ID no. 12350674
  misc_feature (73)..(174): Pfam Name: Sigma 54 modulation protein / S30EA ribosomal protein Pfam Description: Sigma 54 modulation protein / S30EA ribosomal
  misc_feature (72)..(275): Homolog of NCBI NO: 17230676 NR Description: light-repressed protein [Nostoc sp. PCC 7120]
  misc_feature (72)..(282): Homolog of NCBI NO: 23125050 NR Description: hypothetical protein [Nostoc punctiforme]
  misc_feature (72)..(282): Homolog of NCBI NO: 23041481 NR Description: hypothetical protein [Trichodesmium erythraeum
  misc_feature (72)..(273): Homolog of NCBI NO: 22298376 NR Description: ORF_ID:tlr0833~light repressed protein A homolog
  misc_feature (1)..(174): Homolog of NCBI NO: 227070 NR Description: ribosomal protein CS-S5
  misc_feature (72)..(272): Homolog of NCBI NO: 16331216 NR Description: light repressed protein [Synechocystis sp. PCC
  misc_feature (56)..(285): Homolog of NCBI NO: 18420800 NR Description: putative protein
  misc_feature (1)..(300): Homolog of NCBI NO: 170131 NR Description: ribosomal protein 30S subunit
  misc_feature (1)..(300): Homolog of NCBI NO: 134034 NR Description: Plastid-specific 30S ribosomal protein 1,
  misc_feature (1)..(276): Homolog of NCBI NO: 30102988 NR Description: putative ribosomal protein
MAATAMCPSPSAAITRHIHARRSCAAASLSLRRSGFLGRVVLAAVPVAVDATRRRRVSVSVRMAWDGPLSSVRLIMQSRNAKLSEKLKEHIEDKVGRAVSKHCHLVREVDVRLSARGGELGRGPKTSRCEITLFTKRHGVLRAEEDAESTYASIDLAAAIVKRKLRKIKEKETEVRRGGDADGVWDEIPPADLLPPAEADDLEAAVGAEDEETVLAKVVRTKVFEMPPLTVEEALEQLENVDHDFYCFRDEATGQVNILYRRKEGGYGLIIPKNDGKVDTVGVVPPPAVAAEPEPEPSYAVHAADNNNS

SEQ ID NO: 16575 - protein, 304 aa, Zea mays subsp. mays
  peptide (1)..(304): Ceres Seq. ID no. 12350675
  misc_feature (68)..(169): Pfam Name: Sigma 54 modulation protein / S30EA ribosomal protein Pfam Description: Sigma 54 modulation protein / S30EA ribosomal
  misc_feature (67)..(267): Homolog of NCBI NO: 16331216 NR Description: light repressed protein [Synechocystis sp. PCC
  misc_feature (67)..(270): Homolog of NCBI NO: 17230676 NR Description: light-repressed protein [Nostoc sp. PCC 7120]
  misc_feature (67)..(277): Homolog of NCBI NO: 23125050 NR Description: hypothetical protein [Nostoc punctiforme]
  misc_feature (67)..(277): Homolog of NCBI NO: 23041481 NR Description: hypothetical protein [Trichodesmium erythraeum
  misc_feature (67)..(268): Homolog of NCBI NO: 22298376 NR Description: ORF_ID:tlr0833~light repressed protein A homolog
  misc_feature (1)..(169): Homolog of NCBI NO: 227070 NR Description: ribosomal protein CS-S5
  misc_feature (51)..(280): Homolog of NCBI NO: 18420800 NR Description: putative protein
  misc_feature (1)..(295): Homolog of NCBI NO: 170131 NR Description: ribosomal protein 30S subunit
  misc_feature (1)..(295): Homolog of NCBI NO: 134034 NR Description: Plastid-specific 30S ribosomal protein 1,
  misc_feature (1)..(271): Homolog of NCBI NO: 30102988 NR Description: putative ribosomal protein
MCPSPSAAITRHIHARRSCAAASLSLRRSGFLGRVVLAAVPVAVDATRRRRVSVSVRMAWDGPLSSVRLIMQSRNAKLSEKLKEHIEDKVGRAVSKHCHLVREVDVRLSARGGELGRGPKTSRCEITLFTKRHGVLRAEEDAESTYASIDLAAAIVKRKLRKIKEKETEVRRGGDADGVWDEIPPADLLPPAEADDLEAAVGAEDEETVLAKVVRTKVFEMPPLTVEEALEQLENVDHDFYCFRDEATGQVNILYRRKEGGYGLIIPKNDGKVDTVGVVPPPAVAAEPEPEPSYAVHAADNNNS

SEQ ID NO: 16576 - DNA, 874 bp, Zea mays subsp. mays
  misc_feature (1)..(874): Ceres Seq. ID no. 12355162
  misc_feature: MA Experiment ID: 108504 Result: Up-regulated in Transcription
  misc_feature: MA Experiment 108504 PARAMETER Experiment Name: Zm_Drought_P Parameter: Age (day) Value: 8
  misc_feature: MA Experiment 108504 PARAMETER Experiment Name: Zm_Drought_P Parameter: Organism Value: Zea mays
  misc_feature: MA Experiment 108504 PARAMETER Experiment Name: Zm_Drought_P Parameter: Plant Line Value: 35A19
  misc_feature: MA Experiment 108504 PARAMETER Experiment Name: Zm_Drought_P Parameter: Timepoint (hr) Value: 12
  misc_feature: MA Experiment 108504 PARAMETER Experiment Name: Zm_Drought_P Parameter: Tissue Value: Aerial
  misc_feature: MA Experiment 108504 PARAMETER Experiment Name: Zm_Drought_P Parameter: Treatment Value: Drought vs. No Drought
  misc_feature: MA Experiment ID: 108523 Result: Up-regulated in Transcription
  misc_feature: MA Experiment 108523 PARAMETER Experiment Name: Zm_42deg_Heat_P Parameter: Age (day) Value: 8
  misc_feature: MA Experiment 108523 PARAMETER Experiment Name: Zm_42deg_Heat_P Parameter: Organism Value: Zea mays
  misc_feature: MA Experiment 108523 PARAMETER Experiment Name: Zm_42deg_Heat_P Parameter: Plant Line Value: 35A19
  misc_feature: MA Experiment 108523 PARAMETER Experiment Name: Zm_42deg_Heat_P Parameter: Temperature (deg C) Value: 42 vs. 22
  misc_feature: MA Experiment 108523 PARAMETER Experiment Name: Zm_42deg_Heat_P Parameter: Timepoint (hr) Value: 6
  misc_feature: MA Experiment 108523 PARAMETER Experiment Name: Zm_42deg_Heat_P Parameter: Tissue Value: Aerial
  misc_feature: MA Experiment ID: 108527 Result: Up-regulated in Transcription
  misc_feature: MA Experiment 108527 PARAMETER Experiment Name: Zm_5mM_NO_P Parameter: Age (day) Value: 8
  misc_feature: MA Experiment 108527 PARAMETER Experiment Name: Zm_5mM_NO_P Parameter: Organism Value: Zea mays
  misc_feature: MA Experiment 108527 PARAMETER Experiment Name: Zm_5mM_NO_P Parameter: Plant Line Value: 35A19
  misc_feature: MA Experiment 108527 PARAMETER Experiment Name: Zm_5mM_NO_P Parameter: Timepoint (hr) Value: 6
  misc_feature: MA Experiment 108527 PARAMETER Experiment Name: Zm_5mM_NO_P Parameter: Tissue Value: Aerial
  misc_feature: MA Experiment 108527 PARAMETER Experiment Name: Zm_5mM_NO_P Parameter: Treatment Value: 5mM NO vs. No Treatment
  misc_feature: MA Experiment ID: 108529 Result: Up-regulated in Transcription
  misc_feature: MA Experiment 108529 PARAMETER Experiment Name: Zm_Imbibed_Seeds_P Parameter: Age (day) Value: 5 vs. 2
  misc_feature: MA Experiment 108529 PARAMETER Experiment Name: Zm_Imbibed_Seeds_P Parameter: Organism Value: Zea mays
  misc_feature: MA Experiment 108529 PARAMETER Experiment Name: Zm_Imbibed_Seeds_P Parameter: Plant Line Value: 35A19
  misc_feature: MA Experiment 108529 PARAMETER Experiment Name: Zm_Imbibed_Seeds_P Parameter: Tissue Value: Roots vs. Embryo
  misc_feature: MA Experiment ID: 108530 Result: Up-regulated in Transcription
  misc_feature: MA Experiment 108530 PARAMETER Experiment Name: Zm_Imbibed_Seeds_P Parameter: Age (day) Value: 6 vs. 2
  misc_feature: MA Experiment 108530 PARAMETER Experiment Name: Zm_Imbibed_Seeds_P Parameter: Organism Value: Zea mays
  misc_feature: MA Experiment 108530 PARAMETER Experiment Name: Zm_Imbibed_Seeds_P Parameter: Plant Line Value: 35A19
  misc_feature: MA Experiment 108530 PARAMETER Experiment Name: Zm_Imbibed_Seeds_P Parameter: Tissue Value: Aerial vs. Embryo
  misc_feature: MA Experiment ID: 108533 Result: Up-regulated in Transcription
  misc_feature: MA Experiment 108533 PARAMETER Experiment Name: Zm_4deg_Cold_P Parameter: Age (hr) Value: 8
  misc_feature: MA Experiment 108533 PARAMETER Experiment Name: Zm_4deg_Cold_P Parameter: Organism Value: Zea mays
  misc_feature: MA Experiment 108533 PARAMETER Experiment Name: Zm_4deg_Cold_P Parameter: Plant Line Value: 35A19
  misc_feature: MA Experiment 108533 PARAMETER Experiment Name: Zm_4deg_Cold_P Parameter: Temperature (deg C) Value: 4 vs. 22
  misc_feature: MA Experiment 108533 PARAMETER Experiment Name: Zm_4deg_Cold_P Parameter: Timepoint (hr) Value: 1
  misc_feature: MA Experiment 108533 PARAMETER Experiment Name: Zm_4deg_Cold_P Parameter: Tissue Value: Aerial
  misc_feature: MA Experiment ID: 108535 Result: Down-regulated in Transcription
  misc_feature: MA Experiment 108535 PARAMETER Experiment Name: Zm_Meristem_P Parameter: Age (day) Value: 8
  misc_feature: MA Experiment 108535 PARAMETER Experiment Name: Zm_Meristem_P Parameter: Organism Value: Zea mays
  misc_feature: MA Experiment 108535 PARAMETER Experiment Name: Zm_Meristem_P Parameter: Plant Line Value: 35A19
  misc_feature: MA Experiment 108535 PARAMETER Experiment Name: Zm_Meristem_P Parameter: Tissue Value: Root Meristem vs. Above Root Meristem
  misc_feature: MA Experiment ID: 108536 Result: Up-regulated in Transcription
  misc_feature: MA Experiment 108536 PARAMETER Experiment Name: Zm_Meristem_P Parameter: Age (day) Value: 8
  misc_feature: MA Experiment 108536 PARAMETER Experiment Name: Zm_Meristem_P Parameter: Organism Value: Zea mays
  misc_feature: MA Experiment 108536 PARAMETER Experiment Name: Zm_Meristem_P Parameter: Plant Line Value: 35A19
  misc_feature: MA Experiment 108536 PARAMETER Experiment Name: Zm_Meristem_P Parameter: Tissue Value: Shoot Meristem vs. Above Shoot Meristem
  misc_feature: MA Experiment ID: 108597 Result: Up-regulated in Transcription
  misc_feature: MA Experiment 108597 PARAMETER Experiment Name: Zm_100uM_ABA_P Parameter: Age (day) Value: 9
  misc_feature: MA Experiment 108597 PARAMETER Experiment Name: Zm_100uM_ABA_P Parameter: Organism Value: Zea mays
  misc_feature: MA Experiment 108597 PARAMETER Experiment Name: Zm_100uM_ABA_P Parameter: Plant Line Value: 35A19
  misc_feature: MA Experiment 108597 PARAMETER Experiment Name: Zm_100uM_ABA_P Parameter: Timepoint (hr) Value: 24
  misc_feature: MA Experiment 108597 PARAMETER Experiment Name: Zm_100uM_ABA_P Parameter: Tissue Value: Aerial
  misc_feature: MA Experiment 108597 PARAMETER Experiment Name: Zm_100uM_ABA_P Parameter: Treatment Value: 100uM ABA vs. No Treatment
  misc_feature: MA Experiment ID: 20000479 Result: Up-regulated in Transcription
  misc_feature: MA Experiment 20000479 PARAMETER Experiment Name: Zm_Drought_P Parameter: Age (day) Value: 10
  misc_feature: MA Experiment 20000479 PARAMETER Experiment Name: Zm_Drought_P Parameter: Organism Value: Zea mays
  misc_feature: MA Experiment 20000479 PARAMETER Experiment Name: Zm_Drought_P Parameter: Plant Line Value: 35A19
  misc_feature: MA Experiment 20000479 PARAMETER Experiment Name: Zm_Drought_P Parameter: Timepoint (hr) Value: 48
  misc_feature: MA Experiment 20000479 PARAMETER Experiment Name: Zm_Drought_P Parameter: Tissue Value: Aerial
  misc_feature: MA Experiment 20000479 PARAMETER Experiment Name: Zm_Drought_P Parameter: Treatment Value: Drought vs. No Drought
  misc_feature: MA Experiment ID: 20000480 Result: Up-regulated in Transcription
  misc_feature: MA Experiment 20000480 PARAMETER Experiment Name: Zm_Drought_P Parameter: Age (day) Value: 11
  misc_feature: MA Experiment 20000480 PARAMETER Experiment Name: Zm_Drought_P Parameter: Organism Value: Zea mays
  misc_feature: MA Experiment 20000480 PARAMETER Experiment Name: Zm_Drought_P Parameter: Plant Line Value: 35A19
  misc_feature: MA Experiment 20000480 PARAMETER Experiment Name: Zm_Drought_P Parameter: Timepoint (hr) Value: 72
  misc_feature: MA Experiment 20000480 PARAMETER Experiment Name: Zm_Drought_P Parameter: Tissue Value: Aerial
  misc_feature: MA Experiment 20000480 PARAMETER Experiment Name: Zm_Drought_P Parameter: Treatment Value: Drought vs. No Drought
  misc_feature: MA Experiment ID: 20000535 Result: Down-regulated in Transcription
  misc_feature: MA Experiment 20000535 PARAMETER Experiment Name: Zm_Hybrid_Seed_Dev_P Parameter: DAP Value: 30 vs. 12
  misc_feature: MA Experiment 20000535 PARAMETER Experiment Name: Zm_Hybrid_Seed_Dev_P Parameter: Organism Value: Zea mays
  misc_feature: MA Experiment 20000535 PARAMETER Experiment Name: Zm_Hybrid_Seed_Dev_P Parameter: Plant Line Value: 35A19
  misc_feature: MA Experiment 20000535 PARAMETER Experiment Name: Zm_Hybrid_Seed_Dev_P Parameter: Tissue Value: Embryo vs. Unfert Floret
  misc_feature: MA Experiment ID: 20000630 Result: Up-regulated in Transcription
  misc_feature: MA Experiment 20000630 PARAMETER Experiment Name: Zm_Herbicide-Treatments_P Parameter: Timepoint (hr) Value: 4
  misc_feature: MA Experiment 20000630 PARAMETER Experiment Name: Zm_Herbicide-Treatments_P Parameter: Tissue Value: Aerial
  misc_feature: MA Experiment 20000630 PARAMETER Experiment Name: Zm_Herbicide-Treatments_P Parameter: Treatment Value: Roundup vs. No Treatment
ccgtgaaaccaacgcccctctctccccgcgcacgagacccatcgcgaatggaagttgctcctgcggtgaagcaactcctccccatggcgcagggccccaactccccgtcctcctccaccacctcctcctcgccctcgccctcggccgccgcgccgtccccgccgccgcgccagcagcagtcgcagtcgcaggcgcccgtgccgcgcatcatcgacaccacgcccttccccaccaccttcgtgcaggccgacacggccagcttcaaggaggtcgtccagaggctcaccggctccgacacgccgccgcctgcccagaagcccgccaagacccacggccaccaccaccaccaccacggcggcggcggcgtcgggcccaagaagccggccttcaagctctacgagcgccggatcggcaagaacaacctcaagatgatcgcgccgctggcggggccgtcgccgcggaaggcggcgccggaggtgctgtcgcccagcgtgctcgacttcccttccctggcgctcggtagccccgtcacgccgctgctggccgaccccttcaaccggtcggcgtcggcgtccccgggcgagcaggacgaggccgcggcggccatcgcgcagaggggcttcttcctgcacccctcgccgaggggcgtcgagccgccgcggctgctgccgctgttccccgtcacgtcccccaagatggcgccgtggccgtcgcagcagtgatcgggggcgggcccccgctgccggagaattcctagtactgccgcttcagatactacttgtttaattaactccttggtgcgtcatgtatttttgctcatggtattcaactcttgagcgatcgcgaaggaacggaaagaaagatcacactcttg

SEQ ID NO: 16577 - protein, 239 aa, Zea mays subsp. mays
  peptide (1)..(239): Ceres Seq. ID no. 12355163
  misc_feature (124)..(234): Homolog of NCBI NO: 15232547 NR Description: unknown protein; protein id: At3g15300.1
  misc_feature (41)..(230): Homolog of NCBI NO: 34903674 NR Description: B1015E06.22 [Oryza sativa (japonica
  misc_feature (55)..(237): Homolog of NCBI NO: 21805688 NR Description: hypothetical protein [Arabidopsis thaliana]
  misc_feature (55)..(237): Homolog of NCBI NO: 15226165 NR Description: hypothetical protein; protein id: At2g33780.1
  misc_feature (151)..(230): Homolog of NCBI NO: 15238851 NR Description: putative protein
  misc_feature (38)..(141): Homolog of NCBI NO: 15238851 NR Description: putative protein
  misc_feature (20)..(238): Homolog of NCBI NO: 34909488 NR Description: P0481E12.14 [Oryza sativa (japonica
VKPTPLSPRARDPSRMEVAPAVKQLLPMAQGPNSPSSSTTSSSPSPSAAAPSPPPRQQQSQSQAPVPRIIDTTPFPTTFVQADTASFKEVVQRLTGSDTPPPAQKPAKTHGHHHHHHGGGGVGPKKPAFKLYERRIGKNNLKMIAPLAGPSPRKAAPEVLSPSVLDFPSLALGSPVTPLLADPFNRSASASPGEQDEAAAAIAQRGFFLHPSPRGVEPPRLLPLFPVTSPKMAPWPSQQ

SEQ ID NO: 16578 - protein, 224 aa, Zea mays subsp. mays
  peptide (1)..(224): Ceres Seq. ID no. 12355164
  misc_feature (109)..(219): Homolog of NCBI NO: 15232547 NR Description: unknown protein; protein id: At3g15300.1
  misc_feature (26)..(215): Homolog of NCBI NO: 34903674 NR Description: B1015E06.22 [Oryza sativa (japonica
  misc_feature (40)..(222): Homolog of NCBI NO: 21805688 NR Description: hypothetical protein [Arabidopsis thaliana]
  misc_feature (40)..(222): Homolog of NCBI NO: 15226165 NR Description: hypothetical protein; protein id: At2g33780.1
  misc_feature (136)..(215): Homolog of NCBI NO: 15238851 NR Description: putative protein
  misc_feature (23)..(126): Homolog of NCBI NO: 15238851 NR Description: putative protein
  misc_feature (5)..(223): Homolog of NCBI NO: 34909488 NR Description: P0481E12.14 [Oryza sativa (japonica
MEVAPAVKQLLPMAQGPNSPSSSTTSSSPSPSAAAPSPPPRQQQSQSQAPVPRIIDTTPFPTTFVQADTASFKEVVQRLTGSDTPPPAQKPAKTHGHHHHHHGGGGVGPKKPAFKLYERRIGKNNLKMIAPLAGPSPRKAAPEVLSPSVLDFPSLALGSPVTPLLADPFNRSASASPGEQDEAAAAIAQRGFFLHPSPRGVEPPRLLPLFPVTSPKMAPWPSQQ

SEQ ID NO: 16579 - protein, 212 aa, Zea mays subsp. mays
  peptide (1)..(212): Ceres Seq. ID no. 12355165
  misc_feature (97)..(207): Homolog of NCBI NO: 15232547 NR Description: unknown protein; protein id: At3g15300.1
  misc_feature (14)..(203): Homolog of NCBI NO: 34903674 NR Description: B1015E06.22 [Oryza sativa (japonica
  misc_feature (28)..(210): Homolog of NCBI NO: 21805688 NR Description: hypothetical protein [Arabidopsis thaliana]
  misc_feature (28)..(210): Homolog of NCBI NO: 15226165 NR Description: hypothetical protein; protein id: At2g33780.1
  misc_feature (124)..(203): Homolog of NCBI NO: 15238851 NR Description: putative protein
  misc_feature (11)..(114): Homolog of NCBI NO: 15238851 NR Description: putative protein
  misc_feature (1)..(211): Homolog of NCBI NO: 34909488 NR Description: P0481E12.14 [Oryza sativa (japonica
MAQGPNSPSSSTTSSSPSPSAAAPSPPPRQQQSQSQAPVPRIIDTTPFPTTFVQADTASFKEVVQRLTGSDTPPPAQKPAKTHGHHHHHHGGGGVGPKKPAFKLYERRIGKNNLKMIAPLAGPSPRKAAPEVLSPSVLDFPSLALGSPVTPLLADPFNRSASASPGEQDEAAAAIAQRGFFLHPSPRGVEPPRLLPLFPVTSPKMAPWPSQQ

SEQ ID NO: 16580 - DNA, 864 bp, Zea mays subsp. mays
  misc_feature (1)..(864): Ceres Seq. ID no. 12362860
  misc_feature: MA Experiment ID: 108689 Result: Down-regulated in Transcription
  misc_feature: MA Experiment 108689 PARAMETER Experiment Name: Zm_Drought_Roots_P Parameter: Age (day) Value: 9
  misc_feature: MA Experiment 108689 PARAMETER Experiment Name: Zm_Drought_Roots_P Parameter: Organism Value: Zea mays
  misc_feature: MA Experiment 108689 PARAMETER Experiment Name: Zm_Drought_Roots_P Parameter: Plant Line Value: 35A19
  misc_feature: MA Experiment 108689 PARAMETER Experiment Name: Zm_Drought_Roots_P Parameter: Timepoint (hr) Value: 24
  misc_feature: MA Experiment 108689 PARAMETER Experiment Name: Zm_Drought_Roots_P Parameter: Tissue Value: Roots
  misc_feature: MA Experiment 108689 PARAMETER Experiment Name: Zm_Drought_Roots_P Parameter: Treatment Value: Drought vs. No Drought
gcacgagaccattacctagaacatcctaatcgaaaaacctgcttattctggccttcgtctgacggacgcggcgctgcctcggccgccgctgccgcctccttctggccttcctccgacgccgcggagtcggaggcggcttcttgggcctgaaaggcctcgaggtccgcagccatggcgcgctcggcccggaggataggctcgtagtaggcggcgtgcgcgtccatgcacttccgcagcgcggccgtgacgtcttggcaccgctccacgacgtcaatgctggcatccgcggcatccgtctcctccacgcacttctcccacgcgacgaactcgtccttgcagccgccgcccttcatgaagagacagaacccgcactccccttgctcctcctcctcctccccctcccctgctccgctggccaccgcggaggcatcgatgaccaccgtctcagcagcctcttccgcgccgcctccaacagaaggagccgccgccgcatcgtctgcgccgccgccagctgcggcggtcgcggcgtcggaggcggagtgctggtgatcttctttggctggtgtagcggtggcctccggggaaggaggatcaggacgggaggcggctgtgtctagggaaagtgagggagaaggagaagcggcggttcccattgagctagggttcgggggctagcagatcgcggcggctgcgagactgtgatagggcgacgaacaaaagctagttatgatctgtaacgactaatgagtccgtcgataggggtgggcctaaacgtgtacaataccccatctattgaagaaacaaagcccaggccagcctagcccatatccattttgtaaaggtcattacgttctcatggaatgg

SEQ ID NO: 16581 - protein, 108 aa, Zea mays subsp. mays
  peptide (1)..(108): Ceres Seq. ID no. 12362861
  misc_feature (1)..(108): Homolog of NCBI NO: 15830904 NR Description: putative tail fiber protein [Escherichia coli
  misc_feature (1)..(108): Homolog of NCBI NO: 15801378 NR Description: putative membrane protein of prophage CP-933X
  misc_feature (1)..(108): Homolog of NCBI NO: 11359723 NR Description: proteophosphoglycan, membrane-associated
  misc_feature (1)..(108): Homolog of NCBI NO: 28828184 NR Description: similar to Leishmania major. Ppg3 [Dictyostelium
  misc_feature (1)..(108): Homolog of NCBI NO: 15901602 NR Description: cell wall surface anchor family protein
  misc_feature (1)..(108): Homolog of NCBI NO: 34809533 NR Description: Epa5p [Candida glabrata]
  misc_feature (1)..(108): Homolog of NCBI NO: 5420387 NR Description: proteophosphoglycan [Leishmania major]
MHFRSAAVTSWHRSTTSMLASAASVSSTHFSHATNSSLQPPPFMKRQNPHSPCSSSSSPSPAPLATAEASMTTVSAASSAPPPTEGAAAASSAPPPAAAVAASEAECW

SEQ ID NO: 16582 - protein, 91 aa, Zea mays subsp. mays
  peptide (1)..(91): Ceres Seq. ID no. 12362862
  misc_feature (1)..(91): Homolog of NCBI NO: 15830904 NR Description: putative tail fiber protein [Escherichia coli
  misc_feature (1)..(91): Homolog of NCBI NO: 15801378 NR Description: putative membrane protein of prophage CP-933X
  misc_feature (1)..(91): Homolog of NCBI NO: 11359723 NR Description: proteophosphoglycan, membrane-associated
  misc_feature (1)..(91): Homolog of NCBI NO: 28828184 NR Description: similar to Leishmania major. Ppg3 [Dictyostelium
  misc_feature (1)..(91): Homolog of NCBI NO: 15901602 NR Description: cell wall surface anchor family protein
  misc_feature (1)..(91): Homolog of NCBI NO: 34809533 NR Description: Epa5p [Candida glabrata]
  misc_feature (1)..(91): Homolog of NCBI NO: 5420387 NR Description: proteophosphoglycan [Leishmania major]
MLASAASVSSTHFSHATNSSLQPPPFMKRQNPHSPCSSSSSPSPAPLATAEASMTTVSAASSAPPPTEGAAAASSAPPPAAAVAASEAECW

SEQ ID NO: 16583 - protein, 65 aa, Zea mays subsp. mays
  peptide (1)..(65): Ceres Seq. ID no. 12362863
  misc_feature (1)..(65): Homolog of NCBI NO: 15830904 NR Description: putative tail fiber protein [Escherichia coli
  misc_feature (1)..(65): Homolog of NCBI NO: 15801378 NR Description: putative membrane protein of prophage CP-933X
  misc_feature (1)..(65): Homolog of NCBI NO: 11359723 NR Description: proteophosphoglycan, membrane-associated
  misc_feature (1)..(65): Homolog of NCBI NO: 28828184 NR Description: similar to Leishmania major. Ppg3 [Dictyostelium
  misc_feature (1)..(65): Homolog of NCBI NO: 15901602 NR Description: cell wall surface anchor family protein
  misc_feature (1)..(65): Homolog of NCBI NO: 34809533 NR Description: Epa5p [Candida glabrata]
  misc_feature (1)..(65): Homolog of NCBI NO: 5420387 NR Description: proteophosphoglycan [Leishmania major]
MKRQNPHSPCSSSSSPSPAPLATAEASMTTVSAASSAPPPTEGAAAASSAPPPAAAVAASEAECW

SEQ ID NO: 16584 - DNA, 1066 bp, Zea mays subsp. mays
  misc_feature (1)..(1066): Ceres Seq. ID no. 12382167
  misc_feature: MA Experiment ID: 108528 Result: Up-regulated in Transcription
  misc_feature: MA Experiment 108528 PARAMETER Experiment Name: Zm_Imbibed_Seeds_P Parameter: Age (day) Value: 5 vs. 2
  misc_feature: MA Experiment 108528 PARAMETER Experiment Name: Zm_Imbibed_Seeds_P Parameter: Organism Value: Zea mays
  misc_feature: MA Experiment 108528 PARAMETER Experiment Name: Zm_Imbibed_Seeds_P Parameter: Plant Line Value: 35A19
  misc_feature: MA Experiment 108528 PARAMETER Experiment Name: Zm_Imbibed_Seeds_P Parameter: Tissue Value: Aerial vs. Embryo
  misc_feature: MA Experiment ID: 108529 Result: Down-regulated in Transcription
  misc_feature: MA Experiment 108529 PARAMETER Experiment Name: Zm_Imbibed_Seeds_P Parameter: Age (day) Value: 5 vs. 2
  misc_feature: MA Experiment 108529 PARAMETER Experiment Name: Zm_Imbibed_Seeds_P Parameter: Organism Value: Zea mays
  misc_feature: MA Experiment 108529 PARAMETER Experiment Name: Zm_Imbibed_Seeds_P Parameter: Plant Line Value: 35A19
  misc_feature: MA Experiment 108529 PARAMETER Experiment Name: Zm_Imbibed_Seeds_P Parameter: Tissue Value: Roots vs. Embryo
  misc_feature: MA Experiment ID: 108530 Result: Up-regulated in Transcription
  misc_feature: MA Experiment 108530 PARAMETER Experiment Name: Zm_Imbibed_Seeds_P Parameter: Age (day) Value: 6 vs. 2
  misc_feature: MA Experiment 108530 PARAMETER Experiment Name: Zm_Imbibed_Seeds_P Parameter: Organism Value: Zea mays
  misc_feature: MA Experiment 108530 PARAMETER Experiment Name: Zm_Imbibed_Seeds_P Parameter: Plant Line Value: 35A19
  misc_feature: MA Experiment 108530 PARAMETER Experiment Name: Zm_Imbibed_Seeds_P Parameter: Tissue Value: Aerial vs. Embryo
  misc_feature: MA Experiment ID: 108536 Result: Down-regulated in Transcription
  misc_feature: MA Experiment 108536 PARAMETER Experiment Name: Zm_Meristem_P Parameter: Age (day) Value: 8
  misc_feature: MA Experiment 108536 PARAMETER Experiment Name: Zm_Meristem_P Parameter: Organism Value: Zea mays
  misc_feature: MA Experiment 108536 PARAMETER Experiment Name: Zm_Meristem_P Parameter: Plant Line Value: 35A19
  misc_feature: MA Experiment 108536 PARAMETER Experiment Name: Zm_Meristem_P Parameter: Tissue Value: Shoot Meristem vs. Above Shoot Meristem
  misc_feature: MA Experiment ID: 108543 Result: Up-regulated in Transcription
  misc_feature: MA Experiment ID: 108545 Result: Up-regulated in Transcription
  misc_feature: MA Experiment 108545 PARAMETER Experiment Name: Zm_Imbibed_Seeds_P Parameter: Age (day) Value: 3 vs. 2
  misc_feature: MA Experiment 108545 PARAMETER Experiment Name: Zm_Imbibed_Seeds_P Parameter: Organism Value: Zea mays
  misc_feature: MA Experiment 108545 PARAMETER Experiment Name: Zm_Imbibed_Seeds_P Parameter: Plant Line Value: 35A19
  misc_feature: MA Experiment 108545 PARAMETER Experiment Name: Zm_Imbibed_Seeds_P Parameter: Tissue Value: Aerial vs. Embryo
  misc_feature: MA Experiment ID: 108546 Result: Down-regulated in Transcription
  misc_feature: MA Experiment 108546 PARAMETER Experiment Name: Zm_Imbibed_Seeds_P Parameter: Age (day) Value: 3 vs. 2
  misc_feature: MA Experiment 108546 PARAMETER Experiment Name: Zm_Imbibed_Seeds_P Parameter: Organism Value: Zea mays
  misc_feature: MA Experiment 108546 PARAMETER Experiment Name: Zm_Imbibed_Seeds_P Parameter: Plant Line Value: 35A19
  misc_feature: MA Experiment 108546 PARAMETER Experiment Name: Zm_Imbibed_Seeds_P Parameter: Tissue Value: Roots vs. Embryo
  misc_feature: MA Experiment ID: 108547 Result: Up-regulated in Transcription
  misc_feature: MA Experiment 108547 PARAMETER Experiment Name: Zm_Imbibed_Seeds_P Parameter: Age (day) Value: 4 vs. 2
  misc_feature: MA Experiment 108547 PARAMETER Experiment Name: Zm_Imbibed_Seeds_P Parameter: Organism Value: Zea mays
  misc_feature: MA Experiment 108547 PARAMETER Experiment Name: Zm_Imbibed_Seeds_P Parameter: Plant Line Value: 35A19
  misc_feature: MA Experiment 108547 PARAMETER Experiment Name: Zm_Imbibed_Seeds_P Parameter: Tissue Value: Aerial vs. Embryo
  misc_feature: MA Experiment ID: 108688 Result: Down-regulated in Transcription
  misc_feature: MA Experiment 108688 PARAMETER Experiment Name: Zm_Embryos-Flowers__P Parameter: Tissue Value: Immature Flowers vs. Aerial+
  misc_feature: MA Experiment ID: 20000535 Result: Down-regulated in Transcription
  misc_feature: MA Experiment 20000535 PARAMETER Experiment Name: Zm_Hybrid_Seed_Dev_P Parameter: DAP Value: 30 vs. 12
  misc_feature: MA Experiment 20000535 PARAMETER Experiment Name: Zm_Hybrid_Seed_Dev_P Parameter: Organism Value: Zea mays
  misc_feature: MA Experiment 20000535 PARAMETER Experiment Name: Zm_Hybrid_Seed_Dev_P Parameter: Plant Line Value: 35A19
  misc_feature: MA Experiment 20000535 PARAMETER Experiment Name: Zm_Hybrid_Seed_Dev_P Parameter: Tissue Value: Embryo vs. Unfert Floret
ggaccattacctagaacatcctaatcaaaaaattttgagtcgcttccgagcagacgtcctccttggataaggggataggcgcgaggaagagcggcctatccgcatccgcataaatcccagtcaaattgaacgagagcgccactcccctctgctaatcccagtcaaatcgaagcaagcatggccatggcggccgtgggcgtgggcggcgcagtggcgttcctcctcccgcagcgccgccagggcgccgtcccctggagcggcgggcggcggcgggcgcccgtggcggtgcgcgcgtcgtacgaggccggggtgggcgtgatggcgaccaaggtggggatgatgacctacttcgatccggagacggggaagccggtgccggtgaccgtggtcgggttccgggagggcggcaacgtggtgacgcaggtgaagacggccgccacggacgggtacgacgccgtccaggtcgggtaccacggcgtgcgcgaggacaagctcacccgcccggagctgggccacctgggcaaggccggcgccccgccgctgcgccacctgcaggagttccggctcaccgccgtcgacgccttcgagcccggccagcccctcgacttcgccgacctcttcaaggagggcgacctcatcgacgtctccggcaactccatcggcaaggggttccaaggtggcatcaagaggcacaacttcaagcgcgggctgatgacgcacggttccaagagccaccggcagctgggttccatcggagccgggacgacgccgggccgcgtgtacaaggggaagaagatgcccgggaggatgggaggaaccaagaccaagatcaggaagctcaagatcgtcaagatcgacaacaacctccgggtgctcatgatcaagggggccgtgccagggaagcccgggaacctcctccgcataacgccggccaagatcgtcggcaagaacatccccaagaactagacttcttttttcaggggggtgaatgttgagtgtttgtgtttgttaccctgctacaaactggatgtaatcctttgccaatttccagtttttgaacacatgc

SEQ ID NO: 16585 - protein, 262 aa, Zea mays subsp. mays
  peptide (1)..(262): Ceres Seq. ID no. 12382168
  misc_feature (51)..(249): Pfam Name: Ribosomal protein L3 Pfam Description: Ribosomal protein L3
  misc_feature (45)..(257): Homolog of NCBI NO: 23042768 NR Description: hypothetical protein [Trichodesmium erythraeum
  misc_feature (45)..(257): Homolog of NCBI NO: 37519654 NR Description: 50S ribosomal protein L3 [Gloeobacter violaceus]
  misc_feature (45)..(256): Homolog of NCBI NO: 23124126 NR Description: hypothetical protein [Nostoc punctiforme]
  misc_feature (45)..(257): Homolog of NCBI NO: 17231707 NR Description: 50S ribosomal protein L3 [Nostoc sp. PCC 7120]
  misc_feature (45)..(257): Homolog of NCBI NO: 16329941 NR Description: 50S ribosomal protein L3 [Synechocystis sp. PCC
  misc_feature (45)..(257): Homolog of NCBI NO: 22297625 NR Description: 50S ribosomal protein L3 [Thermosynechococcus
  misc_feature (45)..(257): Homolog of NCBI NO: 3122742 NR Description: 50S ribosomal protein L3
  misc_feature (16)..(262): Homolog of NCBI NO: 21553426 NR Description: 50S ribosomal protein L3 [Arabidopsis thaliana]
  misc_feature (16)..(262): Homolog of NCBI NO: 15224205 NR Description: 50S ribosomal protein L3
  misc_feature (36)..(262): Homolog of NCBI NO: 7440606 NR Description: ribosomal protein L3 precursor, chloroplast -
MAMAAVGVGGAVAFLLPQRRQGAVPWSGGRRRAPVAVRASYEAGVGVMATKVGMMTYFDPETGKPVPVTVVGFREGGNVVTQVKTAATDGYDAVQVGYHGVREDKLTRPELGHLGKAGAPPLRHLQEFRLTAVDAFEPGQPLDFADLFKEGDLIDVSGNSIGKGFQGGIKRHNFKRGLMTHGSKSHRQLGSIGAGTTPGRVYKGKKMPGRMGGTKTKIRKLKIVKIDNNLRVLMIKGAVPGKPGNLLRITPAKIVGKNIPKN

SEQ ID NO: 16586 - protein, 260 aa, Zea mays subsp. mays
  peptide (1)..(260): Ceres Seq. ID no. 12382169
  misc_feature (49)..(247): Pfam Name: Ribosomal protein L3 Pfam Description: Ribosomal protein L3
  misc_feature (43)..(255): Homolog of NCBI NO: 23042768 NR Description: hypothetical protein [Trichodesmium erythraeum
  misc_feature (43)..(255): Homolog of NCBI NO: 37519654 NR Description: 50S ribosomal protein L3 [Gloeobacter violaceus]
  misc_feature (43)..(254): Homolog of NCBI NO: 23124126 NR Description: hypothetical protein [Nostoc punctiforme]
  misc_feature (43)..(255): Homolog of NCBI NO: 17231707 NR Description: 50S ribosomal protein L3 [Nostoc sp. PCC 7120]
  misc_feature (43)..(255): Homolog of NCBI NO: 16329941 NR Description: 50S ribosomal protein L3 [Synechocystis sp. PCC
  misc_feature (43)..(255): Homolog of NCBI NO: 22297625 NR Description: 50S ribosomal protein L3 [Thermosynechococcus
  misc_feature (43)..(255): Homolog of NCBI NO: 3122742 NR Description: 50S ribosomal protein L3
  misc_feature (14)..(260): Homolog of NCBI NO: 21553426 NR Description: 50S ribosomal protein L3 [Arabidopsis thaliana]
  misc_feature (14)..(260): Homolog of NCBI NO: 15224205 NR Description: 50S ribosomal protein L3
  misc_feature (34)..(260): Homolog of NCBI NO: 7440606 NR Description: ribosomal protein L3 precursor, chloroplast -
MAAVGVGGAVAFLLPQRRQGAVPWSGGRRRAPVAVRASYEAGVGVMATKVGMMTYFDPETGKPVPVTVVGFREGGNVVTQVKTAATDGYDAVQVGYHGVREDKLTRPELGHLGKAGAPPLRHLQEFRLTAVDAFEPGQPLDFADLFKEGDLIDVSGNSIGKGFQGGIKRHNFKRGLMTHGSKSHRQLGSIGAGTTPGRVYKGKKMPGRMGGTKTKIRKLKIVKIDNNLRVLMIKGAVPGKPGNLLRITPAKIVGKNIPKN

SEQ ID NO: 16587 - protein, 215 aa, Zea mays subsp. mays
  peptide (1)..(215): Ceres Seq. ID no. 12382170
  misc_feature (4)..(202): Pfam Name: Ribosomal protein L3 Pfam Description: Ribosomal protein L3
  misc_feature (1)..(210): Homolog of NCBI NO: 22297625 NR Description: 50S ribosomal protein L3 [Thermosynechococcus
  misc_feature (1)..(210): Homolog of NCBI NO: 3122742 NR Description: 50S ribosomal protein L3
  misc_feature (1)..(215): Homolog of NCBI NO: 21553426 NR Description: 50S ribosomal protein L3 [Arabidopsis thaliana]
  misc_feature (1)..(210): Homolog of NCBI NO: 37519654 NR Description: 50S ribosomal protein L3 [Gloeobacter violaceus]
  misc_feature (1)..(210): Homolog of NCBI NO: 17231707 NR Description: 50S ribosomal protein L3 [Nostoc sp. PCC 7120]
  misc_feature (1)..(210): Homolog of NCBI NO: 16329941 NR Description: 50S ribosomal protein L3 [Synechocystis sp. PCC
  misc_feature (1)..(209): Homolog of NCBI NO: 23124126 NR Description: hypothetical protein [Nostoc punctiforme]
  misc_feature (1)..(210): Homolog of NCBI NO: 23042768 NR Description: hypothetical protein [Trichodesmium erythraeum
  misc_feature (1)..(215): Homolog of NCBI NO: 15224205 NR Description: 50S ribosomal protein L3
  misc_feature (1)..(215): Homolog of NCBI NO: 7440606 NR Description: ribosomal protein L3 precursor, chloroplast -
MATKVGMMTYFDPETGKPVPVTVVGFREGGNVVTQVKTAATDGYDAVQVGYHGVREDKLTRPELGHLGKAGAPPLRHLQEFRLTAVDAFEPGQPLDFADLFKEGDLIDVSGNSIGKGFQGGIKRHNFKRGLMTHGSKSHRQLGSIGAGTTPGRVYKGKKMPGRMGGTKTKIRKLKIVKIDNNLRVLMIKGAVPGKPGNLLRITPAKIVGKNIPKN

SEQ ID NO: 16588 - DNA, 888 bp, Zea mays subsp. mays
  misc_feature (1)..(888): Ceres Seq. ID no. 12372263
  misc_feature: MA Experiment ID: 108529 Result: Up-regulated in Transcription
  misc_feature: MA Experiment 108529 PARAMETER Experiment Name: Zm_Imbibed_Seeds_P Parameter: Age (day) Value: 5 vs. 2
  misc_feature: MA Experiment 108529 PARAMETER Experiment Name: Zm_Imbibed_Seeds_P Parameter: Organism Value: Zea mays
  misc_feature: MA Experiment 108529 PARAMETER Experiment Name: Zm_Imbibed_Seeds_P Parameter: Plant Line Value: 35A19
  misc_feature: MA Experiment 108529 PARAMETER Experiment Name: Zm_Imbibed_Seeds_P Parameter: Tissue Value: Roots vs. Embryo
  misc_feature: MA Experiment ID: 108535 Result: Down-regulated in Transcription
  misc_feature: MA Experiment 108535 PARAMETER Experiment Name: Zm_Meristem_P Parameter: Age (day) Value: 8
  misc_feature: MA Experiment 108535 PARAMETER Experiment Name: Zm_Meristem_P Parameter: Organism Value: Zea mays
  misc_feature: MA Experiment 108535 PARAMETER Experiment Name: Zm_Meristem_P Parameter: Plant Line Value: 35A19
  misc_feature: MA Experiment 108535 PARAMETER Experiment Name: Zm_Meristem_P Parameter: Tissue Value: Root Meristem vs. Above Root Meristem
  misc_feature: MA Experiment ID: 108546 Result: Up-regulated in Transcription
  misc_feature: MA Experiment 108546 PARAMETER Experiment Name: Zm_Imbibed_Seeds_P Parameter: Age (day) Value: 3 vs. 2
  misc_feature: MA Experiment 108546 PARAMETER Experiment Name: Zm_Imbibed_Seeds_P Parameter: Organism Value: Zea mays
  misc_feature: MA Experiment 108546 PARAMETER Experiment Name: Zm_Imbibed_Seeds_P Parameter: Plant Line Value: 35A19
  misc_feature: MA Experiment 108546 PARAMETER Experiment Name: Zm_Imbibed_Seeds_P Parameter: Tissue Value: Roots vs. Embryo
  misc_feature: MA Experiment ID: 20000480 Result: Down-regulated in Transcription
  misc_feature: MA Experiment 20000480 PARAMETER Experiment Name: Zm_Drought_P Parameter: Age (day) Value: 11
  misc_feature: MA Experiment 20000480 PARAMETER Experiment Name: Zm_Drought_P Parameter: Organism Value: Zea mays
  misc_feature: MA Experiment 20000480 PARAMETER Experiment Name: Zm_Drought_P Parameter: Plant Line Value: 35A19
  misc_feature: MA Experiment 20000480 PARAMETER Experiment Name: Zm_Drought_P Parameter: Timepoint (hr) Value: 72
  misc_feature: MA Experiment 20000480 PARAMETER Experiment Name: Zm_Drought_P Parameter: Tissue Value: Aerial
  misc_feature: MA Experiment 20000480 PARAMETER Experiment Name: Zm_Drought_P Parameter: Treatment Value: Drought vs. No Drought
  misc_feature: MA Experiment ID: 20000492 Result: Down-regulated in Transcription
  misc_feature: MA Experiment 20000492 PARAMETER Experiment Name: Zm_Hybrid_Seed_Dev_P Parameter: DAP Value: 12
  misc_feature: MA Experiment 20000492 PARAMETER Experiment Name: Zm_Hybrid_Seed_Dev_P Parameter: Organism Value: Zea mays
  misc_feature: MA Experiment 20000492 PARAMETER Experiment Name: Zm_Hybrid_Seed_Dev_P Parameter: Plant Line Value: 35A19
  misc_feature: MA Experiment 20000492 PARAMETER Experiment Name: Zm_Hybrid_Seed_Dev_P Parameter: Tissue Value: Fert Kernel vs. Unfert Floret
  misc_feature: MA Experiment ID: 20000535 Result: Down-regulated in Transcription
  misc_feature: MA Experiment 20000535 PARAMETER Experiment Name: Zm_Hybrid_Seed_Dev_P Parameter: DAP Value: 30 vs. 12
  misc_feature: MA Experiment 20000535 PARAMETER Experiment Name: Zm_Hybrid_Seed_Dev_P Parameter: Organism Value: Zea mays
  misc_feature: MA Experiment 20000535 PARAMETER Experiment Name: Zm_Hybrid_Seed_Dev_P Parameter: Plant Line Value: 35A19
  misc_feature: MA Experiment 20000535 PARAMETER Experiment Name: Zm_Hybrid_Seed_Dev_P Parameter: Tissue Value: Embryo vs. Unfert Floret
  misc_feature: MA Experiment ID: 20001613 Result: Down-regulated in Transcription
  misc_feature: MA Experiment 20001613 PARAMETER Experiment Name: Zm_50ppm_KNO3_L-to-H_P Parameter: Age (day) Value: 20
  misc_feature: MA Experiment 20001613 PARAMETER Experiment Name: Zm_50ppm_KNO3_L-to-H_P Parameter: Organism Value: Zea mays
  misc_feature: MA Experiment 20001613 PARAMETER Experiment Name: Zm_50ppm_KNO3_L-to-H_P Parameter: Plant Line Value: 35A19
  misc_feature: MA Experiment 20001613 PARAMETER Experiment Name: Zm_50ppm_KNO3_L-to-H_P Parameter: Timepoint (hr) Value: 24
  misc_feature: MA Experiment 20001613 PARAMETER Experiment Name: Zm_50ppm_KNO3_L-to-H_P Parameter: Tissue Value: Roots
  misc_feature: MA Experiment 20001613 PARAMETER Experiment Name: Zm_50ppm_KNO3_L-to-H_P Parameter: Treatment Value: 50ppm KNO3 vs. 50ppm KCl
ctcattcgcgcgaccatggacacggacacggacacgacgacgtccaccggctcccgcctccatcccgcggccggacatgtacgctcattggccgcccggggcgccgagagcctcgtcacctgcgtcttcgcgacggtgggcacggtcctcggcgcgatcaccggtggcctcatcggcctggccacggagacgggcgtgctgcgcggcacgggcgtcggcggcatcacgggcgcgctggtgtccatggaggtcgtcgagtcgctgtggcgctccgacgagccggcaatctggagcgtcgtctacgtgctcgatgtcatctggagcttgctcaccggccgccttgtgcgcgagaaggtggaccccgccgtgctcagcgccgtcgagagccagatgagcgcagcggacacaccggccttgcatgcagaccacgccgacatcttcgacacgggcggcaccaacggcatggcgagggtcgccatggacgcgctccccgtcgttaggttcaccgagcgcagcaacgtcgacgccagcggcgagctcatcgcctgttcggtttgcctccaggaattccaagccggcgacagcgcgaggagcctgccggtgtgccgccacacgttccacctgccgtgcatcgacggctggctgctccggcacgcctcctgccccttgtgccgccgcgctgtctaggccgcgcccgttcctctaccctcaaggatagccgccaccagagcttctctgacaagcgacacccgttccttcaggctgtagccgtacgcacactggcagcgtgatttttctgtagctcatcagatgattcagatgggcgttatgtaaacattggttaatttttaacaaatgcaagtggtgcacatggcgatggccccatcc

SEQ ID NO: 16589 - protein, 228 aa, Zea mays subsp. mays
  peptide (1)..(228): Ceres Seq. ID no. 12372264
  misc_feature (183)..(224): Pfam Name: Zinc finger, C3HC4 type (RING finger) Pfam Description: Zinc finger, C3HC4 type (RING finger)
  misc_feature (46)..(228): Homolog of NCBI NO: 34901682 NR Description: P0434A03.5 [Oryza sativa (japonica
  misc_feature (37)..(226): Homolog of NCBI NO: 27524902 NR Description: NEP1-interacting protein [Arabidopsis thaliana]
  misc_feature (38)..(223): Homolog of NCBI NO: 7485279 NR Description: hypothetical protein A_TM017A05.9 - Arabidopsis
  misc_feature (37)..(223): Homolog of NCBI NO: 25411815 NR Description: hypothetical protein At2g17730 [imported] -
  misc_feature (37)..(226): Homolog of NCBI NO: 26451101 NR Description: unknown protein [Arabidopsis thaliana]
  misc_feature (27)..(226): Homolog of NCBI NO: 15239242 NR Description: putative protein; protein id: At5g66070.1
  misc_feature (37)..(228): Homolog of NCBI NO: 30680091 NR Description: expressed protein [Arabidopsis thaliana]
  misc_feature (27)..(228): Homolog of NCBI NO: 26452210 NR Description: unknown protein [Arabidopsis thaliana]
  misc_feature (31)..(228): Homolog of NCBI NO: 37536572 NR Description: hypothetical protein [Oryza sativa (japonica
  misc_feature (12)..(226): Homolog of NCBI NO: 18855037 NR Description: putative zinc finger protein [Oryza sativa]
LIRATMDTDTDTTTSTGSRLHPAAGHVRSLAARGAESLVTCVFATVGTVLGAITGGLIGLATETGVLRGTGVGGITGALVSMEVVESLWRSDEPAIWSVVYVLDVIWSLLTGRLVREKVDPAVLSAVESQMSAADTPALHADHADIFDTGGTNGMARVAMDALPVVRFTERSNVDASGELIACSVCLQEFQAGDSARSLPVCRHTFHLPCIDGWLLRHASCPLCRRAV

SEQ ID NO: 16590 - protein, 223 aa, Zea mays subsp. mays
  peptide (1)..(223): Ceres Seq. ID no. 12372265
  misc_feature (178)..(219): Pfam Name: Zinc finger, C3HC4 type (RING finger) Pfam Description: Zinc finger, C3HC4 type (RING finger)
  misc_feature (41)..(223): Homolog of NCBI NO: 34901682 NR Description: P0434A03.5 [Oryza sativa (japonica
  misc_feature (32)..(221): Homolog of NCBI NO: 27524902 NR Description: NEP1-interacting protein [Arabidopsis thaliana]
  misc_feature (33)..(218): Homolog of NCBI NO: 7485279 NR Description: hypothetical protein A_TM017A05.9 - Arabidopsis
  misc_feature (32)..(218): Homolog of NCBI NO: 25411815 NR Description: hypothetical protein At2g17730 [imported] -
  misc_feature (32)..(221): Homolog of NCBI NO: 26451101 NR Description: unknown protein [Arabidopsis thaliana]
  misc_feature (22)..(221): Homolog of NCBI NO: 15239242 NR Description: putative protein; protein id: At5g66070.1
  misc_feature (32)..(223): Homolog of NCBI NO: 30680091 NR Description: expressed protein [Arabidopsis thaliana]
  misc_feature (22)..(223): Homolog of NCBI NO: 26452210 NR Description: unknown protein [Arabidopsis thaliana]
  misc_feature (26)..(223): Homolog of NCBI NO: 37536572 NR Description: hypothetical protein [Oryza sativa (japonica
  misc_feature (7)..(221): Homolog of NCBI NO: 18855037 NR Description: putative zinc finger protein [Oryza sativa]
MDTDTDTTTSTGSRLHPAAGHVRSLAARGAESLVTCVFATVGTVLGAITGGLIGLATETGVLRGTGVGGITGALVSMEVVESLWRSDEPAIWSVVYVLDVIWSLLTGRLVREKVDPAVLSAVESQMSAADTPALHADHADIFDTGGTNGMARVAMDALPVVRFTERSNVDASGELIACSVCLQEFQAGDSARSLPVCRHTFHLPCIDGWLLRHASCPLCRRAV

SEQ ID NO: 16591 - protein, 165 aa, Zea mays subsp. mays
  peptide (1)..(165): Ceres Seq. ID no. 12372266
HSRDHGHGHGHDDVHRLPPPSRGRTCTLIGRPGRREPRHLRLRDGGHGPRRDHRWPHRPGHGDGRAARHGRRRHHGRAGVHGGRRVAVALRRAGNLERRLRARCHLELAHRPPCAREGGPRRAQRRREPDERSGHTGLACRPRRHLRHGRHQRHGEGRHGRAPRR

SEQ ID NO: 16592 - DNA, 946 bp, Zea mays subsp. mays
  misc_feature (1)..(946): Ceres Seq. ID no. 12402770
  misc_feature: MA Experiment ID: 108527 Result: Up-regulated in Transcription
  misc_feature: MA Experiment 108527 PARAMETER Experiment Name: Zm_5mM_NO_P Parameter: Age (day) Value: 8
  misc_feature: MA Experiment 108527 PARAMETER Experiment Name: Zm_5mM_NO_P Parameter: Organism Value: Zea mays
  misc_feature: MA Experiment 108527 PARAMETER Experiment Name: Zm_5mM_NO_P Parameter: Plant Line Value: 35A19
  misc_feature: MA Experiment 108527 PARAMETER Experiment Name: Zm_5mM_NO_P Parameter: Timepoint (hr) Value: 6
  misc_feature: MA Experiment 108527 PARAMETER Experiment Name: Zm_5mM_NO_P Parameter: Tissue Value: Aerial
  misc_feature: MA Experiment 108527 PARAMETER Experiment Name: Zm_5mM_NO_P Parameter: Treatment Value: 5mM NO vs. No Treatment
  misc_feature: MA Experiment ID: 108535 Result: Down-regulated in Transcription
  misc_feature: MA Experiment 108535 PARAMETER Experiment Name: Zm_Meristem_P Parameter: Age (day) Value: 8
  misc_feature: MA Experiment 108535 PARAMETER Experiment Name: Zm_Meristem_P Parameter: Organism Value: Zea mays
  misc_feature: MA Experiment 108535 PARAMETER Experiment Name: Zm_Meristem_P Parameter: Plant Line Value: 35A19
  misc_feature: MA Experiment 108535 PARAMETER Experiment Name: Zm_Meristem_P Parameter: Tissue Value: Root Meristem vs. Above Root Meristem
  misc_feature: MA Experiment ID: 108559 Result: Up-regulated in Transcription
  misc_feature: MA Experiment 108559 PARAMETER Experiment Name: Zm_5mM_NO_P Parameter: Age (day) Value: 8
  misc_feature: MA Experiment 108559 PARAMETER Experiment Name: Zm_5mM_NO_P Parameter: Organism Value: Zea mays
  misc_feature: MA Experiment 108559 PARAMETER Experiment Name: Zm_5mM_NO_P Parameter: Plant Line Value: 35A19
  misc_feature: MA Experiment 108559 PARAMETER Experiment Name: Zm_5mM_NO_P Parameter: Timepoint (hr) Value: 12
  misc_feature: MA Experiment 108559 PARAMETER Experiment Name: Zm_5mM_NO_P Parameter: Tissue Value: Aerial
  misc_feature: MA Experiment 108559 PARAMETER Experiment Name: Zm_5mM_NO_P Parameter: Treatment Value: 5mM NO vs. No Treatment
  misc_feature: MA Experiment ID: 20000478 Result: Up-regulated in Transcription
  misc_feature: MA Experiment 20000478 PARAMETER Experiment Name: Zm_5mM_SA_P Parameter: Age (day) Value: 11
  misc_feature: MA Experiment 20000478 PARAMETER Experiment Name: Zm_5mM_SA_P Parameter: Organism Value: Zea mays
  misc_feature: MA Experiment 20000478 PARAMETER Experiment Name: Zm_5mM_SA_P Parameter: Plant Line Value: 35A19
  misc_feature: MA Experiment 20000478 PARAMETER Experiment Name: Zm_5mM_SA_P Parameter: Timepoint (hr) Value: 72
  misc_feature: MA Experiment 20000478 PARAMETER Experiment Name: Zm_5mM_SA_P Parameter: Tissue Value: Aerial
  misc_feature: MA Experiment 20000478 PARAMETER Experiment Name: Zm_5mM_SA_P Parameter: Treatment Value: 5mM SA vs. No Treatment
  misc_feature: MA Experiment ID: 20000534 Result: Down-regulated in Transcription
  misc_feature: MA Experiment 20000534 PARAMETER Experiment Name: Zm_Hybrid_Pollen_P Parameter: Age (day) Value: 8
  misc_feature: MA Experiment 20000534 PARAMETER Experiment Name: Zm_Hybrid_Pollen_P Parameter: Organism Value: Zea mays
  misc_feature: MA Experiment 20000534 PARAMETER Experiment Name: Zm_Hybrid_Pollen_P Parameter: Plant Line Value: 35A19
  misc_feature: MA Experiment 20000534 PARAMETER Experiment Name: Zm_Hybrid_Pollen_P Parameter: Tissue Value: Pollen vs. Aerial
acaagcacatagccttatctgctctctctctctctccccagtccccacccgacgcgacgactccagttccaatccgtgctccgctaggtcaatcgaagagtccaaagatcccagctttcccatcccatggcgggcggcgacctcacgcctcctcctcctcctcccgaagagacgccgccggcagcggcggccgaggacctgatcgagatcgtggaggaagggtcggggcggctggacatcgcgcggtacgtggaccacgtgcgcgacctgtcggcgggcgccatcgcgacgttcgagggcacgacgcgggaccacttcgcggggcggcgcgtggtggagctccggtacgaggcgtacgcggccatggcgcggcgccgcctggcggccatactgcgggaggcccggtcgcggcacgcgctgcggcggctggccgtggcgcaccgcctgggcgccgtccccgccggcgaggccagcgtgttcgtggccgnctncgncacgcaccgcgccgacgccatggaggcctgccgntacgtcatcgacgagctcaaggcgtccgtgcccatctggaagaaggaggtgtacgacgacggcgaggtctggaaggagaaccgcgagttcctggaccgccactcnccgacggcgatgcgacggcgggcgggtgctgcgggagcaaggtcagggtccaggaggcttgacgctgatggatggcggcgcccggatccctctgtcgctccatcgcgtcgcgactcgcganncattggagcagggggtttcatgaaattctatgtactacttactcgatctccgttgattttgttctccatcttctttctttctttctgagagagactgcagcttgtacttgcacttgcacaccatgaagatgaaaggcaaatagatgctctgataaaagtcataactcataatggaatagtagttcagtttt

SEQ ID NO: 16593 - protein, 238 aa, Zea mays subsp. mays
  peptide (1)..(238): Ceres Seq. ID no. 12402771
  misc_feature (27)..(144): Pfam Name: MoaE protein Pfam Description: MoaE protein
  misc_feature (23)..(163): Homolog of NCBI NO: 17509279 NR Description: MoaE protein [Caenorhabditis elegans]
  misc_feature (38)..(158): Homolog of NCBI NO: 15615581 NR Description: molybdopterin converting factor (subunit 2)
  misc_feature (26)..(155): Homolog of NCBI NO: 13540918 NR Description: Molybdopterin converting factor, large subunit
  misc_feature (36)..(163): Homolog of NCBI NO: 21356259 NR Description: CG10238-PA [Drosophila melanogaster]
  misc_feature (23)..(163): Homolog of NCBI NO: 19353410 NR Description: Similar to molybdenum cofactor synthesis 2 [Mus
  misc_feature (23)..(163): Homolog of NCBI NO: 12832907 NR Description: unnamed protein product [Mus musculus]
  misc_feature (12)..(163): Homolog of NCBI NO: 27687539 NR Description: similar to Molybdenum cofactor synthesis protein large subunit (Molybdopterin synthase large subunit) (MPT
  misc_feature (10)..(163): Homolog of NCBI NO: 4758732 NR Description: molybdenum cofactor synthesis 2 large subunit
  misc_feature (68)..(161): Homolog of NCBI NO: 29243132 NR Description: putative molybdopterin synthase large subunit
  misc_feature (19)..(175): Homolog of NCBI NO: 15224353 NR Description: putative molybdopterin synthase large subunit
  misc_feature (121)..(121): Xaa is any aa, unknown or other
  misc_feature (122)..(122): Xaa is any aa, unknown or other
  misc_feature (123)..(123): Xaa is any aa, unknown or other
  misc_feature (134)..(134): Xaa is any aa, unknown or other
  misc_feature (169)..(169): Xaa is any aa, unknown or other
  misc_feature (210)..(210): Xaa is any aa, unknown or other
MAGGDLTPPPPPPEETPPAAAAEDLIEIVEEGSGRLDIARYVDHVRDLSAGAIATFEGTTRDHFAGRRVVELRYEAYAAMARRRLAAILREARSRHALRRLAVAHRLGAVPAGEASVFVAXXXTHRADAMEACXYVIDELKASVPIWKKEVYDDGEVWKENREFLDRHXPTAMRRRAGAAGARSGSRRLDADGWRRPDPSVAPSRRDSRXIGAGGFMKFYVLLTRSPLILFSIFFLSF

SEQ ID NO: 16594 - protein, 230 aa, Zea mays subsp. mays
  peptide (1)..(230): Ceres Seq. ID no. 12402772
  misc_feature (51)..(222): Homolog of NCBI NO: 9453857 NR Description: EBNA-1 [Cynomolgus Epstein-Barr Virus TsB-B6]
  misc_feature (25)..(223): Homolog of NCBI NO: 25989121 NR Description: putative PHA synthase [Streptomyces aureofaciens]
  misc_feature (25)..(220): Homolog of NCBI NO: 22957039 NR Description: hypothetical protein [Rhodobacter sphaeroides]
  misc_feature (44)..(209): Homolog of NCBI NO: 22960369 NR Description: hypothetical protein [Rhodobacter sphaeroides]
  misc_feature (162)..(162): Xaa is any aa, unknown or other
  misc_feature (163)..(163): Xaa is any aa, unknown or other
  misc_feature (164)..(164): Xaa is any aa, unknown or other
  misc_feature (176)..(176): Xaa is any aa, unknown or other
  misc_feature (211)..(211): Xaa is any aa, unknown or other
KHIALSALSLSPQSPPDATTPVPIRAPLGQSKSPKIPAFPSHGGRRPHASSSSSRRDAAGSGGRGPDRDRGGRVGAAGHRAVRGPRARPVGGRHRDVRGHDAGPLRGAARGGAPVRGVRGHGAAPPGGHTAGGPVAARAAAAGRGAPPGRRPRRRGQRVRGXXXHAPRRRHGGLPXRHRRAQGVRAHLEEGGVRRRRGLEGEPRVPGPPLXDGDATAGGCCGSKVRVQEA

SEQ ID NO: 16595 - protein, 159 aa, Zea mays subsp. mays
  peptide (1)..(159): Ceres Seq. ID no. 12402773
  misc_feature (1)..(65): Pfam Name: MoaE protein Pfam Description: MoaE protein
  misc_feature (1)..(84): Homolog of NCBI NO: 17509279 NR Description: MoaE protein [Caenorhabditis elegans]
  misc_feature (1)..(79): Homolog of NCBI NO: 15615581 NR Description: molybdopterin converting factor (subunit 2)
  misc_feature (1)..(76): Homolog of NCBI NO: 13540918 NR Description: Molybdopterin converting factor, large subunit
  misc_feature (1)..(84): Homolog of NCBI NO: 21356259 NR Description: CG10238-PA [Drosophila melanogaster]
  misc_feature (1)..(84): Homolog of NCBI NO: 19353410 NR Description: Similar to molybdenum cofactor synthesis 2 [Mus
  misc_feature (1)..(84): Homolog of NCBI NO: 12832907 NR Description: unnamed protein product [Mus musculus]
  misc_feature (1)..(84): Homolog of NCBI NO: 27687539 NR Description: similar to Molybdenum cofactor synthesis protein large subunit (Molybdopterin synthase large subunit) (MPT
  misc_feature (1)..(84): Homolog of NCBI NO: 4758732 NR Description: molybdenum cofactor synthesis 2 large subunit
  misc_feature (1)..(82): Homolog of NCBI NO: 29243132 NR Description: putative molybdopterin synthase large subunit
  misc_feature (1)..(96): Homolog of NCBI NO: 15224353 NR Description: putative molybdopterin synthase large subunit
  misc_feature (42)..(42): Xaa is any aa, unknown or other
  misc_feature (43)..(43): Xaa is any aa, unknown or other
  misc_feature (44)..(44): Xaa is any aa, unknown or other
  misc_feature (55)..(55): Xaa is any aa, unknown or other
  misc_feature (90)..(90): Xaa is any aa, unknown or other
  misc_feature (131)..(131): Xaa is any aa, unknown or other
MARRRLAAILREARSRHALRRLAVAHRLGAVPAGEASVFVAXXXTHRADAMEACXYVIDELKASVPIWKKEVYDDGEVWKENREFLDRHXPTAMRRRAGAAGARSGSRRLDADGWRRPDPSVAPSRRDSRXIGAGGFMKFYVLLTRSPLILFSIFFLSF

SEQ ID NO: 16596 - DNA, 974 bp, Zea mays subsp. mays
  misc_feature (1)..(974): Ceres Seq. ID no. 12357407
  misc_feature: MA Experiment ID: 108528 Result: Down-regulated in Transcription
  misc_feature: MA Experiment 108528 PARAMETER Experiment Name: Zm_Imbibed_Seeds_P Parameter: Age (day) Value: 5 vs. 2
  misc_feature: MA Experiment 108528 PARAMETER Experiment Name: Zm_Imbibed_Seeds_P Parameter: Organism Value: Zea mays
  misc_feature: MA Experiment 108528 PARAMETER Experiment Name: Zm_Imbibed_Seeds_P Parameter: Plant Line Value: 35A19
  misc_feature: MA Experiment 108528 PARAMETER Experiment Name: Zm_Imbibed_Seeds_P Parameter: Tissue Value: Aerial vs. Embryo
  misc_feature: MA Experiment ID: 108530 Result: Down-regulated in Transcription
  misc_feature: MA Experiment 108530 PARAMETER Experiment Name: Zm_Imbibed_Seeds_P Parameter: Age (day) Value: 6 vs. 2
  misc_feature: MA Experiment 108530 PARAMETER Experiment Name: Zm_Imbibed_Seeds_P Parameter: Organism Value: Zea mays
  misc_feature: MA Experiment 108530 PARAMETER Experiment Name: Zm_Imbibed_Seeds_P Parameter: Plant Line Value: 35A19
  misc_feature: MA Experiment 108530 PARAMETER Experiment Name: Zm_Imbibed_Seeds_P Parameter: Tissue Value: Aerial vs. Embryo
  misc_feature: MA Experiment ID: 108535 Result: Down-regulated in Transcription
  misc_feature: MA Experiment 108535 PARAMETER Experiment Name: Zm_Meristem_P Parameter: Age (day) Value: 8
  misc_feature: MA Experiment 108535 PARAMETER Experiment Name: Zm_Meristem_P Parameter: Organism Value: Zea mays
  misc_feature: MA Experiment 108535 PARAMETER Experiment Name: Zm_Meristem_P Parameter: Plant Line Value: 35A19
  misc_feature: MA Experiment 108535 PARAMETER Experiment Name: Zm_Meristem_P Parameter: Tissue Value: Root Meristem vs. Above Root Meristem
  misc_feature: MA Experiment ID: 108536 Result: Up-regulated in Transcription
  misc_feature: MA Experiment 108536 PARAMETER Experiment Name: Zm_Meristem_P Parameter: Age (day) Value: 8
  misc_feature: MA Experiment 108536 PARAMETER Experiment Name: Zm_Meristem_P Parameter: Organism Value: Zea mays
  misc_feature: MA Experiment 108536 PARAMETER Experiment Name: Zm_Meristem_P Parameter: Plant Line Value: 35A19
  misc_feature: MA Experiment 108536 PARAMETER Experiment Name: Zm_Meristem_P Parameter: Tissue Value: Shoot Meristem vs. Above Shoot Meristem
  misc_feature: MA Experiment ID: 108543 Result: Up-regulated in Transcription
  misc_feature: MA Experiment ID: 108545 Result: Down-regulated in Transcription
  misc_feature: MA Experiment 108545 PARAMETER Experiment Name: Zm_Imbibed_Seeds_P Parameter: Age (day) Value: 3 vs. 2
  misc_feature: MA Experiment 108545 PARAMETER Experiment Name: Zm_Imbibed_Seeds_P Parameter: Organism Value: Zea mays
  misc_feature: MA Experiment 108545 PARAMETER Experiment Name: Zm_Imbibed_Seeds_P Parameter: Plant Line Value: 35A19
  misc_feature: MA Experiment 108545 PARAMETER Experiment Name: Zm_Imbibed_Seeds_P Parameter: Tissue Value: Aerial vs. Embryo
  misc_feature: MA Experiment ID: 20000108 Result: Down-regulated in Transcription
  misc_feature: MA Experiment 20000108 PARAMETER Experiment Name: Zm_Root-Tips_P Parameter: Age (day) Value: 12
  misc_feature: MA Experiment 20000108 PARAMETER Experiment Name: Zm_Root-Tips_P Parameter: Organism Value: Zea mays
  misc_feature: MA Experiment 20000108 PARAMETER Experiment Name: Zm_Root-Tips_P Parameter: Tissue Value: Root tips vs. Root mid region    35
  misc_feature: MA Experiment 20000108 PARAMETER Experiment Name: Zm_Root-Tips_P Parameter: Tissue Value: Root tips vs. Root mid region   Sequence Listing-Misc Features (4)
  misc_feature: MA Experiment ID: 20000478 Result: Up-regulated in Transcription
  misc_feature: MA Experiment 20000478 PARAMETER Experiment Name: Zm_5mM_SA_P Parameter: Age (day) Value: 11
  misc_feature: MA Experiment 20000478 PARAMETER Experiment Name: Zm_5mM_SA_P Parameter: Organism Value: Zea mays
  misc_feature: MA Experiment 20000478 PARAMETER Experiment Name: Zm_5mM_SA_P Parameter: Plant Line Value: 35A19
  misc_feature: MA Experiment 20000478 PARAMETER Experiment Name: Zm_5mM_SA_P Parameter: Timepoint (hr) Value: 72
  misc_feature: MA Experiment 20000478 PARAMETER Experiment Name: Zm_5mM_SA_P Parameter: Tissue Value: Aerial
  misc_feature: MA Experiment 20000478 PARAMETER Experiment Name: Zm_5mM_SA_P Parameter: Treatment Value: 5mM SA vs. No Treatment
  misc_feature: MA Experiment ID: 20000479 Result: Up-regulated in Transcription
  misc_feature: MA Experiment 20000479 PARAMETER Experiment Name: Zm_Drought_P Parameter: Age (day) Value: 10
  misc_feature: MA Experiment 20000479 PARAMETER Experiment Name: Zm_Drought_P Parameter: Organism Value: Zea mays
  misc_feature: MA Experiment 20000479 PARAMETER Experiment Name: Zm_Drought_P Parameter: Plant Line Value: 35A19
  misc_feature: MA Experiment 20000479 PARAMETER Experiment Name: Zm_Drought_P Parameter: Timepoint (hr) Value: 48
  misc_feature: MA Experiment 20000479 PARAMETER Experiment Name: Zm_Drought_P Parameter: Tissue Value: Aerial
  misc_feature: MA Experiment 20000479 PARAMETER Experiment Name: Zm_Drought_P Parameter: Treatment Value: Drought vs. No Drought
  misc_feature: MA Experiment ID: 20000492 Result: Down-regulated in Transcription
  misc_feature: MA Experiment 20000492 PARAMETER Experiment Name: Zm_Hybrid_Seed_Dev_P Parameter: DAP Value: 12
  misc_feature: MA Experiment 20000492 PARAMETER Experiment Name: Zm_Hybrid_Seed_Dev_P Parameter: Organism Value: Zea mays
  misc_feature: MA Experiment 20000492 PARAMETER Experiment Name: Zm_Hybrid_Seed_Dev_P Parameter: Plant Line Value: 35A19
  misc_feature: MA Experiment 20000492 PARAMETER Experiment Name: Zm_Hybrid_Seed_Dev_P Parameter: Tissue Value: Fert Kernel vs. Unfert Floret
  misc_feature: MA Experiment ID: 20000534 Result: Down-regulated in Transcription
  misc_feature: MA Experiment 20000534 PARAMETER Experiment Name: Zm_Hybrid_Pollen_P Parameter: Age (day) Value: 8
  misc_feature: MA Experiment 20000534 PARAMETER Experiment Name: Zm_Hybrid_Pollen_P Parameter: Organism Value: Zea mays
  misc_feature: MA Experiment 20000534 PARAMETER Experiment Name: Zm_Hybrid_Pollen_P Parameter: Plant Line Value: 35A19
  misc_feature: MA Experiment 20000534 PARAMETER Experiment Name: Zm_Hybrid_Pollen_P Parameter: Tissue Value: Pollen vs. Aerial
  misc_feature: MA Experiment ID: 20000535 Result: Down-regulated in Transcription
  misc_feature: MA Experiment 20000535 PARAMETER Experiment Name: Zm_Hybrid_Seed_Dev_P Parameter: DAP Value: 30 vs. 12
  misc_feature: MA Experiment 20000535 PARAMETER Experiment Name: Zm_Hybrid_Seed_Dev_P Parameter: Organism Value: Zea mays
  misc_feature: MA Experiment 20000535 PARAMETER Experiment Name: Zm_Hybrid_Seed_Dev_P Parameter: Plant Line Value: 35A19
  misc_feature: MA Experiment 20000535 PARAMETER Experiment Name: Zm_Hybrid_Seed_Dev_P Parameter: Tissue Value: Embryo vs. Unfert Floret
accatttcgatacgcgcgagggaacggggccggccggccggccggggatcggaactgaagtgtgggcacacaagagtcacaacagggggagtgggggacattccaatcagttccctgcgtgtgagcgatgcagcgggacgcgagaagctggtcgccggcgccggccacggacgccgccggcccttacgcgatgccttcgcccgtgcagccgtcgaccaagagcacgaaggagacggtgaagaatgcgctgtcgcggtgggggcggaaggtcggggaggcgaccaggaaggccgaggacctgtcgcgcaacacatggcagcacttgaggacggcgccgagcatcgcggaggccgcggtggggaggatcgcgcaggggaccaaggtgctggcggagggcggccacgacaggatattccgccaggccttcagcgccccgcccgacgagcagctgcgcaagtcctacgcttgctacctctccacggccgccggcccggtgatgggcgtcctgtacctgtccacggccagggtcgccttctgcagcgacagcccgctgtcctacgaggcttccggcggcgacagaacggagtggacccactacaaggtggcgattcctctccaacggctgcgggcggcgagcccgtccgccaacaagacgaagcccgcggagaagttcgtccagctggtgtcggtggacagccaagagttctggttcatgggcttcgtcaactacgacggcgcggtggcgcacctgcaggaagcgctgagcgggttccgcaacctgcaggcgtgacatggaggacctcaataaaatgctcagtgttgtcttgtacgtgctcgccacaactgattgatctgcgtgtgttgccgtgctagtgtttgcatcgtgttttgcgtgtgcggatttgcatgtcattttttgatttggttgccattgtcagcgagagaacagtccaatcattttattcagatttcag

SEQ ID NO: 16597 - protein, 290 aa, Zea mays subsp. mays
  peptide (1)..(290): Ceres Seq. ID no. 12357408
TISIRARERGRPAGRGSELKCGHTRVTTGGVGDIPISSLRVSDAAGREKLVAGAGHGRRRPLRDAFARAAVDQEHEGDGEECAVAVGAEGRGGDQEGRGPVAQHMAALEDGAEHRGGRGGEDRAGDQGAGGGRPRQDIPPGLQRPARRAAAQVLRLLPLHGRRPGDGRPVPVHGQGRLLQRQPAVLRGFRRRQNGVDPLQGGDSSPTAAGGEPVRQQDEARGEVRPAGVGGQPRVLVHGLRQLRRRGGAPAGSAERVPQPAGVTWRTSIKCSVLSCTCSPQLIDLRVLPC

SEQ ID NO: 16598 - protein, 220 aa, Zea mays subsp. mays
  peptide (1)..(220): Ceres Seq. ID no. 12357409
  misc_feature (94)..(173): Pfam Name: GRAM domain Pfam Description: GRAM domain
  misc_feature (1)..(220): Homolog of NCBI NO: 15240044 NR Description: ABA-responsive protein - like; protein id:
  misc_feature (159)..(212): Homolog of NCBI NO: 15236123 NR Description: putative protein; protein id: At4g40100.1
  misc_feature (4)..(129): Homolog of NCBI NO: 15236123 NR Description: putative protein; protein id: At4g40100.1
  misc_feature (34)..(214): Homolog of NCBI NO: 34906818 NR Description: contains EST C91668(E31216)~similar to FH protein
  misc_feature (12)..(212): Homolog of NCBI NO: 29788871 NR Description: putative ABA-responsive protein
  misc_feature (17)..(212): Homolog of NCBI NO: 15217869 NR Description: FH protein interacting protein FIP1
  misc_feature (9)..(220): Homolog of NCBI NO: 34902414 NR Description: Putative FH protein interacting protein FIP1
  misc_feature (11)..(212): Homolog of NCBI NO: 26452129 NR Description: unknown protein [Arabidopsis thaliana]
  misc_feature (11)..(212): Homolog of NCBI NO: 21592789 NR Description: unknown [Arabidopsis thaliana]
  misc_feature (11)..(212): Homolog of NCBI NO: 18399985 NR Description: Expressed protein
MQRDARSWSPAPATDAAGPYAMPSPVQPSTKSTKETVKNALSRWGRKVGEATRKAEDLSRNTWQHLRTAPSIAEAAVGRIAQGTKVLAEGGHDRIFRQAFSAPPDEQLRKSYACYLSTAAGPVMGVLYLSTARVAFCSDSPLSYEASGGDRTEWTHYKVAIPLQRLRAASPSANKTKPAEKFVQLVSVDSQEFWFMGFVNYDGAVAHLQEALSGFRNLQA

SEQ ID NO: 16599 - protein, 199 aa, Zea mays subsp. mays
  peptide (1)..(199): Ceres Seq. ID no. 12357410
  misc_feature (73)..(152): Pfam Name: GRAM domain Pfam Description: GRAM domain
  misc_feature (1)..(199): Homolog of NCBI NO: 15240044 NR Description: ABA-responsive protein - like; protein id:
  misc_feature (138)..(191): Homolog of NCBI NO: 15236123 NR Description: putative protein; protein id: At4g40100.1
  misc_feature (1)..(108): Homolog of NCBI NO: 15236123 NR Description: putative protein; protein id: At4g40100.1
  misc_feature (13)..(193): Homolog of NCBI NO: 34906818 NR Description: contains EST C91668(E31216)~similar to FH protein
  misc_feature (1)..(191): Homolog of NCBI NO: 29788871 NR Description: putative ABA-responsive protein
  misc_feature (1)..(191): Homolog of NCBI NO: 15217869 NR Description: FH protein interacting protein FIP1
  misc_feature (1)..(199): Homolog of NCBI NO: 34902414 NR Description: Putative FH protein interacting protein FIP1
  misc_feature (1)..(191): Homolog of NCBI NO: 26452129 NR Description: unknown protein [Arabidopsis thaliana]
  misc_feature (1)..(191): Homolog of NCBI NO: 21592789 NR Description: unknown [Arabidopsis thaliana]
  misc_feature (1)..(191): Homolog of NCBI NO: 18399985 NR Description: Expressed protein
MPSPVQPSTKSTKETVKNALSRWGRKVGEATRKAEDLSRNTWQHLRTAPSIAEAAVGRIAQGTKVLAEGGHDRIFRQAFSAPPDEQLRKSYACYLSTAAGPVMGVLYLSTARVAFCSDSPLSYEASGGDRTEWTHYKVAIPLQRLRAASPSANKTKPAEKFVQLVSVDSQEFWFMGFVNYDGAVAHLQEALSGFRNLQA

SEQ ID NO: 16600 - DNA, 1505 bp, Zea mays subsp. mays
  misc_feature (1)..(1505): Ceres Seq. ID no. 12358876
  misc_feature: MA Experiment ID: 108527 Result: Up-regulated in Transcription
  misc_feature: MA Experiment 108527 PARAMETER Experiment Name: Zm_5mM_NO_P Parameter: Age (day) Value: 8
  misc_feature: MA Experiment 108527 PARAMETER Experiment Name: Zm_5mM_NO_P Parameter: Organism Value: Zea mays
  misc_feature: MA Experiment 108527 PARAMETER Experiment Name: Zm_5mM_NO_P Parameter: Plant Line Value: 35A19
  misc_feature: MA Experiment 108527 PARAMETER Experiment Name: Zm_5mM_NO_P Parameter: Timepoint (hr) Value: 6
  misc_feature: MA Experiment 108527 PARAMETER Experiment Name: Zm_5mM_NO_P Parameter: Tissue Value: Aerial
  misc_feature: MA Experiment 108527 PARAMETER Experiment Name: Zm_5mM_NO_P Parameter: Treatment Value: 5mM NO vs. No Treatment
  misc_feature: MA Experiment ID: 108559 Result: Up-regulated in Transcription
  misc_feature: MA Experiment 108559 PARAMETER Experiment Name: Zm_5mM_NO_P Parameter: Age (day) Value: 8
  misc_feature: MA Experiment 108559 PARAMETER Experiment Name: Zm_5mM_NO_P Parameter: Organism Value: Zea mays
  misc_feature: MA Experiment 108559 PARAMETER Experiment Name: Zm_5mM_NO_P Parameter: Plant Line Value: 35A19
  misc_feature: MA Experiment 108559 PARAMETER Experiment Name: Zm_5mM_NO_P Parameter: Timepoint (hr) Value: 12
  misc_feature: MA Experiment 108559 PARAMETER Experiment Name: Zm_5mM_NO_P Parameter: Tissue Value: Aerial
  misc_feature: MA Experiment 108559 PARAMETER Experiment Name: Zm_5mM_NO_P Parameter: Treatment Value: 5mM NO vs. No Treatment
aaaaaaaacacacggtacgcgcttctcctcctcgcttgccgccgccgccgccgccgcgatggaaaaggagaagctctcgttctccatatcctcctcgaagcagcggccccccaagcctcccgcacgacctgcggccgccgcagacgacgatgacctccgctccgcgcccgctccgggccagcagtacgtcaccgagttcgatccgtcccaaaccctagccgccgcctgcgcggcgcgcgccgtcatcgcgccgctccccaactccggcaacttcctcacccaccgcccacgcaaaccgtcctcgctccccacccctgaggaggaggccgccctcgccgcggaatccggcggctggggccccgccttcgtcctcgacacctcgaccgctcccgaagacccatcatccaaaatcggctacggcctcactcgccgcaacggcgccatcgacgctgctgctgccaaggaaccggagaaggcgccgccaccgtcaccgtcaccgcctcgggccactgatgctgcctccgctgccggcaacctcatgctgcagcggtacaaggaggacatggaaggccttccggagcaccgtggaatggacgagttcaatgagatacccgtggagggatttggcgcggctctccttgctggatacggctggacagaaggtaagggcattggtaggaacaataagatgggggataccaaagttcttgaataccaccgccgtgctggcacacaggggttagggtacaacccctctgaagcagaccctaggaagactcgttctggcgactggattgttggcaagaaggtgtcagagggcgggagtgcgaagagagatcgaggcagtagagataggatggaagagagcgattctagtgcccagaagaagagatataatgaggaaaggtctgagaaggagggccgtgaaaaggtgaggaatggccgtggtagccgagaaggcacaagtaatgcagcggtactcatagcaatgtactgtggttgcagagccatatcagggttcggattgttagtcagaaactaagcaagaggctatacttgatgaagggtaaggttgtcgatgtggtggggcctacaaaatgtgacatcatgatggatgatggatcagagttggtgcagggggtggagcaagatatgcttgaaactgtacttccacggacgaatgggcgggtgcttgtgctttatgggaagcacaagggtttatatgggcacctggtagagaagaattccaaagaagagatcggattggtggaggatgcagatacaaaagatattgtacgtgttagatatgatcagatggcagaatacactggagatccagagttgcttggctactgattaagtttttttgggggaggatatgcttaccgggagccttctgctatgcttggtattatatttttcttctttacaaactgtcaagaattgctgcaatgtaaaaccttgaacaaactggcggttgctatgcatttcttacttgtctttgc

SEQ ID NO: 16601 - protein, 346 aa, Zea mays subsp. mays
  peptide (1)..(346): Ceres Seq. ID no. 12358877
  misc_feature (205)..(250): Pfam Name: G-patch domain Pfam Description: G-patch domain
  misc_feature (189)..(254): Homolog of NCBI NO: 38571790 NR Description: DNA segment, Chr X, Immunex 41, expressed [Mus
  misc_feature (189)..(254): Homolog of NCBI NO: 30424593 NR Description: DNA segment, Chr X, Immunex 41, expressed [Mus
  misc_feature (84)..(158): Homolog of NCBI NO: 34894006 NR Description: P0672D08.13 [Oryza sativa (japonica
  misc_feature (189)..(254): Homolog of NCBI NO: 15811782 NR Description: T54 protein [Homo sapiens]
  misc_feature (174)..(254): Homolog of NCBI NO: 15217576 NR Description: unknown protein
  misc_feature (179)..(338): Homolog of NCBI NO: 21553528 NR Description: unknown [Arabidopsis thaliana]
  misc_feature (179)..(338): Homolog of NCBI NO: 18416469 NR Description: expressed protein
KKTHGTRFSSSLAAAAAAAMEKEKLSFSISSSKQRPPKPPARPAAAADDDDLRSAPAPGQQYVTEFDPSQTLAAACAARAVIAPLPNSGNFLTHRPRKPSSLPTPEEEAALAAESGGWGPAFVLDTSTAPEDPSSKIGYGLTRRNGAIDAAAAKEPEKAPPPSPSPPRATDAASAAGNLMLQRYKEDMEGLPEHRGMDEFNEIPVEGFGAALLAGYGWTEGKGIGRNNKMGDTKVLEYHRRAGTQGLGYNPSEADPRKTRSGDWIVGKKVSEGGSAKRDRGSRDRMEESDSSAQKKRYNEERSEKEGREKVRNGRGSREGTSNAAVLIAMYCGCRAISGFGLLVRN

SEQ ID NO: 16602 - protein, 327 aa, Zea mays subsp. mays
  peptide (1)..(327): Ceres Seq. ID no. 12358878
  misc_feature (186)..(231): Pfam Name: G-patch domain Pfam Description: G-patch domain
  misc_feature (170)..(235): Homolog of NCBI NO: 15811782 NR Description: T54 protein [Homo sapiens]
  misc_feature (155)..(235): Homolog of NCBI NO: 15217576 NR Description: unknown protein
  misc_feature (170)..(235): Homolog of NCBI NO: 38571790 NR Description: DNA segment, Chr X, Immunex 41, expressed [Mus
  misc_feature (65)..(139): Homolog of NCBI NO: 34894006 NR Description: P0672D08.13 [Oryza sativa (japonica
  misc_feature (170)..(235): Homolog of NCBI NO: 30424593 NR Description: DNA segment, Chr X, Immunex 41, expressed [Mus
  misc_feature (160)..(319): Homolog of NCBI NO: 21553528 NR Description: unknown [Arabidopsis thaliana]
  misc_feature (160)..(319): Homolog of NCBI NO: 18416469 NR Description: expressed protein
MEKEKLSFSISSSKQRPPKPPARPAAAADDDDLRSAPAPGQQYVTEFDPSQTLAAACAARAVIAPLPNSGNFLTHRPRKPSSLPTPEEEAALAAESGGWGPAFVLDTSTAPEDPSSKIGYGLTRRNGAIDAAAAKEPEKAPPPSPSPPRATDAASAAGNLMLQRYKEDMEGLPEHRGMDEFNEIPVEGFGAALLAGYGWTEGKGIGRNNKMGDTKVLEYHRRAGTQGLGYNPSEADPRKTRSGDWIVGKKVSEGGSAKRDRGSRDRMEESDSSAQKKRYNEERSEKEGREKVRNGRGSREGTSNAAVLIAMYCGCRAISGFGLLVRN

SEQ ID NO: 16603 - DNA, 946 bp, Zea mays subsp. mays
  misc_feature (1)..(946): Ceres Seq. ID no. 12348256
  misc_feature: MA Experiment ID: 108535 Result: Down-regulated in Transcription
  misc_feature: MA Experiment 108535 PARAMETER Experiment Name: Zm_Meristem_P Parameter: Age (day) Value: 8
  misc_feature: MA Experiment 108535 PARAMETER Experiment Name: Zm_Meristem_P Parameter: Organism Value: Zea mays
  misc_feature: MA Experiment 108535 PARAMETER Experiment Name: Zm_Meristem_P Parameter: Plant Line Value: 35A19
  misc_feature: MA Experiment 108535 PARAMETER Experiment Name: Zm_Meristem_P Parameter: Tissue Value: Root Meristem vs. Above Root Meristem
  misc_feature: MA Experiment ID: 108544 Result: Up-regulated in Transcription
  misc_feature: MA Experiment ID: 20000108 Result: Down-regulated in Transcription
  misc_feature: MA Experiment 20000108 PARAMETER Experiment Name: Zm_Root-Tips_P Parameter: Age (day) Value: 12
  misc_feature: MA Experiment 20000108 PARAMETER Experiment Name: Zm_Root-Tips_P Parameter: Organism Value: Zea mays
  misc_feature: MA Experiment 20000108 PARAMETER Experiment Name: Zm_Root-Tips_P Parameter: Tissue Value: Root tips vs. Root mid region    35
  misc_feature: MA Experiment 20000108 PARAMETER Experiment Name: Zm_Root-Tips_P Parameter: Tissue Value: Root tips vs. Root mid region   Sequence Listing-Misc Features (4)
  misc_feature: MA Experiment ID: 20000479 Result: Up-regulated in Transcription
  misc_feature: MA Experiment 20000479 PARAMETER Experiment Name: Zm_Drought_P Parameter: Age (day) Value: 10
  misc_feature: MA Experiment 20000479 PARAMETER Experiment Name: Zm_Drought_P Parameter: Organism Value: Zea mays
  misc_feature: MA Experiment 20000479 PARAMETER Experiment Name: Zm_Drought_P Parameter: Plant Line Value: 35A19
  misc_feature: MA Experiment 20000479 PARAMETER Experiment Name: Zm_Drought_P Parameter: Timepoint (hr) Value: 48
  misc_feature: MA Experiment 20000479 PARAMETER Experiment Name: Zm_Drought_P Parameter: Tissue Value: Aerial
  misc_feature: MA Experiment 20000479 PARAMETER Experiment Name: Zm_Drought_P Parameter: Treatment Value: Drought vs. No Drought
  misc_feature: MA Experiment ID: 20000480 Result: Up-regulated in Transcription
  misc_feature: MA Experiment 20000480 PARAMETER Experiment Name: Zm_Drought_P Parameter: Age (day) Value: 11
  misc_feature: MA Experiment 20000480 PARAMETER Experiment Name: Zm_Drought_P Parameter: Organism Value: Zea mays
  misc_feature: MA Experiment 20000480 PARAMETER Experiment Name: Zm_Drought_P Parameter: Plant Line Value: 35A19
  misc_feature: MA Experiment 20000480 PARAMETER Experiment Name: Zm_Drought_P Parameter: Timepoint (hr) Value: 72
  misc_feature: MA Experiment 20000480 PARAMETER Experiment Name: Zm_Drought_P Parameter: Tissue Value: Aerial
  misc_feature: MA Experiment 20000480 PARAMETER Experiment Name: Zm_Drought_P Parameter: Treatment Value: Drought vs. No Drought
  misc_feature: MA Experiment ID: 20000626 Result: Up-regulated in Transcription
  misc_feature: MA Experiment 20000626 PARAMETER Experiment Name: Zm_Herbicide-Treatments_P Parameter: Timepoint (hr) Value: 12
  misc_feature: MA Experiment 20000626 PARAMETER Experiment Name: Zm_Herbicide-Treatments_P Parameter: Tissue Value: Aerial
  misc_feature: MA Experiment 20000626 PARAMETER Experiment Name: Zm_Herbicide-Treatments_P Parameter: Treatment Value: Roundup vs. No Treatment
ctcggtctcggactacggttgagcgaagtcgtcactgtaatctactgatctgcaaatggcggaggtggaggcgacggtggggcgactgatgctgtactcgtactggcgcagctcgtgctcccaccgtgcccgcatcgctctcaatctcaaaggtgtggattacgagtacaaggcggtgaaccttctcaagggcgagcagtctgatccagaattcgtcaagcttaatcctatgaagttcgtccctgcgttggttgatggcagttctgtaataggtgactcttacgcgataacactgtatttggaggacaagtacccagagcctcctcttctacctcaagaccttcaaaagaaagctttgaatcaccagattgcaagcattgtagcttctggtattcaacctctccataacctcacagtgttgaggttcattgaccagaaggttggtgcaggggagagtgtgttgtggactcaacaacaaatcgagagaggtttcacagctattgagaacctgatacaactaaaaggatgcgccgggaagtatgcaacaggagatgaagtccaactggcagatgtattccttgcaccccagatctatgcagccattgaacgcactaaaattgacatgtcaaactacctcactcttgctaggctccactcggagtacatgtcacaccctgcgtttgaagcagcgctccctggcaagcaaccggacgccccttcatcctcctaggaactgcaccctagtgtgttgttcctctgaatatatatatatatatatgtatacttctgtaagaattaataattacagagtttcgtctgctatgtcgaaaaatgtcaaaagtttttgtgatttcagagactagcggcatgaagcgtcgttgtggatctggccgtcgtcctcatgtggcatctgtgatttcagggcatgcacttcgtcttagaaggg

SEQ ID NO: 16604 - protein, 224 aa, Zea mays subsp. mays
  peptide (1)..(224): Ceres Seq. ID no. 12348257
  misc_feature (13)..(84): Pfam Name: Glutathione S-transferase, N-terminal domain Pfam Description: Glutathione S-transferase, N-terminal domain
  misc_feature (1)..(222): Homolog of NCBI NO: 11132235 NR Description: Glutathione S-transferase zeta class
  misc_feature (10)..(223): Homolog of NCBI NO: 15226949 NR Description: glutathione transferase, putative; protein id:
  misc_feature (10)..(222): Homolog of NCBI NO: 24061762 NR Description: glutathione S-transferase [Capsicum annuum]
  misc_feature (10)..(224): Homolog of NCBI NO: 28932698 NR Description: glutathione S-transferase zeta [Brassica napus]
  misc_feature (10)..(224): Homolog of NCBI NO: 15226952 NR Description: glutathione transferase, putative
  misc_feature (10)..(224): Homolog of NCBI NO: 28932694 NR Description: glutathione S-transferase zeta [Brassica napus]
  misc_feature (10)..(53): Homolog of NCBI NO: 20975738 NR Description: glutathione s-transferase [Oryza sativa (japonica
  misc_feature (84)..(224): Homolog of NCBI NO: 20975738 NR Description: glutathione s-transferase [Oryza sativa (japonica
  misc_feature (12)..(224): Homolog of NCBI NO: 11385485 NR Description: glutathione S-transferase GST 17 [Zea mays]
MAEVEATVGRLMLYSYWRSSCSHRARIALNLKGVDYEYKAVNLLKGEQSDPEFVKLNPMKFVPALVDGSSVIGDSYAITLYLEDKYPEPPLLPQDLQKKALNHQIASIVASGIQPLHNLTVLRFIDQKVGAGESVLWTQQQIERGFTAIENLIQLKGCAGKYATGDEVQLADVFLAPQIYAAIERTKIDMSNYLTLARLHSEYMSHPAFEAALPGKQPDAPSSS

SEQ ID NO: 16605 - protein, 213 aa, Zea mays subsp. mays
  peptide (1)..(213): Ceres Seq. ID no. 12348258
  misc_feature (2)..(73): Pfam Name: Glutathione S-transferase, N-terminal domain Pfam Description: Glutathione S-transferase, N-terminal domain
  misc_feature (1)..(211): Homolog of NCBI NO: 11132235 NR Description: Glutathione S-transferase zeta class
  misc_feature (1)..(212): Homolog of NCBI NO: 15226949 NR Description: glutathione transferase, putative; protein id:
  misc_feature (1)..(211): Homolog of NCBI NO: 24061762 NR Description: glutathione S-transferase [Capsicum annuum]
  misc_feature (1)..(213): Homolog of NCBI NO: 28932698 NR Description: glutathione S-transferase zeta [Brassica napus]
  misc_feature (1)..(213): Homolog of NCBI NO: 15226952 NR Description: glutathione transferase, putative
  misc_feature (1)..(213): Homolog of NCBI NO: 28932694 NR Description: glutathione S-transferase zeta [Brassica napus]
  misc_feature (1)..(42): Homolog of NCBI NO: 20975738 NR Description: glutathione s-transferase [Oryza sativa (japonica
  misc_feature (73)..(213): Homolog of NCBI NO: 20975738 NR Description: glutathione s-transferase [Oryza sativa (japonica
  misc_feature (1)..(213): Homolog of NCBI NO: 11385485 NR Description: glutathione S-transferase GST 17 [Zea mays]
MLYSYWRSSCSHRARIALNLKGVDYEYKAVNLLKGEQSDPEFVKLNPMKFVPALVDGSSVIGDSYAITLYLEDKYPEPPLLPQDLQKKALNHQIASIVASGIQPLHNLTVLRFIDQKVGAGESVLWTQQQIERGFTAIENLIQLKGCAGKYATGDEVQLADVFLAPQIYAAIERTKIDMSNYLTLARLHSEYMSHPAFEAALPGKQPDAPSSS

SEQ ID NO: 16606 - protein, 166 aa, Zea mays subsp. mays
  peptide (1)..(166): Ceres Seq. ID no. 12348259
  misc_feature (1)..(164): Homolog of NCBI NO: 11132235 NR Description: Glutathione S-transferase zeta class
  misc_feature (1)..(165): Homolog of NCBI NO: 15226949 NR Description: glutathione transferase, putative; protein id:
  misc_feature (1)..(164): Homolog of NCBI NO: 24061762 NR Description: glutathione S-transferase [Capsicum annuum]
  misc_feature (1)..(166): Homolog of NCBI NO: 28932698 NR Description: glutathione S-transferase zeta [Brassica napus]
  misc_feature (1)..(166): Homolog of NCBI NO: 15226952 NR Description: glutathione transferase, putative
  misc_feature (1)..(166): Homolog of NCBI NO: 28932694 NR Description: glutathione S-transferase zeta [Brassica napus]
  misc_feature (26)..(166): Homolog of NCBI NO: 20975738 NR Description: glutathione s-transferase [Oryza sativa (japonica
  misc_feature (1)..(166): Homolog of NCBI NO: 11385485 NR Description: glutathione S-transferase GST 17 [Zea mays]
MKFVPALVDGSSVIGDSYAITLYLEDKYPEPPLLPQDLQKKALNHQIASIVASGIQPLHNLTVLRFIDQKVGAGESVLWTQQQIERGFTAIENLIQLKGCAGKYATGDEVQLADVFLAPQIYAAIERTKIDMSNYLTLARLHSEYMSHPAFEAALPGKQPDAPSSS

SEQ ID NO: 16607 - DNA, 933 bp, Zea mays subsp. mays
  misc_feature (1)..(933): Ceres Seq. ID no. 12354577
  misc_feature: MA Experiment ID: 108689 Result: Up-regulated in Transcription
  misc_feature: MA Experiment 108689 PARAMETER Experiment Name: Zm_Drought_Roots_P Parameter: Age (day) Value: 9
  misc_feature: MA Experiment 108689 PARAMETER Experiment Name: Zm_Drought_Roots_P Parameter: Organism Value: Zea mays
  misc_feature: MA Experiment 108689 PARAMETER Experiment Name: Zm_Drought_Roots_P Parameter: Plant Line Value: 35A19
  misc_feature: MA Experiment 108689 PARAMETER Experiment Name: Zm_Drought_Roots_P Parameter: Timepoint (hr) Value: 24
  misc_feature: MA Experiment 108689 PARAMETER Experiment Name: Zm_Drought_Roots_P Parameter: Tissue Value: Roots
  misc_feature: MA Experiment 108689 PARAMETER Experiment Name: Zm_Drought_Roots_P Parameter: Treatment Value: Drought vs. No Drought
  misc_feature: MA Experiment ID: 20000492 Result: Down-regulated in Transcription
  misc_feature: MA Experiment 20000492 PARAMETER Experiment Name: Zm_Hybrid_Seed_Dev_P Parameter: DAP Value: 12
  misc_feature: MA Experiment 20000492 PARAMETER Experiment Name: Zm_Hybrid_Seed_Dev_P Parameter: Organism Value: Zea mays
  misc_feature: MA Experiment 20000492 PARAMETER Experiment Name: Zm_Hybrid_Seed_Dev_P Parameter: Plant Line Value: 35A19
  misc_feature: MA Experiment 20000492 PARAMETER Experiment Name: Zm_Hybrid_Seed_Dev_P Parameter: Tissue Value: Fert Kernel vs. Unfert Floret
aaaaggacccaacgaagtccagccagctgagctgagcctcgtgaaccagagcatttgctccttcctcgtcctcctcgatcgacctctctccttggtgccgctgccgccatatatgaactgctagcacgcgcagcagccagcagctgccgaccggcctataatcagaaggccagaaaggatcgatggagaccatcaagtgctgcatcgcgtgcatcctgccgtgcggggcgctggacgtggtgcggatcgtgcactccaacggacgcgtggaggagatcagcgggggccccgtgctggccggggagatcatgaaggcgtaccccaagcacgtcctccggaagccgccgtccacgtgcccggccgacggcggcatcgtcgtgcagaagcccgtcatcctgccgcacaatgccgagctgcagaagggcaagatctacttcctcatgccggtcatggccaccccggcgcccgagaagcccgccgcgaagccacagccgccgcccgccgccggccaatccgcggcggccgcttcggtggcgaggagacggcgccggaggaaggaccacgccgccgcacggccggacggaggaggagcggcgcccgcctgcagcagcggggccggggcccggccgccggagggcgagaaggagcggctgctggccaacgagaggtacctgtccgagatcatgaaggagaaggcctccacggccagggaccggcggcgaggccgcgtcgccgtgtggcggccgcacctggagagcatcaccgaggatgacttgtaatcaagcaaggtgtcttcgatttttttttcctcccaccttttgtttctctctccatttctttagttttagcagcgtggtagtttcgtggcgctctcttttgttaattcctcctgctttgcctctccttgccctttggccttttatttttgttgcc

SEQ ID NO: 16608 - protein, 198 aa, Zea mays subsp. mays
  peptide (1)..(198): Ceres Seq. ID no. 12354578
  misc_feature (3)..(101): Homolog of NCBI NO: 34907910 NR Description: P0439E11.22 [Oryza sativa (japonica
  misc_feature (4)..(156): Homolog of NCBI NO: 34896112 NR Description: P0701D05.10 [Oryza sativa (japonica
  misc_feature (3)..(105): Homolog of NCBI NO: 18390706 NR Description: expressed protein
  misc_feature (3)..(101): Homolog of NCBI NO: 15227725 NR Description: hypothetical protein; protein id: At2g30230.1
  misc_feature (2)..(195): Homolog of NCBI NO: 18396990 NR Description: Expressed protein
  misc_feature (1)..(198): Homolog of NCBI NO: 34909702 NR Description: B1131G08.9 [Oryza sativa (japonica
METIKCCIACILPCGALDVVRIVHSNGRVEEISGGPVLAGEIMKAYPKHVLRKPPSTCPADGGIVVQKPVILPHNAELQKGKIYFLMPVMATPAPEKPAAKPQPPPAAGQSAAAASVARRRRRRKDHAAARPDGGGAAPACSSGAGARPPEGEKERLLANERYLSEIMKEKASTARDRRRGRVAVWRPHLESITEDDL

SEQ ID NO: 16609 - protein, 156 aa, Zea mays subsp. mays
  peptide (1)..(156): Ceres Seq. ID no. 12354579
  misc_feature (1)..(59): Homolog of NCBI NO: 34907910 NR Description: P0439E11.22 [Oryza sativa (japonica
  misc_feature (1)..(114): Homolog of NCBI NO: 34896112 NR Description: P0701D05.10 [Oryza sativa (japonica
  misc_feature (1)..(63): Homolog of NCBI NO: 18390706 NR Description: expressed protein
  misc_feature (1)..(59): Homolog of NCBI NO: 15227725 NR Description: hypothetical protein; protein id: At2g30230.1
  misc_feature (1)..(153): Homolog of NCBI NO: 18396990 NR Description: Expressed protein
  misc_feature (1)..(156): Homolog of NCBI NO: 34909702 NR Description: B1131G08.9 [Oryza sativa (japonica
MKAYPKHVLRKPPSTCPADGGIVVQKPVILPHNAELQKGKIYFLMPVMATPAPEKPAAKPQPPPAAGQSAAAASVARRRRRRKDHAAARPDGGGAAPACSSGAGARPPEGEKERLLANERYLSEIMKEKASTARDRRRGRVAVWRPHLESITEDDL

SEQ ID NO: 16610 - protein, 112 aa, Zea mays subsp. mays
  peptide (1)..(112): Ceres Seq. ID no. 12354580
  misc_feature (1)..(15): Homolog of NCBI NO: 34907910 NR Description: P0439E11.22 [Oryza sativa (japonica
  misc_feature (1)..(70): Homolog of NCBI NO: 34896112 NR Description: P0701D05.10 [Oryza sativa (japonica
  misc_feature (1)..(19): Homolog of NCBI NO: 18390706 NR Description: expressed protein
  misc_feature (1)..(15): Homolog of NCBI NO: 15227725 NR Description: hypothetical protein; protein id: At2g30230.1
  misc_feature (1)..(109): Homolog of NCBI NO: 18396990 NR Description: Expressed protein
  misc_feature (1)..(112): Homolog of NCBI NO: 34909702 NR Description: B1131G08.9 [Oryza sativa (japonica
MPVMATPAPEKPAAKPQPPPAAGQSAAAASVARRRRRRKDHAAARPDGGGAAPACSSGAGARPPEGEKERLLANERYLSEIMKEKASTARDRRRGRVAVWRPHLESITEDDL

SEQ ID NO: 16611 - DNA, 504 bp, Zea mays subsp. mays
  misc_feature (1)..(504): Ceres Seq. ID no. 13565466
  misc_feature: MA Experiment ID: 108523 Result: Up-regulated in Transcription
  misc_feature: MA Experiment 108523 PARAMETER Experiment Name: Zm_42deg_Heat_P Parameter: Age (day) Value: 8
  misc_feature: MA Experiment 108523 PARAMETER Experiment Name: Zm_42deg_Heat_P Parameter: Organism Value: Zea mays
  misc_feature: MA Experiment 108523 PARAMETER Experiment Name: Zm_42deg_Heat_P Parameter: Plant Line Value: 35A19
  misc_feature: MA Experiment 108523 PARAMETER Experiment Name: Zm_42deg_Heat_P Parameter: Temperature (deg C) Value: 42 vs. 22
  misc_feature: MA Experiment 108523 PARAMETER Experiment Name: Zm_42deg_Heat_P Parameter: Timepoint (hr) Value: 6
  misc_feature: MA Experiment 108523 PARAMETER Experiment Name: Zm_42deg_Heat_P Parameter: Tissue Value: Aerial
  misc_feature: MA Experiment ID: 108528 Result: Down-regulated in Transcription
  misc_feature: MA Experiment 108528 PARAMETER Experiment Name: Zm_Imbibed_Seeds_P Parameter: Age (day) Value: 5 vs. 2
  misc_feature: MA Experiment 108528 PARAMETER Experiment Name: Zm_Imbibed_Seeds_P Parameter: Organism Value: Zea mays
  misc_feature: MA Experiment 108528 PARAMETER Experiment Name: Zm_Imbibed_Seeds_P Parameter: Plant Line Value: 35A19
  misc_feature: MA Experiment 108528 PARAMETER Experiment Name: Zm_Imbibed_Seeds_P Parameter: Tissue Value: Aerial vs. Embryo
  misc_feature: MA Experiment ID: 108529 Result: Down-regulated in Transcription
  misc_feature: MA Experiment 108529 PARAMETER Experiment Name: Zm_Imbibed_Seeds_P Parameter: Age (day) Value: 5 vs. 2
  misc_feature: MA Experiment 108529 PARAMETER Experiment Name: Zm_Imbibed_Seeds_P Parameter: Organism Value: Zea mays
  misc_feature: MA Experiment 108529 PARAMETER Experiment Name: Zm_Imbibed_Seeds_P Parameter: Plant Line Value: 35A19
  misc_feature: MA Experiment 108529 PARAMETER Experiment Name: Zm_Imbibed_Seeds_P Parameter: Tissue Value: Roots vs. Embryo
  misc_feature: MA Experiment ID: 108530 Result: Down-regulated in Transcription
  misc_feature: MA Experiment 108530 PARAMETER Experiment Name: Zm_Imbibed_Seeds_P Parameter: Age (day) Value: 6 vs. 2
  misc_feature: MA Experiment 108530 PARAMETER Experiment Name: Zm_Imbibed_Seeds_P Parameter: Organism Value: Zea mays
  misc_feature: MA Experiment 108530 PARAMETER Experiment Name: Zm_Imbibed_Seeds_P Parameter: Plant Line Value: 35A19
  misc_feature: MA Experiment 108530 PARAMETER Experiment Name: Zm_Imbibed_Seeds_P Parameter: Tissue Value: Aerial vs. Embryo
  misc_feature: MA Experiment ID: 108535 Result: Up-regulated in Transcription
  misc_feature: MA Experiment 108535 PARAMETER Experiment Name: Zm_Meristem_P Parameter: Age (day) Value: 8
  misc_feature: MA Experiment 108535 PARAMETER Experiment Name: Zm_Meristem_P Parameter: Organism Value: Zea mays
  misc_feature: MA Experiment 108535 PARAMETER Experiment Name: Zm_Meristem_P Parameter: Plant Line Value: 35A19
  misc_feature: MA Experiment 108535 PARAMETER Experiment Name: Zm_Meristem_P Parameter: Tissue Value: Root Meristem vs. Above Root Meristem
  misc_feature: MA Experiment ID: 108546 Result: Down-regulated in Transcription
  misc_feature: MA Experiment 108546 PARAMETER Experiment Name: Zm_Imbibed_Seeds_P Parameter: Age (day) Value: 3 vs. 2
  misc_feature: MA Experiment 108546 PARAMETER Experiment Name: Zm_Imbibed_Seeds_P Parameter: Organism Value: Zea mays
  misc_feature: MA Experiment 108546 PARAMETER Experiment Name: Zm_Imbibed_Seeds_P Parameter: Plant Line Value: 35A19
  misc_feature: MA Experiment 108546 PARAMETER Experiment Name: Zm_Imbibed_Seeds_P Parameter: Tissue Value: Roots vs. Embryo
  misc_feature: MA Experiment ID: 108689 Result: Up-regulated in Transcription
  misc_feature: MA Experiment 108689 PARAMETER Experiment Name: Zm_Drought_Roots_P Parameter: Age (day) Value: 9
  misc_feature: MA Experiment 108689 PARAMETER Experiment Name: Zm_Drought_Roots_P Parameter: Organism Value: Zea mays
  misc_feature: MA Experiment 108689 PARAMETER Experiment Name: Zm_Drought_Roots_P Parameter: Plant Line Value: 35A19
  misc_feature: MA Experiment 108689 PARAMETER Experiment Name: Zm_Drought_Roots_P Parameter: Timepoint (hr) Value: 24
  misc_feature: MA Experiment 108689 PARAMETER Experiment Name: Zm_Drought_Roots_P Parameter: Tissue Value: Roots
  misc_feature: MA Experiment 108689 PARAMETER Experiment Name: Zm_Drought_Roots_P Parameter: Treatment Value: Drought vs. No Drought
  misc_feature: MA Experiment ID: 20000626 Result: Down-regulated in Transcription
  misc_feature: MA Experiment 20000626 PARAMETER Experiment Name: Zm_Herbicide-Treatments_P Parameter: Timepoint (hr) Value: 12
  misc_feature: MA Experiment 20000626 PARAMETER Experiment Name: Zm_Herbicide-Treatments_P Parameter: Tissue Value: Aerial
  misc_feature: MA Experiment 20000626 PARAMETER Experiment Name: Zm_Herbicide-Treatments_P Parameter: Treatment Value: Roundup vs. No Treatment
atttcgccattgctggcgcagsaacgcaaccgcgagatgttccatttgcgttgcacatacaagtgcaggagttcttgtacttcagagatagatccttagaactcatcgatcaaggtctaagtggtccaattgatgcacaaggattccaaaacgctctatatatgatagacatagggcagaacgatgtaaacgctcttctgtcaaactcgccctatgatcaagttattgccaaattcccaccaattcttgctgagattaaggacgctgtccagactctatatagcaacggtagccgaaacttctggatacatgggacgggggctctgggttgcctgccgcagaagcttgccataccaaggaaaaacgacagcgatcttgatcagtatggctgtctcaagacctataacagagctgcagttgcgttcaacgccgcgctgggcagcctctgcgacgagctgagtgcgcagatgaaagacgcgacgcttgtgtacacggacctgttcc

SEQ ID NO: 16612 - protein, 167 aa, Zea mays subsp. mays
  peptide (1)..(167): Ceres Seq. ID no. 13565467
  misc_feature (1)..(166): Pfam Name: GDSL-like Lipase/Acylhydrolase Pfam Description: GDSL-like Lipase/Acylhydrolase
  misc_feature (1)..(166): Homolog of NCBI NO: 21537184 NR Description: early nodule-specific protein, putative
  misc_feature (1)..(166): Homolog of NCBI NO: 18405064 NR Description: GDSL-motif lipase/hydrolase protein [Arabidopsis
  misc_feature (114)..(166): Homolog of NCBI NO: 15228721 NR Description: GDSL-motif lipase/hydrolase protein [Arabidopsis
  misc_feature (1)..(90): Homolog of NCBI NO: 15228721 NR Description: GDSL-motif lipase/hydrolase protein [Arabidopsis
  misc_feature (1)..(166): Homolog of NCBI NO: 15217506 NR Description: GDSL-motif lipase/hydrolase protein [Arabidopsis
  misc_feature (1)..(166): Homolog of NCBI NO: 25336281 NR Description: lipase-like protein Lip-4
  misc_feature (1)..(166): Homolog of NCBI NO: 15223585 NR Description: GDSL-motif lipase/hydrolase protein [Arabidopsis
  misc_feature (1)..(166): Homolog of NCBI NO: 34894838 NR Description: putative lipase homolog [Oryza sativa (japonica
  misc_feature (1)..(166): Homolog of NCBI NO: 34894866 NR Description: putative lipase homolog [Oryza sativa (japonica
  misc_feature (1)..(166): Homolog of NCBI NO: 34894844 NR Description: putative lipase homolog [Oryza sativa (japonica
  misc_feature (7)..(7): Xaa is any aa, unknown or other
FAIAGAXTQPRDVPFALHIQVQEFLYFRDRSLELIDQGLSGPIDAQGFQNALYMIDIGQNDVNALLSNSPYDQVIAKFPPILAEIKDAVQTLYSNGSRNFWIHGTGALGCLPQKLAIPRKNDSDLDQYGCLKTYNRAAVAFNAALGSLCDELSAQMKDATLVYTDLF

SEQ ID NO: 16613 - protein, 114 aa, Zea mays subsp. mays
  peptide (1)..(114): Ceres Seq. ID no. 13565468
  misc_feature (1)..(113): Pfam Name: GDSL-like Lipase/Acylhydrolase Pfam Description: GDSL-like Lipase/Acylhydrolase
  misc_feature (1)..(113): Homolog of NCBI NO: 21537184 NR Description: early nodule-specific protein, putative
  misc_feature (1)..(113): Homolog of NCBI NO: 18405064 NR Description: GDSL-motif lipase/hydrolase protein [Arabidopsis
  misc_feature (61)..(113): Homolog of NCBI NO: 15228721 NR Description: GDSL-motif lipase/hydrolase protein [Arabidopsis
  misc_feature (1)..(37): Homolog of NCBI NO: 15228721 NR Description: GDSL-motif lipase/hydrolase protein [Arabidopsis
  misc_feature (1)..(113): Homolog of NCBI NO: 15217506 NR Description: GDSL-motif lipase/hydrolase protein [Arabidopsis
  misc_feature (1)..(113): Homolog of NCBI NO: 25336281 NR Description: lipase-like protein Lip-4
  misc_feature (1)..(113): Homolog of NCBI NO: 15223585 NR Description: GDSL-motif lipase/hydrolase protein [Arabidopsis
  misc_feature (1)..(113): Homolog of NCBI NO: 34894838 NR Description: putative lipase homolog [Oryza sativa (japonica
  misc_feature (1)..(113): Homolog of NCBI NO: 34894866 NR Description: putative lipase homolog [Oryza sativa (japonica
  misc_feature (1)..(113): Homolog of NCBI NO: 34894844 NR Description: putative lipase homolog [Oryza sativa (japonica
MIDIGQNDVNALLSNSPYDQVIAKFPPILAEIKDAVQTLYSNGSRNFWIHGTGALGCLPQKLAIPRKNDSDLDQYGCLKTYNRAAVAFNAALGSLCDELSAQMKDATLVYTDLF

SEQ ID NO: 16614 - DNA, 1345 bp, Zea mays subsp. mays
  misc_feature (1)..(1345): Ceres Seq. ID no. 12360849
  misc_feature: MA Experiment ID: 108522 Result: Up-regulated in Transcription
  misc_feature: MA Experiment 108522 PARAMETER Experiment Name: Zm_42deg_Heat_P Parameter: Age (day) Value: 8
  misc_feature: MA Experiment 108522 PARAMETER Experiment Name: Zm_42deg_Heat_P Parameter: Organism Value: Zea mays
  misc_feature: MA Experiment 108522 PARAMETER Experiment Name: Zm_42deg_Heat_P Parameter: Plant Line Value: 35A19
  misc_feature: MA Experiment 108522 PARAMETER Experiment Name: Zm_42deg_Heat_P Parameter: Temperature (deg C) Value: 42 vs. 22
  misc_feature: MA Experiment 108522 PARAMETER Experiment Name: Zm_42deg_Heat_P Parameter: Timepoint (hr) Value: 1
  misc_feature: MA Experiment 108522 PARAMETER Experiment Name: Zm_42deg_Heat_P Parameter: Tissue Value: Aerial
taattgtcattgctgcaacgaactttcctgagtcgctagataaagccctagtcagacctgggcgttttgaccgtcatattgttgttcccaacccagatgttgaaggtcgacgccaaattctagaatcccatatgtcaaagatcttgaaaggtgatgatgtggacttaatgatcattgctagaggaacaccgggattctctggtgcagaccttgctaacttggtaaatgttgctgctcttaaggctgccatggatggtgcaaaagctgtcacaatggatgatcttgagtatgcaaaggaccgaatcatgatgggtagtgagcggaagtcggcagttatctctgacgaatgcaggaagctgacagcataccatgagggagggcatgcccttgttgcaatccacacagaaggagctcaccctgtccacaaggctaccatcgtacctagggggatggccctaggaatggtggcccaactccccgacaaagaccagacaagtgtgtcaaggaaacagatgctagcaaaactggatgtctgcatgggaggccgtgtggcagaagagcttatctttggggatactgaggtgacatccggtgcgtcgtcagatttccagcaagcgaccgcaatggcgagagcaatggttactaagtatggcatgagcaagcaggtcggccttgtctcttataactacgaggacgatggaaagagcatgagctcagaaacgagacttgcgatcgagcaggaggtgaagaacttcttggagaatgcatacagcaatgcgaagaccattcttacaaaacacaacaaagagctccatgctctagccaacgcacttcttgagcatgagaccctcacaggagcccagataaagaacatattagcccaggttcataacaaacagcaacatgagcatactatcgaagcaccacagaaggcctcagtcgcaccagcttcccccgcatcaccagctgcatcagctgctgcagcagcagcagccgccgccgcggcagcacagcaggcggcagccaaagctaagggggtggctggtatgggatcttagcacattagagcacccccactggtttgcattgtgtatatttcaccaaacaagcaaagctgttccagcaattaacgttcaacgagggtcctcggtagtatgctaaactgctgcagcaacagaacatactgattgtgtggaagctactgttcacgtgcctcgagtgcgaagcagaaacgaaaactttatgcattgtagtaggaggcacatttagctggtgattggatcagttttgtacccaaatcgaaaacaatttctgttgtttacaccccaagaattgttacatttcg

SEQ ID NO: 16615 - protein, 351 aa, Zea mays subsp. mays
  peptide (1)..(351): Ceres Seq. ID no. 12360850
  misc_feature (89)..(291): Pfam Name: Peptidase family M41 Pfam Description: Peptidase family M41
  misc_feature (1)..(321): Homolog of NCBI NO: 22963104 NR Description: hypothetical protein [Rhodopseudomonas palustris]
  misc_feature (1)..(310): Homolog of NCBI NO: 18423480 NR Description: FtsH protease, putative
  misc_feature (1)..(351): Homolog of NCBI NO: 30526336 NR Description: putative FtsH protease [Lycopersicon esculentum]
  misc_feature (1)..(347): Homolog of NCBI NO: 18401040 NR Description: FtsH protease, putative; protein id: At2g26140.1
  misc_feature (1)..(340): Homolog of NCBI NO: 23109895 NR Description: hypothetical protein [Novosphingobium
  misc_feature (1)..(326): Homolog of NCBI NO: 16127456 NR Description: cell division protein FtsH [Caulobacter
  misc_feature (1)..(321): Homolog of NCBI NO: 27382257 NR Description: metalloprotease [Bradyrhizobium japonicum]
  misc_feature (1)..(347): Homolog of NCBI NO: 7488430 NR Description: probable YME1 ATP-dependant proteinase
  misc_feature (1)..(351): Homolog of NCBI NO: 34914296 NR Description: putative FtsH protease [Oryza sativa (japonica
  misc_feature (1)..(351): Homolog of NCBI NO: 34914298 NR Description: putative FtsH protease [Oryza sativa (japonica
IVIAATNFPESLDKALVRPGRFDRHIVVPNPDVEGRRQILESHMSKILKGDDVDLMIIARGTPGFSGADLANLVNVAALKAAMDGAKAVTMDDLEYAKDRIMMGSERKSAVISDECRKLTAYHEGGHALVAIHTEGAHPVHKATIVPRGMALGMVAQLPDKDQTSVSRKQMLAKLDVCMGGRVAEELIFGDTEVTSGASSDFQQATAMARAMVTKYGMSKQVGLVSYNYEDDGKSMSSETRLAIEQEVKNFLENAYSNAKTILTKHNKELHALANALLEHETLTGAQIKNILAQVHNKQQHEHTIEAPQKASVAPASPASPAASAAAAAAAAAAAAQQAAAKAKGVAGMGS

SEQ ID NO: 16616 - protein, 308 aa, Zea mays subsp. mays
  peptide (1)..(308): Ceres Seq. ID no. 12360851
  misc_feature (46)..(248): Pfam Name: Peptidase family M41 Pfam Description: Peptidase family M41
  misc_feature (1)..(278): Homolog of NCBI NO: 27382257 NR Description: metalloprotease [Bradyrhizobium japonicum]
  misc_feature (1)..(297): Homolog of NCBI NO: 23109895 NR Description: hypothetical protein [Novosphingobium
  misc_feature (1)..(283): Homolog of NCBI NO: 16127456 NR Description: cell division protein FtsH [Caulobacter
  misc_feature (1)..(278): Homolog of NCBI NO: 22963104 NR Description: hypothetical protein [Rhodopseudomonas palustris]
  misc_feature (1)..(267): Homolog of NCBI NO: 18423480 NR Description: FtsH protease, putative
  misc_feature (1)..(308): Homolog of NCBI NO: 30526336 NR Description: putative FtsH protease [Lycopersicon esculentum]
  misc_feature (1)..(304): Homolog of NCBI NO: 18401040 NR Description: FtsH protease, putative; protein id: At2g26140.1
  misc_feature (1)..(304): Homolog of NCBI NO: 7488430 NR Description: probable YME1 ATP-dependant proteinase
  misc_feature (1)..(308): Homolog of NCBI NO: 34914296 NR Description: putative FtsH protease [Oryza sativa (japonica
  misc_feature (1)..(308): Homolog of NCBI NO: 34914298 NR Description: putative FtsH protease [Oryza sativa (japonica
MSKILKGDDVDLMIIARGTPGFSGADLANLVNVAALKAAMDGAKAVTMDDLEYAKDRIMMGSERKSAVISDECRKLTAYHEGGHALVAIHTEGAHPVHKATIVPRGMALGMVAQLPDKDQTSVSRKQMLAKLDVCMGGRVAEELIFGDTEVTSGASSDFQQATAMARAMVTKYGMSKQVGLVSYNYEDDGKSMSSETRLAIEQEVKNFLENAYSNAKTILTKHNKELHALANALLEHETLTGAQIKNILAQVHNKQQHEHTIEAPQKASVAPASPASPAASAAAAAAAAAAAAQQAAAKAKGVAGMGS

SEQ ID NO: 16617 - protein, 296 aa, Zea mays subsp. mays
  peptide (1)..(296): Ceres Seq. ID no. 12360852
  misc_feature (34)..(236): Pfam Name: Peptidase family M41 Pfam Description: Peptidase family M41
  misc_feature (1)..(266): Homolog of NCBI NO: 27382257 NR Description: metalloprotease [Bradyrhizobium japonicum]
  misc_feature (1)..(285): Homolog of NCBI NO: 23109895 NR Description: hypothetical protein [Novosphingobium
  misc_feature (1)..(271): Homolog of NCBI NO: 16127456 NR Description: cell division protein FtsH [Caulobacter
  misc_feature (1)..(266): Homolog of NCBI NO: 22963104 NR Description: hypothetical protein [Rhodopseudomonas palustris]
  misc_feature (1)..(255): Homolog of NCBI NO: 18423480 NR Description: FtsH protease, putative
  misc_feature (1)..(296): Homolog of NCBI NO: 30526336 NR Description: putative FtsH protease [Lycopersicon esculentum]
  misc_feature (1)..(292): Homolog of NCBI NO: 18401040 NR Description: FtsH protease, putative; protein id: At2g26140.1
  misc_feature (1)..(292): Homolog of NCBI NO: 7488430 NR Description: probable YME1 ATP-dependant proteinase
  misc_feature (1)..(296): Homolog of NCBI NO: 34914296 NR Description: putative FtsH protease [Oryza sativa (japonica
  misc_feature (1)..(296): Homolog of NCBI NO: 34914298 NR Description: putative FtsH protease [Oryza sativa (japonica
MIIARGTPGFSGADLANLVNVAALKAAMDGAKAVTMDDLEYAKDRIMMGSERKSAVISDECRKLTAYHEGGHALVAIHTEGAHPVHKATIVPRGMALGMVAQLPDKDQTSVSRKQMLAKLDVCMGGRVAEELIFGDTEVTSGASSDFQQATAMARAMVTKYGMSKQVGLVSYNYEDDGKSMSSETRLAIEQEVKNFLENAYSNAKTILTKHNKELHALANALLEHETLTGAQIKNILAQVHNKQQHEHTIEAPQKASVAPASPASPAASAAAAAAAAAAAAQQAAAKAKGVAGMGS

SEQ ID NO: 16618 - DNA, 1184 bp, Zea mays subsp. mays
  misc_feature (1)..(1184): Ceres Seq. ID no. 12352843
  misc_feature: MA Experiment ID: 108527 Result: Down-regulated in Transcription
  misc_feature: MA Experiment 108527 PARAMETER Experiment Name: Zm_5mM_NO_P Parameter: Age (day) Value: 8
  misc_feature: MA Experiment 108527 PARAMETER Experiment Name: Zm_5mM_NO_P Parameter: Organism Value: Zea mays
  misc_feature: MA Experiment 108527 PARAMETER Experiment Name: Zm_5mM_NO_P Parameter: Plant Line Value: 35A19
  misc_feature: MA Experiment 108527 PARAMETER Experiment Name: Zm_5mM_NO_P Parameter: Timepoint (hr) Value: 6
  misc_feature: MA Experiment 108527 PARAMETER Experiment Name: Zm_5mM_NO_P Parameter: Tissue Value: Aerial
  misc_feature: MA Experiment 108527 PARAMETER Experiment Name: Zm_5mM_NO_P Parameter: Treatment Value: 5mM NO vs. No Treatment
  misc_feature: MA Experiment ID: 108536 Result: Down-regulated in Transcription
  misc_feature: MA Experiment 108536 PARAMETER Experiment Name: Zm_Meristem_P Parameter: Age (day) Value: 8
  misc_feature: MA Experiment 108536 PARAMETER Experiment Name: Zm_Meristem_P Parameter: Organism Value: Zea mays
  misc_feature: MA Experiment 108536 PARAMETER Experiment Name: Zm_Meristem_P Parameter: Plant Line Value: 35A19
  misc_feature: MA Experiment 108536 PARAMETER Experiment Name: Zm_Meristem_P Parameter: Tissue Value: Shoot Meristem vs. Above Shoot Meristem
  misc_feature: MA Experiment ID: 108543 Result: Up-regulated in Transcription
  misc_feature: MA Experiment ID: 108556 Result: Down-regulated in Transcription
  misc_feature: MA Experiment 108556 PARAMETER Experiment Name: Zm_Drought_P Parameter: Age (day) Value: 9
  misc_feature: MA Experiment 108556 PARAMETER Experiment Name: Zm_Drought_P Parameter: Organism Value: Zea mays
  misc_feature: MA Experiment 108556 PARAMETER Experiment Name: Zm_Drought_P Parameter: Plant Line Value: 35A19
  misc_feature: MA Experiment 108556 PARAMETER Experiment Name: Zm_Drought_P Parameter: Timepoint (hr) Value: 24
  misc_feature: MA Experiment 108556 PARAMETER Experiment Name: Zm_Drought_P Parameter: Tissue Value: Aerial
  misc_feature: MA Experiment 108556 PARAMETER Experiment Name: Zm_Drought_P Parameter: Treatment Value: Drought vs. No Drought
  misc_feature: MA Experiment ID: 108597 Result: Down-regulated in Transcription
  misc_feature: MA Experiment 108597 PARAMETER Experiment Name: Zm_100uM_ABA_P Parameter: Age (day) Value: 9
  misc_feature: MA Experiment 108597 PARAMETER Experiment Name: Zm_100uM_ABA_P Parameter: Organism Value: Zea mays
  misc_feature: MA Experiment 108597 PARAMETER Experiment Name: Zm_100uM_ABA_P Parameter: Plant Line Value: 35A19
  misc_feature: MA Experiment 108597 PARAMETER Experiment Name: Zm_100uM_ABA_P Parameter: Timepoint (hr) Value: 24
  misc_feature: MA Experiment 108597 PARAMETER Experiment Name: Zm_100uM_ABA_P Parameter: Tissue Value: Aerial
  misc_feature: MA Experiment 108597 PARAMETER Experiment Name: Zm_100uM_ABA_P Parameter: Treatment Value: 100uM ABA vs. No Treatment
  misc_feature: MA Experiment ID: 20000108 Result: Up-regulated in Transcription
  misc_feature: MA Experiment 20000108 PARAMETER Experiment Name: Zm_Root-Tips_P Parameter: Age (day) Value: 12
  misc_feature: MA Experiment 20000108 PARAMETER Experiment Name: Zm_Root-Tips_P Parameter: Organism Value: Zea mays
  misc_feature: MA Experiment 20000108 PARAMETER Experiment Name: Zm_Root-Tips_P Parameter: Tissue Value: Root tips vs. Root mid region    35
  misc_feature: MA Experiment 20000108 PARAMETER Experiment Name: Zm_Root-Tips_P Parameter: Tissue Value: Root tips vs. Root mid region   Sequence Listing-Misc Features (4)
  misc_feature: MA Experiment ID: 20000477 Result: Down-regulated in Transcription
  misc_feature: MA Experiment 20000477 PARAMETER Experiment Name: Zm_5mM_SA_P Parameter: Age (day) Value: 10
  misc_feature: MA Experiment 20000477 PARAMETER Experiment Name: Zm_5mM_SA_P Parameter: Organism Value: Zea mays
  misc_feature: MA Experiment 20000477 PARAMETER Experiment Name: Zm_5mM_SA_P Parameter: Plant Line Value: 35A19
  misc_feature: MA Experiment 20000477 PARAMETER Experiment Name: Zm_5mM_SA_P Parameter: Timepoint (hr) Value: 48
  misc_feature: MA Experiment 20000477 PARAMETER Experiment Name: Zm_5mM_SA_P Parameter: Tissue Value: Aerial
  misc_feature: MA Experiment 20000477 PARAMETER Experiment Name: Zm_5mM_SA_P Parameter: Treatment Value: 5mM SA vs. No Treatment
  misc_feature: MA Experiment ID: 20000478 Result: Down-regulated in Transcription
  misc_feature: MA Experiment 20000478 PARAMETER Experiment Name: Zm_5mM_SA_P Parameter: Age (day) Value: 11
  misc_feature: MA Experiment 20000478 PARAMETER Experiment Name: Zm_5mM_SA_P Parameter: Organism Value: Zea mays
  misc_feature: MA Experiment 20000478 PARAMETER Experiment Name: Zm_5mM_SA_P Parameter: Plant Line Value: 35A19
  misc_feature: MA Experiment 20000478 PARAMETER Experiment Name: Zm_5mM_SA_P Parameter: Timepoint (hr) Value: 72
  misc_feature: MA Experiment 20000478 PARAMETER Experiment Name: Zm_5mM_SA_P Parameter: Tissue Value: Aerial
  misc_feature: MA Experiment 20000478 PARAMETER Experiment Name: Zm_5mM_SA_P Parameter: Treatment Value: 5mM SA vs. No Treatment
  misc_feature: MA Experiment ID: 20000480 Result: Down-regulated in Transcription
  misc_feature: MA Experiment 20000480 PARAMETER Experiment Name: Zm_Drought_P Parameter: Age (day) Value: 11
  misc_feature: MA Experiment 20000480 PARAMETER Experiment Name: Zm_Drought_P Parameter: Organism Value: Zea mays
  misc_feature: MA Experiment 20000480 PARAMETER Experiment Name: Zm_Drought_P Parameter: Plant Line Value: 35A19
  misc_feature: MA Experiment 20000480 PARAMETER Experiment Name: Zm_Drought_P Parameter: Timepoint (hr) Value: 72
  misc_feature: MA Experiment 20000480 PARAMETER Experiment Name: Zm_Drought_P Parameter: Tissue Value: Aerial
  misc_feature: MA Experiment 20000480 PARAMETER Experiment Name: Zm_Drought_P Parameter: Treatment Value: Drought vs. No Drought
  misc_feature: MA Experiment ID: 20000533 Result: Down-regulated in Transcription
  misc_feature: MA Experiment 20000533 PARAMETER Experiment Name: Zm_0.001percent_MeJA_P Parameter: Age (day) Value: 11
  misc_feature: MA Experiment 20000533 PARAMETER Experiment Name: Zm_0.001percent_MeJA_P Parameter: Organism Value: Zea mays
  misc_feature: MA Experiment 20000533 PARAMETER Experiment Name: Zm_0.001percent_MeJA_P Parameter: Plant Line Value: 35A19
  misc_feature: MA Experiment 20000533 PARAMETER Experiment Name: Zm_0.001percent_MeJA_P Parameter: Timepoint (hr) Value: 72
  misc_feature: MA Experiment 20000533 PARAMETER Experiment Name: Zm_0.001percent_MeJA_P Parameter: Tissue Value: Aerial
  misc_feature: MA Experiment 20000533 PARAMETER Experiment Name: Zm_0.001percent_MeJA_P Parameter: Treatment Value: 0.001percent MeJA vs. No Treatment
  misc_feature: MA Experiment ID: 20000629 Result: Up-regulated in Transcription
  misc_feature: MA Experiment 20000629 PARAMETER Experiment Name: Zm_Herbicide-Treatments_P Parameter: Timepoint (hr) Value: 12
  misc_feature: MA Experiment 20000629 PARAMETER Experiment Name: Zm_Herbicide-Treatments_P Parameter: Tissue Value: Aerial
  misc_feature: MA Experiment 20000629 PARAMETER Experiment Name: Zm_Herbicide-Treatments_P Parameter: Treatment Value: Trimec vs. No Treatment
attcaacaactctggcgagcagcagtgaacgtacttacgtcttcccccagctagctagctatctaccttggtggtggcgattggtatatagattaaacatggcgcctcaaagcctggatctcgggctgagtctcggcctgggcgtggcggcattccagcccagcttctgccacccggccggcaatgcggcggcggagcgggagaccagcccgaccgcggcggacgagagggagcggaggtgctcgcccgccggcagcccgacgtcgagcggcagcggcagcgggaagcgcgtcgcgacggagagatcggccggcagcggcagcggcgacgaggacgacgacgggggcgctcgcaagaagctgcggttgtccaaggaccaggccgccgtgctcgaggagtgcttcaaaacgcaccacaccctcactccgaagcagaaggcagcgctggccagccgcctgggcctccgggcgcggcaggtggaggtgtggttccagaaccggcgcgcccggaccaagctgaagcagacggaggtcgactgcgagtacctcaggcgctggtgcgagcagctcgccgaggagaaccggcgcctgggcaaggaggtcgccgagctcagggcgctgagcgccgcgcccgcgccagcggcccctctcaccgccctcacaatgtgcctctcctgcaggcgcgtctcctcttcatcctgctcatcctcgccgcctaacacgcacgcgcacgcgcatgccgctgcagctggcactggcactggcgggagcgtggcctctccggcggcggcgacgttgcccgcccaccggcagttcttgtgcgggttcagagacggcggggcggccgccgccgcagtgtacgggacctcatcggctctcgcaaaagccctcagggcggccagataggcgtagtcgtcgtcactagctctctccgctgatctggacttgctctgctcaccggagctccggcgatcgagggatgccacggaagtgcgtggccccaagttgcaactaattgcaactgcagagcaagtgttgtagctgaatcatcttttgttttttttcctccgtatctttagagcggaatgccgcatgcaaatgttctttagaatcgatttcatgtgggtcagtgggtgtatgattgtactcatgctgtggaaattaataacggtttgtagatgaggt

SEQ ID NO: 16619 - protein, 300 aa, Zea mays subsp. mays
  peptide (1)..(300): Ceres Seq. ID no. 12352844
  misc_feature (118)..(172): Pfam Name: Homeobox domain Pfam Description: Homeobox domain
  misc_feature (70)..(260): Homolog of NCBI NO: 18034437 NR Description: homeodomain leucine zipper protein CPHB-3
  misc_feature (59)..(291): Homolog of NCBI NO: 5006849 NR Description: homeodomain leucine zipper protein [Oryza sativa]
  misc_feature (59)..(291): Homolog of NCBI NO: 28848940 NR Description: homeodomain leucine zipper protein
STTLASSSERTYVFPQLASYLPWWWRLVYRLNMAPQSLDLGLSLGLGVAAFQPSFCHPAGNAAAERETSPTAADERERRCSPAGSPTSSGSGSGKRVATERSAGSGSGDEDDDGGARKKLRLSKDQAAVLEECFKTHHTLTPKQKAALASRLGLRARQVEVWFQNRRARTKLKQTEVDCEYLRRWCEQLAEENRRLGKEVAELRALSAAPAPAAPLTALTMCLSCRRVSSSSCSSSPPNTHAHAHAAAAGTGTGGSVASPAAATLPAHRQFLCGFRDGGAAAAAVYGTSSALAKALRAAR

SEQ ID NO: 16620 - protein, 268 aa, Zea mays subsp. mays
  peptide (1)..(268): Ceres Seq. ID no. 12352845
  misc_feature (86)..(140): Pfam Name: Homeobox domain Pfam Description: Homeobox domain
  misc_feature (38)..(228): Homolog of NCBI NO: 18034437 NR Description: homeodomain leucine zipper protein CPHB-3
  misc_feature (27)..(259): Homolog of NCBI NO: 5006849 NR Description: homeodomain leucine zipper protein [Oryza sativa]
  misc_feature (27)..(259): Homolog of NCBI NO: 28848940 NR Description: homeodomain leucine zipper protein
MAPQSLDLGLSLGLGVAAFQPSFCHPAGNAAAERETSPTAADERERRCSPAGSPTSSGSGSGKRVATERSAGSGSGDEDDDGGARKKLRLSKDQAAVLEECFKTHHTLTPKQKAALASRLGLRARQVEVWFQNRRARTKLKQTEVDCEYLRRWCEQLAEENRRLGKEVAELRALSAAPAPAAPLTALTMCLSCRRVSSSSCSSSPPNTHAHAHAAAAGTGTGGSVASPAAATLPAHRQFLCGFRDGGAAAAAVYGTSSALAKALRAAR

SEQ ID NO: 16621 - DNA, 1331 bp, Zea mays subsp. mays
  misc_feature (1)..(1331): Ceres Seq. ID no. 12366111
  misc_feature: MA Experiment ID: 108547 Result: Up-regulated in Transcription
  misc_feature: MA Experiment 108547 PARAMETER Experiment Name: Zm_Imbibed_Seeds_P Parameter: Age (day) Value: 4 vs. 2
  misc_feature: MA Experiment 108547 PARAMETER Experiment Name: Zm_Imbibed_Seeds_P Parameter: Organism Value: Zea mays
  misc_feature: MA Experiment 108547 PARAMETER Experiment Name: Zm_Imbibed_Seeds_P Parameter: Plant Line Value: 35A19
  misc_feature: MA Experiment 108547 PARAMETER Experiment Name: Zm_Imbibed_Seeds_P Parameter: Tissue Value: Aerial vs. Embryo
atccaatacgcccaccagccaccacacatcctctctccctcccagtcccaggagcgtggcctcactctcctcgtcgcatcccccctcctcatcttcgcagcgcgggcggcggcaatggcgatggcctccacctacgcgccgggcggaggcgcgcgggcgctcgcgcagggtagatgcagggtccgcggtcccgcggggctgggcttcctcggcccctccaaggccgccggcctcccccgccccctcgccctcgccctcgccaggcggatgagcagccccgtcgcggtgggcgccaggctgcgatgcgcggcgtcgtcgtcccccgcggcggcgcggcccgccacggcgccgcgcttcatccagcacaagaaggaggccttctggttctaccgcttcctctccatcgtgtacgaccacgtcatcaatccgggccactggaccgaggacatgcgcgacgacgcgctggaacctgccgacctcttcagccgccacctcacggtcgtcgacgtcggcggcggcacggggttcaccacgctcggcatcgtcaagcacgtcaacccggagaacgtcacgctgctcgaccagtccccgcaccagctcgacaaggcccggcagaaggaggccctcaagggggtcaccatcatggagggcgacgccgaggacctcccgttccccaccgactccttcgaccgatacatctccgccggcagcatcgagtactggccagacccacagcgggggatcaaggaagcctacagggtcctgagatttggtgggctagcttgtgtgatcggcccggtctacccgaccttctggctgtcccgcttcttcgccgacatgtggatgctcttccccaaggaggaagagtacatcgagtggttcaagaaggctgggtttagggatgtcaagctgaagaggattggaccgaagtggtaccgcggtgtccgaaggcatggcctcatcatgggctgctccgtcacaggcgtcaagagagagcgcggtgactctcccttggagcttggtcccaaggcggaggatgtcagcaagccagtgaatccgatcaccttcctcttccgcttcctcgtaggaacgatatgtgctgcctactatgttctggtgcctatttacatgtggataaaggaccagatcgtgccaaaaggcatgccaatctgagtgaagggaatgagctgcatggaagagaggatagccaacgtctgaattttactcttctctatattagacgcttcctgcctgttttgtattaatacctcttgttttccttctgctatttacttcttgcactgctgttcctgtttgtggtaattaataat

SEQ ID NO: 16622 - protein, 390 aa, Zea mays subsp. mays
  peptide (1)..(390): Ceres Seq. ID no. 12366112
  misc_feature (120)..(303): Homolog of NCBI NO: 15790980 NR Description: membrane protein; Hmp [Halobacterium sp. NRC-1]
  misc_feature (120)..(313): Homolog of NCBI NO: 11498123 NR Description: chloroplast inner envelope membrane protein
  misc_feature (41)..(239): Homolog of NCBI NO: 25458195 NR Description: membrane protein, 37K, chloroplast inner envelope
  misc_feature (75)..(386): Homolog of NCBI NO: 37265798 NR Description: MPBQ/MSBQ methyltransferase [Chlamydomonas
  misc_feature (41)..(390): Homolog of NCBI NO: 124429 NR Description: 37 KD INNER ENVELOPE MEMBRANE PROTEIN,
  misc_feature (64)..(390): Homolog of NCBI NO: 21553996 NR Description: putative chloroplast inner envelope protein
  misc_feature (64)..(390): Homolog of NCBI NO: 15005009 NR Description: APG1 [Arabidopsis thaliana]
  misc_feature (64)..(390): Homolog of NCBI NO: 15229430 NR Description: putative chloroplast inner envelope protein
  misc_feature (99)..(390): Homolog of NCBI NO: 7489166 NR Description: membrane protein, 37K, precursor, chloroplast
  misc_feature (62)..(390): Homolog of NCBI NO: 34393472 NR Description: putative 37kDa chloroplast inner envelope
IQYAHQPPHILSPSQSQERGLTLLVASPLLIFAARAAAMAMASTYAPGGGARALAQGRCRVRGPAGLGFLGPSKAAGLPRPLALALARRMSSPVAVGARLRCAASSSPAAARPATAPRFIQHKKEAFWFYRFLSIVYDHVINPGHWTEDMRDDALEPADLFSRHLTVVDVGGGTGFTTLGIVKHVNPENVTLLDQSPHQLDKARQKEALKGVTIMEGDAEDLPFPTDSFDRYISAGSIEYWPDPQRGIKEAYRVLRFGGLACVIGPVYPTFWLSRFFADMWMLFPKEEEYIEWFKKAGFRDVKLKRIGPKWYRGVRRHGLIMGCSVTGVKRERGDSPLELGPKAEDVSKPVNPITFLFRFLVGTICAAYYVLVPIYMWIKDQIVPKGMPI

SEQ ID NO: 16623 - protein, 352 aa, Zea mays subsp. mays
  peptide (1)..(352): Ceres Seq. ID no. 12366113
  misc_feature (82)..(265): Homolog of NCBI NO: 15790980 NR Description: membrane protein; Hmp [Halobacterium sp. NRC-1]
  misc_feature (82)..(275): Homolog of NCBI NO: 11498123 NR Description: chloroplast inner envelope membrane protein
  misc_feature (3)..(201): Homolog of NCBI NO: 25458195 NR Description: membrane protein, 37K, chloroplast inner envelope
  misc_feature (37)..(348): Homolog of NCBI NO: 37265798 NR Description: MPBQ/MSBQ methyltransferase [Chlamydomonas
  misc_feature (3)..(352): Homolog of NCBI NO: 124429 NR Description: 37 KD INNER ENVELOPE MEMBRANE PROTEIN,
  misc_feature (26)..(352): Homolog of NCBI NO: 21553996 NR Description: putative chloroplast inner envelope protein
  misc_feature (26)..(352): Homolog of NCBI NO: 15005009 NR Description: APG1 [Arabidopsis thaliana]
  misc_feature (26)..(352): Homolog of NCBI NO: 15229430 NR Description: putative chloroplast inner envelope protein
  misc_feature (61)..(352): Homolog of NCBI NO: 7489166 NR Description: membrane protein, 37K, precursor, chloroplast
  misc_feature (24)..(352): Homolog of NCBI NO: 34393472 NR Description: putative 37kDa chloroplast inner envelope
MAMASTYAPGGGARALAQGRCRVRGPAGLGFLGPSKAAGLPRPLALALARRMSSPVAVGARLRCAASSSPAAARPATAPRFIQHKKEAFWFYRFLSIVYDHVINPGHWTEDMRDDALEPADLFSRHLTVVDVGGGTGFTTLGIVKHVNPENVTLLDQSPHQLDKARQKEALKGVTIMEGDAEDLPFPTDSFDRYISAGSIEYWPDPQRGIKEAYRVLRFGGLACVIGPVYPTFWLSRFFADMWMLFPKEEEYIEWFKKAGFRDVKLKRIGPKWYRGVRRHGLIMGCSVTGVKRERGDSPLELGPKAEDVSKPVNPITFLFRFLVGTICAAYYVLVPIYMWIKDQIVPKGMPI

SEQ ID NO: 16624 - protein, 350 aa, Zea mays subsp. mays
  peptide (1)..(350): Ceres Seq. ID no. 12366114
  misc_feature (80)..(263): Homolog of NCBI NO: 15790980 NR Description: membrane protein; Hmp [Halobacterium sp. NRC-1]
  misc_feature (80)..(273): Homolog of NCBI NO: 11498123 NR Description: chloroplast inner envelope membrane protein
  misc_feature (1)..(199): Homolog of NCBI NO: 25458195 NR Description: membrane protein, 37K, chloroplast inner envelope
  misc_feature (35)..(346): Homolog of NCBI NO: 37265798 NR Description: MPBQ/MSBQ methyltransferase [Chlamydomonas
  misc_feature (1)..(350): Homolog of NCBI NO: 124429 NR Description: 37 KD INNER ENVELOPE MEMBRANE PROTEIN,
  misc_feature (24)..(350): Homolog of NCBI NO: 21553996 NR Description: putative chloroplast inner envelope protein
  misc_feature (24)..(350): Homolog of NCBI NO: 15005009 NR Description: APG1 [Arabidopsis thaliana]
  misc_feature (24)..(350): Homolog of NCBI NO: 15229430 NR Description: putative chloroplast inner envelope protein
  misc_feature (59)..(350): Homolog of NCBI NO: 7489166 NR Description: membrane protein, 37K, precursor, chloroplast
  misc_feature (22)..(350): Homolog of NCBI NO: 34393472 NR Description: putative 37kDa chloroplast inner envelope
MASTYAPGGGARALAQGRCRVRGPAGLGFLGPSKAAGLPRPLALALARRMSSPVAVGARLRCAASSSPAAARPATAPRFIQHKKEAFWFYRFLSIVYDHVINPGHWTEDMRDDALEPADLFSRHLTVVDVGGGTGFTTLGIVKHVNPENVTLLDQSPHQLDKARQKEALKGVTIMEGDAEDLPFPTDSFDRYISAGSIEYWPDPQRGIKEAYRVLRFGGLACVIGPVYPTFWLSRFFADMWMLFPKEEEYIEWFKKAGFRDVKLKRIGPKWYRGVRRHGLIMGCSVTGVKRERGDSPLELGPKAEDVSKPVNPITFLFRFLVGTICAAYYVLVPIYMWIKDQIVPKGMPI

SEQ ID NO: 16625 - DNA, 1435 bp, Zea mays subsp. mays
  misc_feature (1)..(1435): Ceres Seq. ID no. 12354581
  misc_feature: MA Experiment ID: 108527 Result: Down-regulated in Transcription
  misc_feature: MA Experiment 108527 PARAMETER Experiment Name: Zm_5mM_NO_P Parameter: Age (day) Value: 8
  misc_feature: MA Experiment 108527 PARAMETER Experiment Name: Zm_5mM_NO_P Parameter: Organism Value: Zea mays
  misc_feature: MA Experiment 108527 PARAMETER Experiment Name: Zm_5mM_NO_P Parameter: Plant Line Value: 35A19
  misc_feature: MA Experiment 108527 PARAMETER Experiment Name: Zm_5mM_NO_P Parameter: Timepoint (hr) Value: 6
  misc_feature: MA Experiment 108527 PARAMETER Experiment Name: Zm_5mM_NO_P Parameter: Tissue Value: Aerial
  misc_feature: MA Experiment 108527 PARAMETER Experiment Name: Zm_5mM_NO_P Parameter: Treatment Value: 5mM NO vs. No Treatment
  misc_feature: MA Experiment ID: 108543 Result: Up-regulated in Transcription
  misc_feature: MA Experiment ID: 108544 Result: Up-regulated in Transcription
  misc_feature: MA Experiment ID: 108559 Result: Down-regulated in Transcription
  misc_feature: MA Experiment 108559 PARAMETER Experiment Name: Zm_5mM_NO_P Parameter: Age (day) Value: 8
  misc_feature: MA Experiment 108559 PARAMETER Experiment Name: Zm_5mM_NO_P Parameter: Organism Value: Zea mays
  misc_feature: MA Experiment 108559 PARAMETER Experiment Name: Zm_5mM_NO_P Parameter: Plant Line Value: 35A19
  misc_feature: MA Experiment 108559 PARAMETER Experiment Name: Zm_5mM_NO_P Parameter: Timepoint (hr) Value: 12
  misc_feature: MA Experiment 108559 PARAMETER Experiment Name: Zm_5mM_NO_P Parameter: Tissue Value: Aerial
  misc_feature: MA Experiment 108559 PARAMETER Experiment Name: Zm_5mM_NO_P Parameter: Treatment Value: 5mM NO vs. No Treatment
  misc_feature: MA Experiment ID: 20000535 Result: Down-regulated in Transcription
  misc_feature: MA Experiment 20000535 PARAMETER Experiment Name: Zm_Hybrid_Seed_Dev_P Parameter: DAP Value: 30 vs. 12
  misc_feature: MA Experiment 20000535 PARAMETER Experiment Name: Zm_Hybrid_Seed_Dev_P Parameter: Organism Value: Zea mays
  misc_feature: MA Experiment 20000535 PARAMETER Experiment Name: Zm_Hybrid_Seed_Dev_P Parameter: Plant Line Value: 35A19
  misc_feature: MA Experiment 20000535 PARAMETER Experiment Name: Zm_Hybrid_Seed_Dev_P Parameter: Tissue Value: Embryo vs. Unfert Floret
gataagaaatggtgagcaggcaagcatggagtggagtgcttttaaatttgggtgtcgctgtcgttgaaagcgatgggtggctagttttacagacagacagcagcacctgctcctccgtctggactgactgactagtgactcagctccacccacatcccccttcgtcgtcttctccctccctgctagctgacctccaatccacgataaggcaagataagctagctaggaaggcaagggatccgatggacaagtacgagcccgttcgcgagatcggggcgggcaacttcggggtggccaagctgatgaggaacaaggacacgagggagctggtggccatgaagttcatagagcgaggaaacaggatcgacgagaacgtgttccgcgagatcgtgaaccaccgctccctccgccaccccaacatcatccggttcaaggaggtggtgctgactcccacgcaccttgcgatcgtgatggagtacgctgcgggcggggagctgttcgagcgcatctgcgacgccgggcggttccacgaggacgaggcgcgctacttcttccagcagctggtttgcggcgtcagcttctgccacgccatgaacatctgccaccgggacctcaagctggagaacacgctgctggacggcagcccggcgccgcgcctcaagatctgcgacttcggctactccaagtcctcggtgctgcactcgcgaccgaagtcaacggtgggcacgccggcgtacatcgcgcccgaggtgctgtcgcggcgagagtacgacgggaagcacgccgacgtctggtcgtgcggagtcacgctctacgtcatgctggtgggggcgtacccgttcgaggatccaaaggacccaaagaacttcaggaagacaatacagcgcatcatgtcggttcagtacaagatccccgagtacgtgcacgtctcccacaactgccgccacctcctctcccgcatcttcgtccagaacccgtacaagaggatcaccatgagcgagatcaagacccacccctggtacctcaagaacctgccgagggagctcaaggaggaggcgcaggcagcctactactacagccgccagggagacagcagcagcagcagcagcaataatgcgacagcagcacccgcctactcgtcgcagagcgtggaggagatcttgaggatcgtgcaggaggcgcagacggtgcccaagccaccgtccaggcccgacgaagcagagcaacaggaagaagaagacgaccatgacgatgacgacgactacgacagaacggtgcggcaggtgcacgccagcggagagttcgacatgattatgagcagactccaaatctgactcttagtatcttgcctgccattggtagttttgtgttgtaatgcgtgcctgtaacatgaatttcagtcaaactatacactatcataatggtgatggtattg

SEQ ID NO: 16626 - protein, 363 aa, Zea mays subsp. mays
  peptide (1)..(363): Ceres Seq. ID no. 12354582
  misc_feature (4)..(260): Pfam Name: Protein kinase domain Pfam Description: Protein kinase domain
MDKYEPVREIGAGNFGVAKLMRNKDTRELVAMKFIERGNRIDENVFREIVNHRSLRHPNIIRFKEVVLTPTHLAIVMEYAAGGELFERICDAGRFHEDEARYFFQQLVCGVSFCHAMNICHRDLKLENTLLDGSPAPRLKICDFGYSKSSVLHSRPKSTVGTPAYIAPEVLSRREYDGKHADVWSCGVTLYVMLVGAYPFEDPKDPKNFRKTIQRIMSVQYKIPEYVHVSHNCRHLLSRIFVQNPYKRITMSEIKTHPWYLKNLPRELKEEAQAAYYYSRQGDSSSSSSNNATAAPAYSSQSVEEILRIVQEAQTVPKPPSRPDEAEQQEEEDDHDDDDDYDRTVRQVHASGEFDMIMSRLQI

SEQ ID NO: 16627 - protein, 343 aa, Zea mays subsp. mays
  peptide (1)..(343): Ceres Seq. ID no. 12354583
  misc_feature (1)..(240): Pfam Name: Protein kinase domain Pfam Description: Protein kinase domain
MRNKDTRELVAMKFIERGNRIDENVFREIVNHRSLRHPNIIRFKEVVLTPTHLAIVMEYAAGGELFERICDAGRFHEDEARYFFQQLVCGVSFCHAMNICHRDLKLENTLLDGSPAPRLKICDFGYSKSSVLHSRPKSTVGTPAYIAPEVLSRREYDGKHADVWSCGVTLYVMLVGAYPFEDPKDPKNFRKTIQRIMSVQYKIPEYVHVSHNCRHLLSRIFVQNPYKRITMSEIKTHPWYLKNLPRELKEEAQAAYYYSRQGDSSSSSSNNATAAPAYSSQSVEEILRIVQEAQTVPKPPSRPDEAEQQEEEDDHDDDDDYDRTVRQVHASGEFDMIMSRLQI

SEQ ID NO: 16628 - protein, 332 aa, Zea mays subsp. mays
  peptide (1)..(332): Ceres Seq. ID no. 12354584
  misc_feature (1)..(229): Pfam Name: Protein kinase domain Pfam Description: Protein kinase domain
MKFIERGNRIDENVFREIVNHRSLRHPNIIRFKEVVLTPTHLAIVMEYAAGGELFERICDAGRFHEDEARYFFQQLVCGVSFCHAMNICHRDLKLENTLLDGSPAPRLKICDFGYSKSSVLHSRPKSTVGTPAYIAPEVLSRREYDGKHADVWSCGVTLYVMLVGAYPFEDPKDPKNFRKTIQRIMSVQYKIPEYVHVSHNCRHLLSRIFVQNPYKRITMSEIKTHPWYLKNLPRELKEEAQAAYYYSRQGDSSSSSSNNATAAPAYSSQSVEEILRIVQEAQTVPKPPSRPDEAEQQEEEDDHDDDDDYDRTVRQVHASGEFDMIMSRLQI

SEQ ID NO: 16629 - DNA, 820 bp, Zea mays subsp. mays
  misc_feature (1)..(820): Ceres Seq. ID no. 12357112
  misc_feature: MA Experiment ID: 108535 Result: Down-regulated in Transcription
  misc_feature: MA Experiment 108535 PARAMETER Experiment Name: Zm_Meristem_P Parameter: Age (day) Value: 8
  misc_feature: MA Experiment 108535 PARAMETER Experiment Name: Zm_Meristem_P Parameter: Organism Value: Zea mays
  misc_feature: MA Experiment 108535 PARAMETER Experiment Name: Zm_Meristem_P Parameter: Plant Line Value: 35A19
  misc_feature: MA Experiment 108535 PARAMETER Experiment Name: Zm_Meristem_P Parameter: Tissue Value: Root Meristem vs. Above Root Meristem
  misc_feature: MA Experiment ID: 108543 Result: Down-regulated in Transcription
  misc_feature: MA Experiment ID: 108689 Result: Down-regulated in Transcription
  misc_feature: MA Experiment 108689 PARAMETER Experiment Name: Zm_Drought_Roots_P Parameter: Age (day) Value: 9
  misc_feature: MA Experiment 108689 PARAMETER Experiment Name: Zm_Drought_Roots_P Parameter: Organism Value: Zea mays
  misc_feature: MA Experiment 108689 PARAMETER Experiment Name: Zm_Drought_Roots_P Parameter: Plant Line Value: 35A19
  misc_feature: MA Experiment 108689 PARAMETER Experiment Name: Zm_Drought_Roots_P Parameter: Timepoint (hr) Value: 24
  misc_feature: MA Experiment 108689 PARAMETER Experiment Name: Zm_Drought_Roots_P Parameter: Tissue Value: Roots
  misc_feature: MA Experiment 108689 PARAMETER Experiment Name: Zm_Drought_Roots_P Parameter: Treatment Value: Drought vs. No Drought
  misc_feature: MA Experiment ID: 20000532 Result: Up-regulated in Transcription
  misc_feature: MA Experiment 20000532 PARAMETER Experiment Name: Zm_0.001percent_MeJA_P Parameter: Age (day) Value: 10
  misc_feature: MA Experiment 20000532 PARAMETER Experiment Name: Zm_0.001percent_MeJA_P Parameter: Organism Value: Zea mays
  misc_feature: MA Experiment 20000532 PARAMETER Experiment Name: Zm_0.001percent_MeJA_P Parameter: Plant Line Value: 35A19
  misc_feature: MA Experiment 20000532 PARAMETER Experiment Name: Zm_0.001percent_MeJA_P Parameter: Timepoint (hr) Value: 48
  misc_feature: MA Experiment 20000532 PARAMETER Experiment Name: Zm_0.001percent_MeJA_P Parameter: Tissue Value: Aerial
  misc_feature: MA Experiment 20000532 PARAMETER Experiment Name: Zm_0.001percent_MeJA_P Parameter: Treatment Value: 0.001percent MeJA vs. No Treatment
  misc_feature: MA Experiment ID: 20001610 Result: Down-regulated in Transcription
  misc_feature: MA Experiment 20001610 PARAMETER Experiment Name: Zm_50ppm_KNO3_L-to-H_P Parameter: Age (day) Value: 19
  misc_feature: MA Experiment 20001610 PARAMETER Experiment Name: Zm_50ppm_KNO3_L-to-H_P Parameter: Organism Value: Zea mays
  misc_feature: MA Experiment 20001610 PARAMETER Experiment Name: Zm_50ppm_KNO3_L-to-H_P Parameter: Plant Line Value: 35A19
  misc_feature: MA Experiment 20001610 PARAMETER Experiment Name: Zm_50ppm_KNO3_L-to-H_P Parameter: Timepoint (hr) Value: 2
  misc_feature: MA Experiment 20001610 PARAMETER Experiment Name: Zm_50ppm_KNO3_L-to-H_P Parameter: Tissue Value: Roots
  misc_feature: MA Experiment 20001610 PARAMETER Experiment Name: Zm_50ppm_KNO3_L-to-H_P Parameter: Treatment Value: 50ppm KNO3 vs. 50ppm KCl
ctcggtctctctggagtctggactcgcctccacggctccaccatgtatcccaaggcggcagacgaaggtgcgcagccgctggccacgggcatccccttcagcggcggcggcggctactaccaggcgggcggcgcgatggcggcggcgttcgcggtgcaggcgcaggcgcccgtcgccgcctggtccaccgggctctgcaactgcttcgacgactgccacaactgctgcgtgacgtgcgtgtgcccgtgcatcacgttcgggcagaccgcggagatcatcgaccggggctccacgtcctgcggcaccagcgggggcgctgtacgcgctcgtcatgctgctcaccggctgtcagtgcgtctactcctgcttctaccgcgccaagatgcgcgcgcagtacggcctccaggtgagcccctgctccgactgctgcgtgcactgctgctgccagtggctgcgcgctctgccaggagtaccgcgagctcaagaagcgaggcttcgacatgagcataggatggcatgcgaacatggagaggcaggggcgcgccgccgccgccgtgccgccgcacatgcatcctgggatgacccgctgacgctctgccgctcgcctcacttctgctgaggaaatcaagtgatttggtattggtccgctcccagcaggcagtatcaactactgtaaccaatccatgatctgtatgcggtatcgggctgaactgatactttatggacttgttgcttcaacttagtccgtaaaacgctcaagaccacatgaaaatatggtccataaaacttgttcaaaaatagacattttgcactatatttt

SEQ ID NO: 16630 - protein, 167 aa, Zea mays subsp. mays
  peptide (1)..(167): Ceres Seq. ID no. 12357113
  misc_feature (53)..(104): Homolog of NCBI NO: 15221456 NR Description: hypothetical protein; protein id: At1g68610.1
  misc_feature (59)..(104): Homolog of NCBI NO: 8272628 NR Description: ORFX [Lycopersicon pennellii]
  misc_feature (59)..(104): Homolog of NCBI NO: 27414005 NR Description: fw2.2 [Lycopersicon pimpinellifolium]
  misc_feature (59)..(104): Homolog of NCBI NO: 8272626 NR Description: ORFX [Lycopersicon esculentum]
  misc_feature (54)..(104): Homolog of NCBI NO: 34897268 NR Description: unknown protein [Oryza sativa (japonica
  misc_feature (59)..(107): Homolog of NCBI NO: 34897274 NR Description: hypothetical protein [Oryza sativa (japonica
  misc_feature (61)..(104): Homolog of NCBI NO: 15223921 NR Description: unknown protein; protein id: At1g14880.1
  misc_feature (57)..(104): Homolog of NCBI NO: 4105794 NR Description: PGPS/D12 [Petunia x hybrida]
  misc_feature (61)..(104): Homolog of NCBI NO: 15223920 NR Description: unknown protein
  misc_feature (59)..(104): Homolog of NCBI NO: 34897270 NR Description: hypothetical protein [Oryza sativa (japonica
LGLSGVWTRLHGSTMYPKAADEGAQPLATGIPFSGGGGYYQAGGAMAAAFAVQAQAPVAAWSTGLCNCFDDCHNCCVTCVCPCITFGQTAEIIDRGSTSCGTSGGAVRARHAAHRLSVRLLLLLPRQDARAVRPPGEPLLRLLRALLLPVAARSARSTASSRSEAST

SEQ ID NO: 16631 - protein, 153 aa, Zea mays subsp. mays
  peptide (1)..(153): Ceres Seq. ID no. 12357114
  misc_feature (40)..(90): Homolog of NCBI NO: 34897268 NR Description: unknown protein [Oryza sativa (japonica
  misc_feature (45)..(93): Homolog of NCBI NO: 34897274 NR Description: hypothetical protein [Oryza sativa (japonica
  misc_feature (47)..(90): Homolog of NCBI NO: 15223921 NR Description: unknown protein; protein id: At1g14880.1
  misc_feature (43)..(90): Homolog of NCBI NO: 4105794 NR Description: PGPS/D12 [Petunia x hybrida]
  misc_feature (47)..(90): Homolog of NCBI NO: 15223920 NR Description: unknown protein
  misc_feature (45)..(90): Homolog of NCBI NO: 34897270 NR Description: hypothetical protein [Oryza sativa (japonica
  misc_feature (39)..(90): Homolog of NCBI NO: 15221456 NR Description: hypothetical protein; protein id: At1g68610.1
  misc_feature (45)..(90): Homolog of NCBI NO: 27414005 NR Description: fw2.2 [Lycopersicon pimpinellifolium]
  misc_feature (45)..(90): Homolog of NCBI NO: 8272628 NR Description: ORFX [Lycopersicon pennellii]
  misc_feature (45)..(90): Homolog of NCBI NO: 8272626 NR Description: ORFX [Lycopersicon esculentum]
MYPKAADEGAQPLATGIPFSGGGGYYQAGGAMAAAFAVQAQAPVAAWSTGLCNCFDDCHNCCVTCVCPCITFGQTAEIIDRGSTSCGTSGGAVRARHAAHRLSVRLLLLLPRQDARAVRPPGEPLLRLLRALLLPVAARSARSTASSRSEAST

SEQ ID NO: 16632 - protein, 135 aa, Zea mays subsp. mays
  peptide (1)..(135): Ceres Seq. ID no. 12357115
RSLWSLDSPPRLHHVSQGGRRRCAAAGHGHPLQRRRRLLPGGRRDGGGVRGAGAGARRRLVHRALQLLRRLPQLLRDVRVPVHHVRADRGDHRPGLHVLRHQRGRCTRSSCCSPAVSASTPASTAPRCARSTASR

SEQ ID NO: 16633 - DNA, 955 bp, Zea mays subsp. mays
  misc_feature (1)..(955): Ceres Seq. ID no. 12566280
  misc_feature: MA Experiment ID: 108528 Result: Down-regulated in Transcription
  misc_feature: MA Experiment 108528 PARAMETER Experiment Name: Zm_Imbibed_Seeds_P Parameter: Age (day) Value: 5 vs. 2
  misc_feature: MA Experiment 108528 PARAMETER Experiment Name: Zm_Imbibed_Seeds_P Parameter: Organism Value: Zea mays
  misc_feature: MA Experiment 108528 PARAMETER Experiment Name: Zm_Imbibed_Seeds_P Parameter: Plant Line Value: 35A19
  misc_feature: MA Experiment 108528 PARAMETER Experiment Name: Zm_Imbibed_Seeds_P Parameter: Tissue Value: Aerial vs. Embryo
  misc_feature: MA Experiment ID: 108529 Result: Up-regulated in Transcription
  misc_feature: MA Experiment 108529 PARAMETER Experiment Name: Zm_Imbibed_Seeds_P Parameter: Age (day) Value: 5 vs. 2
  misc_feature: MA Experiment 108529 PARAMETER Experiment Name: Zm_Imbibed_Seeds_P Parameter: Organism Value: Zea mays
  misc_feature: MA Experiment 108529 PARAMETER Experiment Name: Zm_Imbibed_Seeds_P Parameter: Plant Line Value: 35A19
  misc_feature: MA Experiment 108529 PARAMETER Experiment Name: Zm_Imbibed_Seeds_P Parameter: Tissue Value: Roots vs. Embryo
  misc_feature: MA Experiment ID: 108530 Result: Down-regulated in Transcription
  misc_feature: MA Experiment 108530 PARAMETER Experiment Name: Zm_Imbibed_Seeds_P Parameter: Age (day) Value: 6 vs. 2
  misc_feature: MA Experiment 108530 PARAMETER Experiment Name: Zm_Imbibed_Seeds_P Parameter: Organism Value: Zea mays
  misc_feature: MA Experiment 108530 PARAMETER Experiment Name: Zm_Imbibed_Seeds_P Parameter: Plant Line Value: 35A19
  misc_feature: MA Experiment 108530 PARAMETER Experiment Name: Zm_Imbibed_Seeds_P Parameter: Tissue Value: Aerial vs. Embryo
  misc_feature: MA Experiment ID: 108532 Result: Up-regulated in Transcription
  misc_feature: MA Experiment 108532 PARAMETER Experiment Name: Zm_20uM_KNO3_H-to-L_P Parameter: Age (day) Value: 11
  misc_feature: MA Experiment 108532 PARAMETER Experiment Name: Zm_20uM_KNO3_H-to-L_P Parameter: Organism Value: Zea mays
  misc_feature: MA Experiment 108532 PARAMETER Experiment Name: Zm_20uM_KNO3_H-to-L_P Parameter: Plant Line Value: 35A19
  misc_feature: MA Experiment 108532 PARAMETER Experiment Name: Zm_20uM_KNO3_H-to-L_P Parameter: Timepoint (hr) Value: 16
  misc_feature: MA Experiment 108532 PARAMETER Experiment Name: Zm_20uM_KNO3_H-to-L_P Parameter: Tissue Value: Roots
  misc_feature: MA Experiment 108532 PARAMETER Experiment Name: Zm_20uM_KNO3_H-to-L_P Parameter: Treatment Value: 20uM KNO3 vs. 60mM KNO3
  misc_feature: MA Experiment ID: 108543 Result: Up-regulated in Transcription
  misc_feature: MA Experiment ID: 108545 Result: Down-regulated in Transcription
  misc_feature: MA Experiment 108545 PARAMETER Experiment Name: Zm_Imbibed_Seeds_P Parameter: Age (day) Value: 3 vs. 2
  misc_feature: MA Experiment 108545 PARAMETER Experiment Name: Zm_Imbibed_Seeds_P Parameter: Organism Value: Zea mays
  misc_feature: MA Experiment 108545 PARAMETER Experiment Name: Zm_Imbibed_Seeds_P Parameter: Plant Line Value: 35A19
  misc_feature: MA Experiment 108545 PARAMETER Experiment Name: Zm_Imbibed_Seeds_P Parameter: Tissue Value: Aerial vs. Embryo
  misc_feature: MA Experiment ID: 108546 Result: Up-regulated in Transcription
  misc_feature: MA Experiment 108546 PARAMETER Experiment Name: Zm_Imbibed_Seeds_P Parameter: Age (day) Value: 3 vs. 2
  misc_feature: MA Experiment 108546 PARAMETER Experiment Name: Zm_Imbibed_Seeds_P Parameter: Organism Value: Zea mays
  misc_feature: MA Experiment 108546 PARAMETER Experiment Name: Zm_Imbibed_Seeds_P Parameter: Plant Line Value: 35A19
  misc_feature: MA Experiment 108546 PARAMETER Experiment Name: Zm_Imbibed_Seeds_P Parameter: Tissue Value: Roots vs. Embryo
  misc_feature: MA Experiment ID: 108547 Result: Down-regulated in Transcription
  misc_feature: MA Experiment 108547 PARAMETER Experiment Name: Zm_Imbibed_Seeds_P Parameter: Age (day) Value: 4 vs. 2
  misc_feature: MA Experiment 108547 PARAMETER Experiment Name: Zm_Imbibed_Seeds_P Parameter: Organism Value: Zea mays
  misc_feature: MA Experiment 108547 PARAMETER Experiment Name: Zm_Imbibed_Seeds_P Parameter: Plant Line Value: 35A19
  misc_feature: MA Experiment 108547 PARAMETER Experiment Name: Zm_Imbibed_Seeds_P Parameter: Tissue Value: Aerial vs. Embryo
  misc_feature: MA Experiment ID: 20000535 Result: Down-regulated in Transcription
  misc_feature: MA Experiment 20000535 PARAMETER Experiment Name: Zm_Hybrid_Seed_Dev_P Parameter: DAP Value: 30 vs. 12
  misc_feature: MA Experiment 20000535 PARAMETER Experiment Name: Zm_Hybrid_Seed_Dev_P Parameter: Organism Value: Zea mays
  misc_feature: MA Experiment 20000535 PARAMETER Experiment Name: Zm_Hybrid_Seed_Dev_P Parameter: Plant Line Value: 35A19
  misc_feature: MA Experiment 20000535 PARAMETER Experiment Name: Zm_Hybrid_Seed_Dev_P Parameter: Tissue Value: Embryo vs. Unfert Floret
gcagagttgttgattgcagggaaaccgccaattggcaaggatgaagcttgtgaccgccttcgttgtgctgctcttttctctcctccccgactcgtccaccgcggaggacttcgatttcttctaccttgtccaacagtggccgggctcgttctgcgacacgcggcagggttgctgcttcccggacggcgcgggcaagccggaggcggcgttcggcatccacgggctgtggcccaactacgccaagtgccgcggccgccaccaccgcgagggcggcggcctcgcccgcgcggtgctcggcgccgacgacgccttcctcgccgccgtggggcggcggggcaagtgctggccggagtactgcggcggcggcggcgacggcgacggcggccaccagctgagcccctgggacgtccgggacctggtggcgtcgctgggccggagctggccgacgctgtcgtgcaagaaccggcgcagcttcgagttctggagctacgagtggaagaagcacggcacctgctccaacctggacccgcacgactacttcgcgcgcgcgctgcagctcagggagcggcacgacctcgcggcggtcctcgcggacgccgggatcgtgccgtccgacaccgacacgtacccggtggaccgcgtcagggacgccatcgcgcaggggaccggcttcgtggccaacctcgagtgcaaccgcgacgcggacggcgaggcgcagctgttccaggtgtaccagtgcgtggaccgcgaggccaaggacctcatcgactgcccgctccccatgcccaccaagtgcaccgatcgggtcaagttgcccgtcttctgattccgagcttctggctgtcgtttgcaattgtaaaaacgggccgggtgcagatcgatcgatacgacgatacatgcatgtttgcgtatgtgatttcgaaagcggatttgaataaatgtgtgtttacctttc

SEQ ID NO: 16634 - protein, 318 aa, Zea mays subsp. mays
  peptide (1)..(318): Ceres Seq. ID no. 12566281
  misc_feature (61)..(255): Pfam Name: HlyD family secretion protein Pfam Description: HlyD family secretion protein
AELLIAGKPPIGKDEACDRLRCAALFSPPRLVHRGGLRFLLPCPTVAGLVLRHAAGLLLPGRRGQAGGGVRHPRAVAQLRQVPRPPPPRGRRPRPRGARRRRRLPRRRGAAGQVLAGVLRRRRRRRRRPPAEPLGRPGPGGVAGPELADAVVQEPAQLRVLELRVEEARHLLQPGPARLLRARAAAQGAARPRGGPRGRRDRAVRHRHVPGGPRQGRHRAGDRLRGQPRVQPRRGRRGAAVPGVPVRGPRGQGPHRLPAPHAHQVHRSGQVARLLIPSFWLSFAIVKTGRVQIDRYDDTCMFAYVISKADLNKCVFTF

SEQ ID NO: 16635 - protein, 261 aa, Zea mays subsp. mays
  peptide (1)..(261): Ceres Seq. ID no. 12566282
  misc_feature (24)..(248): Pfam Name: Ribonuclease T2 family Pfam Description: Ribonuclease T2 family
  misc_feature (102)..(261): Homolog of NCBI NO: 9957752 NR Description: S-like ribonuclease [Prunus dulcis]
  misc_feature (9)..(66): Homolog of NCBI NO: 2118017 NR Description: ribonuclease non-S (EC 3.1.-.-) precursor -
  misc_feature (102)..(261): Homolog of NCBI NO: 2118017 NR Description: ribonuclease non-S (EC 3.1.-.-) precursor -
  misc_feature (1)..(66): Homolog of NCBI NO: 21555182 NR Description: ribonuclease, RNS1 [Arabidopsis thaliana]
  misc_feature (102)..(261): Homolog of NCBI NO: 21555182 NR Description: ribonuclease, RNS1 [Arabidopsis thaliana]
  misc_feature (1)..(66): Homolog of NCBI NO: 15227068 NR Description: ribonuclease, RNS1
  misc_feature (102)..(261): Homolog of NCBI NO: 15227068 NR Description: ribonuclease, RNS1
  misc_feature (1)..(261): Homolog of NCBI NO: 34913240 NR Description: putative aleurone ribonuclease
  misc_feature (1)..(106): Homolog of NCBI NO: 7435264 NR Description: aleurone ribonuclease (EC 3.1.-.-) - barley
  misc_feature (88)..(261): Homolog of NCBI NO: 7435264 NR Description: aleurone ribonuclease (EC 3.1.-.-) - barley
MKLVTAFVVLLFSLLPDSSTAEDFDFFYLVQQWPGSFCDTRQGCCFPDGAGKPEAAFGIHGLWPNYAKCRGRHHREGGGLARAVLGADDAFLAAVGRRGKCWPEYCGGGGDGDGGHQLSPWDVRDLVASLGRSWPTLSCKNRRSFEFWSYEWKKHGTCSNLDPHDYFARALQLRERHDLAAVLADAGIVPSDTDTYPVDRVRDAIAQGTGFVANLECNRDADGEAQLFQVYQCVDREAKDLIDCPLPMPTKCTDRVKLPVF

SEQ ID NO: 16636 - DNA, 1047 bp, Zea mays subsp. mays
  misc_feature (1)..(1047): Ceres Seq. ID no. 12402068
  misc_feature: MA Experiment ID: 108543 Result: Up-regulated in Transcription
  misc_feature: MA Experiment ID: 108689 Result: Up-regulated in Transcription
  misc_feature: MA Experiment 108689 PARAMETER Experiment Name: Zm_Drought_Roots_P Parameter: Age (day) Value: 9
  misc_feature: MA Experiment 108689 PARAMETER Experiment Name: Zm_Drought_Roots_P Parameter: Organism Value: Zea mays
  misc_feature: MA Experiment 108689 PARAMETER Experiment Name: Zm_Drought_Roots_P Parameter: Plant Line Value: 35A19
  misc_feature: MA Experiment 108689 PARAMETER Experiment Name: Zm_Drought_Roots_P Parameter: Timepoint (hr) Value: 24
  misc_feature: MA Experiment 108689 PARAMETER Experiment Name: Zm_Drought_Roots_P Parameter: Tissue Value: Roots
  misc_feature: MA Experiment 108689 PARAMETER Experiment Name: Zm_Drought_Roots_P Parameter: Treatment Value: Drought vs. No Drought
ttttagcaccacctctcatgactatcacatttctttcgggaaagtagaaaaaaatctattacccatgaggccatgatactttccacttggacgaagcgaaattgttaattcctcccttccagtatatagctcgctcgctcacactcggagctcgtaacaaagtcatcactcatcacatgagcttgcttgtgactgccagctttgcccagtgttcatcgcccatggaagagcgggcactgttcccggtgtccgattccagcaccacctgcagcagctctggctgtaccggccccaactcccctgtctcgtcgtcgcagtatttggacgacaccagcgacggcgccggcagctcgagcagccggaagcggccgcgccgggagctgaagcatccaacgtaccgcggcgtgcgcatgcgtgcgtggggcaagtgggtgtccgagatccgggagccccgcaagaagtcgcgcatctggctgggcaccttcgacactcccgagatggccgcgcgcgcgcatgacgtcgccgcgctcgccatcaagggccgcgccgcgcacctcaacttcccggagatgtcccacgagctgccccgcgccgcatcggcggcccccgaggacgtgcgtgcggcggcggcgctcgcggccgcgatggagatggagagcgtggcgccgcccacttctagcgagtctcgcgacggcgcccgcaatgacgaaaatgaagggccggccgcatctagctcgtccggcaacgacgccgacaatgcccagaccgaagagcgggctgcgccgtccgagcattcgatgctggctgacgggcacatccttaatctcgcggtcttcgagctgccggacgtcctactcgagttcggcttcgcgccgccgccgccgtcgacgtcttgtggctatgatttgtcctgggacgagccgttgctgctctgggagcactgacgagcaagagggggcaacgtgacatgcatgccaatgtgaagttagataggtgcagctgatgatccgcatacaagcatacttttactaatcagcattgatttgt

SEQ ID NO: 16637 - protein, 255 aa, Zea mays subsp. mays
  peptide (1)..(255): Ceres Seq. ID no. 12402069
  misc_feature (71)..(135): Pfam Name: AP2 domain Pfam Description: AP2 domain
  misc_feature (33)..(195): Homolog of NCBI NO: 38605844 NR Description: OSJNBb0034G17.2 [Oryza sativa (japonica
  misc_feature (5)..(246): Homolog of NCBI NO: 21592664 NR Description: putative AP2 domain transcription factor
  misc_feature (5)..(246): Homolog of NCBI NO: 15225381 NR Description: putative AP2 domain transcription factor
  misc_feature (55)..(228): Homolog of NCBI NO: 14140155 NR Description: putative AP2 domain transcription factor [Oryza
  misc_feature (33)..(172): Homolog of NCBI NO: 38605848 NR Description: OSJNBb0034G17.6 [Oryza sativa (japonica
  misc_feature (55)..(254): Homolog of NCBI NO: 25990951 NR Description: DREB-like protein [Zea mays]
  misc_feature (55)..(254): Homolog of NCBI NO: 21908034 NR Description: DRE binding factor 2 [Zea mays]
  misc_feature (55)..(254): Homolog of NCBI NO: 37536842 NR Description: putative DNA binding protein
  misc_feature (27)..(195): Homolog of NCBI NO: 14140163 NR Description: putative AP2 domain containing protein [Oryza
  misc_feature (25)..(255): Homolog of NCBI NO: 38605845 NR Description: OSJNBb0034G17.3 [Oryza sativa (japonica
MSLLVTASFAQCSSPMEERALFPVSDSSTTCSSSGCTGPNSPVSSSQYLDDTSDGAGSSSSRKRPRRELKHPTYRGVRMRAWGKWVSEIREPRKKSRIWLGTFDTPEMAARAHDVAALAIKGRAAHLNFPEMSHELPRAASAAPEDVRAAAALAAAMEMESVAPPTSSESRDGARNDENEGPAASSSSGNDADNAQTEERAAPSEHSMLADGHILNLAVFELPDVLLEFGFAPPPPSTSCGYDLSWDEPLLLWEH

SEQ ID NO: 16638 - protein, 240 aa, Zea mays subsp. mays
  peptide (1)..(240): Ceres Seq. ID no. 12402070
  misc_feature (56)..(120): Pfam Name: AP2 domain Pfam Description: AP2 domain
  misc_feature (18)..(180): Homolog of NCBI NO: 38605844 NR Description: OSJNBb0034G17.2 [Oryza sativa (japonica
  misc_feature (1)..(231): Homolog of NCBI NO: 21592664 NR Description: putative AP2 domain transcription factor
  misc_feature (1)..(231): Homolog of NCBI NO: 15225381 NR Description: putative AP2 domain transcription factor
  misc_feature (40)..(213): Homolog of NCBI NO: 14140155 NR Description: putative AP2 domain transcription factor [Oryza
  misc_feature (18)..(157): Homolog of NCBI NO: 38605848 NR Description: OSJNBb0034G17.6 [Oryza sativa (japonica
  misc_feature (40)..(239): Homolog of NCBI NO: 25990951 NR Description: DREB-like protein [Zea mays]
  misc_feature (40)..(239): Homolog of NCBI NO: 21908034 NR Description: DRE binding factor 2 [Zea mays]
  misc_feature (40)..(239): Homolog of NCBI NO: 37536842 NR Description: putative DNA binding protein
  misc_feature (12)..(180): Homolog of NCBI NO: 14140163 NR Description: putative AP2 domain containing protein [Oryza
  misc_feature (10)..(240): Homolog of NCBI NO: 38605845 NR Description: OSJNBb0034G17.3 [Oryza sativa (japonica
MEERALFPVSDSSTTCSSSGCTGPNSPVSSSQYLDDTSDGAGSSSSRKRPRRELKHPTYRGVRMRAWGKWVSEIREPRKKSRIWLGTFDTPEMAARAHDVAALAIKGRAAHLNFPEMSHELPRAASAAPEDVRAAAALAAAMEMESVAPPTSSESRDGARNDENEGPAASSSSGNDADNAQTEERAAPSEHSMLADGHILNLAVFELPDVLLEFGFAPPPPSTSCGYDLSWDEPLLLWEH

SEQ ID NO: 16639 - protein, 177 aa, Zea mays subsp. mays
  peptide (1)..(177): Ceres Seq. ID no. 12402071
  misc_feature (1)..(57): Pfam Name: AP2 domain Pfam Description: AP2 domain
  misc_feature (1)..(117): Homolog of NCBI NO: 38605844 NR Description: OSJNBb0034G17.2 [Oryza sativa (japonica
  misc_feature (1)..(168): Homolog of NCBI NO: 21592664 NR Description: putative AP2 domain transcription factor
  misc_feature (1)..(168): Homolog of NCBI NO: 15225381 NR Description: putative AP2 domain transcription factor
  misc_feature (1)..(150): Homolog of NCBI NO: 14140155 NR Description: putative AP2 domain transcription factor [Oryza
  misc_feature (1)..(94): Homolog of NCBI NO: 38605848 NR Description: OSJNBb0034G17.6 [Oryza sativa (japonica
  misc_feature (1)..(176): Homolog of NCBI NO: 25990951 NR Description: DREB-like protein [Zea mays]
  misc_feature (1)..(176): Homolog of NCBI NO: 21908034 NR Description: DRE binding factor 2 [Zea mays]
  misc_feature (1)..(176): Homolog of NCBI NO: 37536842 NR Description: putative DNA binding protein
  misc_feature (1)..(117): Homolog of NCBI NO: 14140163 NR Description: putative AP2 domain containing protein [Oryza
  misc_feature (1)..(177): Homolog of NCBI NO: 38605845 NR Description: OSJNBb0034G17.3 [Oryza sativa (japonica
MRAWGKWVSEIREPRKKSRIWLGTFDTPEMAARAHDVAALAIKGRAAHLNFPEMSHELPRAASAAPEDVRAAAALAAAMEMESVAPPTSSESRDGARNDENEGPAASSSSGNDADNAQTEERAAPSEHSMLADGHILNLAVFELPDVLLEFGFAPPPPSTSCGYDLSWDEPLLLWEH

SEQ ID NO: 16640 - DNA, 744 bp, Zea mays subsp. mays
  misc_feature (1)..(744): Ceres Seq. ID no. 12348192
  misc_feature: MA Experiment ID: 108522 Result: Up-regulated in Transcription
  misc_feature: MA Experiment 108522 PARAMETER Experiment Name: Zm_42deg_Heat_P Parameter: Age (day) Value: 8
  misc_feature: MA Experiment 108522 PARAMETER Experiment Name: Zm_42deg_Heat_P Parameter: Organism Value: Zea mays
  misc_feature: MA Experiment 108522 PARAMETER Experiment Name: Zm_42deg_Heat_P Parameter: Plant Line Value: 35A19
  misc_feature: MA Experiment 108522 PARAMETER Experiment Name: Zm_42deg_Heat_P Parameter: Temperature (deg C) Value: 42 vs. 22
  misc_feature: MA Experiment 108522 PARAMETER Experiment Name: Zm_42deg_Heat_P Parameter: Timepoint (hr) Value: 1
  misc_feature: MA Experiment 108522 PARAMETER Experiment Name: Zm_42deg_Heat_P Parameter: Tissue Value: Aerial
  misc_feature: MA Experiment ID: 108527 Result: Up-regulated in Transcription
  misc_feature: MA Experiment 108527 PARAMETER Experiment Name: Zm_5mM_NO_P Parameter: Age (day) Value: 8
  misc_feature: MA Experiment 108527 PARAMETER Experiment Name: Zm_5mM_NO_P Parameter: Organism Value: Zea mays
  misc_feature: MA Experiment 108527 PARAMETER Experiment Name: Zm_5mM_NO_P Parameter: Plant Line Value: 35A19
  misc_feature: MA Experiment 108527 PARAMETER Experiment Name: Zm_5mM_NO_P Parameter: Timepoint (hr) Value: 6
  misc_feature: MA Experiment 108527 PARAMETER Experiment Name: Zm_5mM_NO_P Parameter: Tissue Value: Aerial
  misc_feature: MA Experiment 108527 PARAMETER Experiment Name: Zm_5mM_NO_P Parameter: Treatment Value: 5mM NO vs. No Treatment
  misc_feature: MA Experiment ID: 108543 Result: Down-regulated in Transcription
  misc_feature: MA Experiment ID: 108559 Result: Up-regulated in Transcription
  misc_feature: MA Experiment 108559 PARAMETER Experiment Name: Zm_5mM_NO_P Parameter: Age (day) Value: 8
  misc_feature: MA Experiment 108559 PARAMETER Experiment Name: Zm_5mM_NO_P Parameter: Organism Value: Zea mays
  misc_feature: MA Experiment 108559 PARAMETER Experiment Name: Zm_5mM_NO_P Parameter: Plant Line Value: 35A19
  misc_feature: MA Experiment 108559 PARAMETER Experiment Name: Zm_5mM_NO_P Parameter: Timepoint (hr) Value: 12
  misc_feature: MA Experiment 108559 PARAMETER Experiment Name: Zm_5mM_NO_P Parameter: Tissue Value: Aerial
  misc_feature: MA Experiment 108559 PARAMETER Experiment Name: Zm_5mM_NO_P Parameter: Treatment Value: 5mM NO vs. No Treatment
  misc_feature: MA Experiment ID: 20000478 Result: Up-regulated in Transcription
  misc_feature: MA Experiment 20000478 PARAMETER Experiment Name: Zm_5mM_SA_P Parameter: Age (day) Value: 11
  misc_feature: MA Experiment 20000478 PARAMETER Experiment Name: Zm_5mM_SA_P Parameter: Organism Value: Zea mays
  misc_feature: MA Experiment 20000478 PARAMETER Experiment Name: Zm_5mM_SA_P Parameter: Plant Line Value: 35A19
  misc_feature: MA Experiment 20000478 PARAMETER Experiment Name: Zm_5mM_SA_P Parameter: Timepoint (hr) Value: 72
  misc_feature: MA Experiment 20000478 PARAMETER Experiment Name: Zm_5mM_SA_P Parameter: Tissue Value: Aerial
  misc_feature: MA Experiment 20000478 PARAMETER Experiment Name: Zm_5mM_SA_P Parameter: Treatment Value: 5mM SA vs. No Treatment
  misc_feature: MA Experiment ID: 20000626 Result: Up-regulated in Transcription
  misc_feature: MA Experiment 20000626 PARAMETER Experiment Name: Zm_Herbicide-Treatments_P Parameter: Timepoint (hr) Value: 12
  misc_feature: MA Experiment 20000626 PARAMETER Experiment Name: Zm_Herbicide-Treatments_P Parameter: Tissue Value: Aerial
  misc_feature: MA Experiment 20000626 PARAMETER Experiment Name: Zm_Herbicide-Treatments_P Parameter: Treatment Value: Roundup vs. No Treatment
  misc_feature: MA Experiment ID: 20000630 Result: Up-regulated in Transcription
  misc_feature: MA Experiment 20000630 PARAMETER Experiment Name: Zm_Herbicide-Treatments_P Parameter: Timepoint (hr) Value: 4
  misc_feature: MA Experiment 20000630 PARAMETER Experiment Name: Zm_Herbicide-Treatments_P Parameter: Tissue Value: Aerial
  misc_feature: MA Experiment 20000630 PARAMETER Experiment Name: Zm_Herbicide-Treatments_P Parameter: Treatment Value: Roundup vs. No Treatment
acaatttgattttgacccgtcgcctgcctggccgcctcctagtcgtaatcccgccccgccgcctccccctctccggccttctccgctccgcgcgggcgccatgtcggtgacgctgcacacgaacctgggcgacatcaagtgcgaggtgttctgcgaccaggtgccgcgcacggcggagaacttcctggcgctctgcggcagcggctactacgacggcaccgtgttccaccgcaacatcaagggcttcatggtccagggcggcgaccccaccggcaccggcaagggcgggtcgtccatctggggcgccaagttcgcggacgagttgagggagtcgctcaagcacaacgcgcgcgggatcatgtcgatggccaacagcgggcccaacaccaacggcagccagttcttcatcacctacgccaagcagccgcacctcaacggtcactacaccgtgttcgccaaggtcatccacggcttcgaggtgctggacctcatggagaaggcgcagacgggacccggggacaggccgctcgccgagatcaggctcaaccgcgtcaccatccacgccaacccgctcgccgtctgaactcctcttcctaccgctctcccctccactcgctcctgtcctcatccaccgggatctgagcgtcatcagccttgctttcaaccgcaaaatcacgctttggtttcggaacatcaatctgtagctctctaattttataccgatgctgtgacatgtaacctttg

SEQ ID NO: 16641 - protein, 193 aa, Zea mays subsp. mays
  peptide (1)..(193): Ceres Seq. ID no. 12348193
  misc_feature (36)..(192): Homolog of NCBI NO: 19922376 NR Description: CG7747-PA [Drosophila melanogaster]
  misc_feature (34)..(178): Homolog of NCBI NO: 39590255 NR Description: Hypothetical protein CBG11184 [Caenorhabditis
  misc_feature (36)..(190): Homolog of NCBI NO: 31210953 NR Description: ENSANGP00000016027 [Anopheles gambiae]
  misc_feature (34)..(192): Homolog of NCBI NO: 29028318 NR Description: cyclophilin [Homo sapiens]
  misc_feature (34)..(192): Homolog of NCBI NO: 28190012 NR Description: CYP10L [Mus musculus]
  misc_feature (34)..(192): Homolog of NCBI NO: 21746159 NR Description: peptidylprolyl isomerase-like 3; cyclophilin-like
  misc_feature (34)..(192): Homolog of NCBI NO: 19557636 NR Description: peptidylprolyl isomerase-like protein 3 isoform
  misc_feature (34)..(192): Homolog of NCBI NO: 14043400 NR Description: Unknown (protein for MGC:10732) [Homo sapiens]
  misc_feature (34)..(192): Homolog of NCBI NO: 30678211 NR Description: expressed protein [Arabidopsis thaliana]
  misc_feature (34)..(192): Homolog of NCBI NO: 6006361 NR Description: ESTs AU030008(E50477),AU078239(E50477) correspond a region of the predicted gene.~Similar to peptidyl-prolyl
QFDFDPSPAWPPPSRNPAPPPPPLRPSPLRAGAMSVTLHTNLGDIKCEVFCDQVPRTAENFLALCGSGYYDGTVFHRNIKGFMVQGGDPTGTGKGGSSIWGAKFADELRESLKHNARGIMSMANSGPNTNGSQFFITYAKQPHLNGHYTVFAKVIHGFEVLDLMEKAQTGPGDRPLAEIRLNRVTIHANPLAV

SEQ ID NO: 16642 - protein, 160 aa, Zea mays subsp. mays
  peptide (1)..(160): Ceres Seq. ID no. 12348194
  misc_feature (3)..(159): Homolog of NCBI NO: 19922376 NR Description: CG7747-PA [Drosophila melanogaster]
  misc_feature (1)..(145): Homolog of NCBI NO: 39590255 NR Description: Hypothetical protein CBG11184 [Caenorhabditis
  misc_feature (3)..(157): Homolog of NCBI NO: 31210953 NR Description: ENSANGP00000016027 [Anopheles gambiae]
  misc_feature (1)..(159): Homolog of NCBI NO: 29028318 NR Description: cyclophilin [Homo sapiens]
  misc_feature (1)..(159): Homolog of NCBI NO: 28190012 NR Description: CYP10L [Mus musculus]
  misc_feature (1)..(159): Homolog of NCBI NO: 21746159 NR Description: peptidylprolyl isomerase-like 3; cyclophilin-like
  misc_feature (1)..(159): Homolog of NCBI NO: 19557636 NR Description: peptidylprolyl isomerase-like protein 3 isoform
  misc_feature (1)..(159): Homolog of NCBI NO: 14043400 NR Description: Unknown (protein for MGC:10732) [Homo sapiens]
  misc_feature (1)..(159): Homolog of NCBI NO: 30678211 NR Description: expressed protein [Arabidopsis thaliana]
  misc_feature (1)..(159): Homolog of NCBI NO: 6006361 NR Description: ESTs AU030008(E50477),AU078239(E50477) correspond a region of the predicted gene.~Similar to peptidyl-prolyl
MSVTLHTNLGDIKCEVFCDQVPRTAENFLALCGSGYYDGTVFHRNIKGFMVQGGDPTGTGKGGSSIWGAKFADELRESLKHNARGIMSMANSGPNTNGSQFFITYAKQPHLNGHYTVFAKVIHGFEVLDLMEKAQTGPGDRPLAEIRLNRVTIHANPLAV

SEQ ID NO: 16643 - protein, 111 aa, Zea mays subsp. mays
  peptide (1)..(111): Ceres Seq. ID no. 12348195
  misc_feature (1)..(110): Homolog of NCBI NO: 19922376 NR Description: CG7747-PA [Drosophila melanogaster]
  misc_feature (1)..(96): Homolog of NCBI NO: 39590255 NR Description: Hypothetical protein CBG11184 [Caenorhabditis
  misc_feature (1)..(108): Homolog of NCBI NO: 31210953 NR Description: ENSANGP00000016027 [Anopheles gambiae]
  misc_feature (1)..(110): Homolog of NCBI NO: 29028318 NR Description: cyclophilin [Homo sapiens]
  misc_feature (1)..(110): Homolog of NCBI NO: 28190012 NR Description: CYP10L [Mus musculus]
  misc_feature (1)..(110): Homolog of NCBI NO: 21746159 NR Description: peptidylprolyl isomerase-like 3; cyclophilin-like
  misc_feature (1)..(110): Homolog of NCBI NO: 19557636 NR Description: peptidylprolyl isomerase-like protein 3 isoform
  misc_feature (1)..(110): Homolog of NCBI NO: 14043400 NR Description: Unknown (protein for MGC:10732) [Homo sapiens]
  misc_feature (1)..(110): Homolog of NCBI NO: 30678211 NR Description: expressed protein [Arabidopsis thaliana]
  misc_feature (1)..(110): Homolog of NCBI NO: 6006361 NR Description: ESTs AU030008(E50477),AU078239(E50477) correspond a region of the predicted gene.~Similar to peptidyl-prolyl
MVQGGDPTGTGKGGSSIWGAKFADELRESLKHNARGIMSMANSGPNTNGSQFFITYAKQPHLNGHYTVFAKVIHGFEVLDLMEKAQTGPGDRPLAEIRLNRVTIHANPLAV

SEQ ID NO: 16644 - DNA, 745 bp, Zea mays subsp. mays
  misc_feature (1)..(745): Ceres Seq. ID no. 12401848
  misc_feature: MA Experiment ID: 108504 Result: Up-regulated in Transcription
  misc_feature: MA Experiment 108504 PARAMETER Experiment Name: Zm_Drought_P Parameter: Age (day) Value: 8
  misc_feature: MA Experiment 108504 PARAMETER Experiment Name: Zm_Drought_P Parameter: Organism Value: Zea mays
  misc_feature: MA Experiment 108504 PARAMETER Experiment Name: Zm_Drought_P Parameter: Plant Line Value: 35A19
  misc_feature: MA Experiment 108504 PARAMETER Experiment Name: Zm_Drought_P Parameter: Timepoint (hr) Value: 12
  misc_feature: MA Experiment 108504 PARAMETER Experiment Name: Zm_Drought_P Parameter: Tissue Value: Aerial
  misc_feature: MA Experiment 108504 PARAMETER Experiment Name: Zm_Drought_P Parameter: Treatment Value: Drought vs. No Drought
  misc_feature: MA Experiment ID: 108528 Result: Down-regulated in Transcription
  misc_feature: MA Experiment 108528 PARAMETER Experiment Name: Zm_Imbibed_Seeds_P Parameter: Age (day) Value: 5 vs. 2
  misc_feature: MA Experiment 108528 PARAMETER Experiment Name: Zm_Imbibed_Seeds_P Parameter: Organism Value: Zea mays
  misc_feature: MA Experiment 108528 PARAMETER Experiment Name: Zm_Imbibed_Seeds_P Parameter: Plant Line Value: 35A19
  misc_feature: MA Experiment 108528 PARAMETER Experiment Name: Zm_Imbibed_Seeds_P Parameter: Tissue Value: Aerial vs. Embryo
  misc_feature: MA Experiment ID: 108530 Result: Down-regulated in Transcription
  misc_feature: MA Experiment 108530 PARAMETER Experiment Name: Zm_Imbibed_Seeds_P Parameter: Age (day) Value: 6 vs. 2
  misc_feature: MA Experiment 108530 PARAMETER Experiment Name: Zm_Imbibed_Seeds_P Parameter: Organism Value: Zea mays
  misc_feature: MA Experiment 108530 PARAMETER Experiment Name: Zm_Imbibed_Seeds_P Parameter: Plant Line Value: 35A19
  misc_feature: MA Experiment 108530 PARAMETER Experiment Name: Zm_Imbibed_Seeds_P Parameter: Tissue Value: Aerial vs. Embryo
  misc_feature: MA Experiment ID: 108535 Result: Up-regulated in Transcription
  misc_feature: MA Experiment 108535 PARAMETER Experiment Name: Zm_Meristem_P Parameter: Age (day) Value: 8
  misc_feature: MA Experiment 108535 PARAMETER Experiment Name: Zm_Meristem_P Parameter: Organism Value: Zea mays
  misc_feature: MA Experiment 108535 PARAMETER Experiment Name: Zm_Meristem_P Parameter: Plant Line Value: 35A19
  misc_feature: MA Experiment 108535 PARAMETER Experiment Name: Zm_Meristem_P Parameter: Tissue Value: Root Meristem vs. Above Root Meristem
  misc_feature: MA Experiment ID: 108536 Result: Up-regulated in Transcription
  misc_feature: MA Experiment 108536 PARAMETER Experiment Name: Zm_Meristem_P Parameter: Age (day) Value: 8
  misc_feature: MA Experiment 108536 PARAMETER Experiment Name: Zm_Meristem_P Parameter: Organism Value: Zea mays
  misc_feature: MA Experiment 108536 PARAMETER Experiment Name: Zm_Meristem_P Parameter: Plant Line Value: 35A19
  misc_feature: MA Experiment 108536 PARAMETER Experiment Name: Zm_Meristem_P Parameter: Tissue Value: Shoot Meristem vs. Above Shoot Meristem
  misc_feature: MA Experiment ID: 108543 Result: Up-regulated in Transcription
  misc_feature: MA Experiment ID: 108547 Result: Down-regulated in Transcription
  misc_feature: MA Experiment 108547 PARAMETER Experiment Name: Zm_Imbibed_Seeds_P Parameter: Age (day) Value: 4 vs. 2
  misc_feature: MA Experiment 108547 PARAMETER Experiment Name: Zm_Imbibed_Seeds_P Parameter: Organism Value: Zea mays
  misc_feature: MA Experiment 108547 PARAMETER Experiment Name: Zm_Imbibed_Seeds_P Parameter: Plant Line Value: 35A19
  misc_feature: MA Experiment 108547 PARAMETER Experiment Name: Zm_Imbibed_Seeds_P Parameter: Tissue Value: Aerial vs. Embryo
  misc_feature: MA Experiment ID: 108556 Result: Up-regulated in Transcription
  misc_feature: MA Experiment 108556 PARAMETER Experiment Name: Zm_Drought_P Parameter: Age (day) Value: 9
  misc_feature: MA Experiment 108556 PARAMETER Experiment Name: Zm_Drought_P Parameter: Organism Value: Zea mays
  misc_feature: MA Experiment 108556 PARAMETER Experiment Name: Zm_Drought_P Parameter: Plant Line Value: 35A19
  misc_feature: MA Experiment 108556 PARAMETER Experiment Name: Zm_Drought_P Parameter: Timepoint (hr) Value: 24
  misc_feature: MA Experiment 108556 PARAMETER Experiment Name: Zm_Drought_P Parameter: Tissue Value: Aerial
  misc_feature: MA Experiment 108556 PARAMETER Experiment Name: Zm_Drought_P Parameter: Treatment Value: Drought vs. No Drought
  misc_feature: MA Experiment ID: 108559 Result: Up-regulated in Transcription
  misc_feature: MA Experiment 108559 PARAMETER Experiment Name: Zm_5mM_NO_P Parameter: Age (day) Value: 8
  misc_feature: MA Experiment 108559 PARAMETER Experiment Name: Zm_5mM_NO_P Parameter: Organism Value: Zea mays
  misc_feature: MA Experiment 108559 PARAMETER Experiment Name: Zm_5mM_NO_P Parameter: Plant Line Value: 35A19
  misc_feature: MA Experiment 108559 PARAMETER Experiment Name: Zm_5mM_NO_P Parameter: Timepoint (hr) Value: 12
  misc_feature: MA Experiment 108559 PARAMETER Experiment Name: Zm_5mM_NO_P Parameter: Tissue Value: Aerial
  misc_feature: MA Experiment 108559 PARAMETER Experiment Name: Zm_5mM_NO_P Parameter: Treatment Value: 5mM NO vs. No Treatment
  misc_feature: MA Experiment ID: 20000477 Result: Up-regulated in Transcription
  misc_feature: MA Experiment 20000477 PARAMETER Experiment Name: Zm_5mM_SA_P Parameter: Age (day) Value: 10
  misc_feature: MA Experiment 20000477 PARAMETER Experiment Name: Zm_5mM_SA_P Parameter: Organism Value: Zea mays
  misc_feature: MA Experiment 20000477 PARAMETER Experiment Name: Zm_5mM_SA_P Parameter: Plant Line Value: 35A19
  misc_feature: MA Experiment 20000477 PARAMETER Experiment Name: Zm_5mM_SA_P Parameter: Timepoint (hr) Value: 48
  misc_feature: MA Experiment 20000477 PARAMETER Experiment Name: Zm_5mM_SA_P Parameter: Tissue Value: Aerial
  misc_feature: MA Experiment 20000477 PARAMETER Experiment Name: Zm_5mM_SA_P Parameter: Treatment Value: 5mM SA vs. No Treatment
  misc_feature: MA Experiment ID: 20000478 Result: Up-regulated in Transcription
  misc_feature: MA Experiment 20000478 PARAMETER Experiment Name: Zm_5mM_SA_P Parameter: Age (day) Value: 11
  misc_feature: MA Experiment 20000478 PARAMETER Experiment Name: Zm_5mM_SA_P Parameter: Organism Value: Zea mays
  misc_feature: MA Experiment 20000478 PARAMETER Experiment Name: Zm_5mM_SA_P Parameter: Plant Line Value: 35A19
  misc_feature: MA Experiment 20000478 PARAMETER Experiment Name: Zm_5mM_SA_P Parameter: Timepoint (hr) Value: 72
  misc_feature: MA Experiment 20000478 PARAMETER Experiment Name: Zm_5mM_SA_P Parameter: Tissue Value: Aerial
  misc_feature: MA Experiment 20000478 PARAMETER Experiment Name: Zm_5mM_SA_P Parameter: Treatment Value: 5mM SA vs. No Treatment
  misc_feature: MA Experiment ID: 20000479 Result: Up-regulated in Transcription
  misc_feature: MA Experiment 20000479 PARAMETER Experiment Name: Zm_Drought_P Parameter: Age (day) Value: 10
  misc_feature: MA Experiment 20000479 PARAMETER Experiment Name: Zm_Drought_P Parameter: Organism Value: Zea mays
  misc_feature: MA Experiment 20000479 PARAMETER Experiment Name: Zm_Drought_P Parameter: Plant Line Value: 35A19
  misc_feature: MA Experiment 20000479 PARAMETER Experiment Name: Zm_Drought_P Parameter: Timepoint (hr) Value: 48
  misc_feature: MA Experiment 20000479 PARAMETER Experiment Name: Zm_Drought_P Parameter: Tissue Value: Aerial
  misc_feature: MA Experiment 20000479 PARAMETER Experiment Name: Zm_Drought_P Parameter: Treatment Value: Drought vs. No Drought
  misc_feature: MA Experiment ID: 20000480 Result: Up-regulated in Transcription
  misc_feature: MA Experiment 20000480 PARAMETER Experiment Name: Zm_Drought_P Parameter: Age (day) Value: 11
  misc_feature: MA Experiment 20000480 PARAMETER Experiment Name: Zm_Drought_P Parameter: Organism Value: Zea mays
  misc_feature: MA Experiment 20000480 PARAMETER Experiment Name: Zm_Drought_P Parameter: Plant Line Value: 35A19
  misc_feature: MA Experiment 20000480 PARAMETER Experiment Name: Zm_Drought_P Parameter: Timepoint (hr) Value: 72
  misc_feature: MA Experiment 20000480 PARAMETER Experiment Name: Zm_Drought_P Parameter: Tissue Value: Aerial
  misc_feature: MA Experiment 20000480 PARAMETER Experiment Name: Zm_Drought_P Parameter: Treatment Value: Drought vs. No Drought
  misc_feature: MA Experiment ID: 20001608 Result: Up-regulated in Transcription
  misc_feature: MA Experiment 20001608 PARAMETER Experiment Name: Zm_50ppm_KNO3_L-to-H_P Parameter: Age (day) Value: 21
  misc_feature: MA Experiment 20001608 PARAMETER Experiment Name: Zm_50ppm_KNO3_L-to-H_P Parameter: Organism Value: Zea mays
  misc_feature: MA Experiment 20001608 PARAMETER Experiment Name: Zm_50ppm_KNO3_L-to-H_P Parameter: Plant Line Value: 35A19
  misc_feature: MA Experiment 20001608 PARAMETER Experiment Name: Zm_50ppm_KNO3_L-to-H_P Parameter: Timepoint (hr) Value: 48
  misc_feature: MA Experiment 20001608 PARAMETER Experiment Name: Zm_50ppm_KNO3_L-to-H_P Parameter: Tissue Value: Shoots
  misc_feature: MA Experiment 20001608 PARAMETER Experiment Name: Zm_50ppm_KNO3_L-to-H_P Parameter: Treatment Value: 50ppm KNO3 vs. 50ppm KCl
acctgctccattttatgcttctccctcgctcgccctcgccctcgccgcaacgctttgtgatagagtttctgtctgctaccagcaccacagcctagcaccccaccgcgtctagggttttctgctccaatggccgccgcgggggcagacggggagcgcaggatcggggtggccatcgactactcggagagcgccaagaaggcgctggactgggccatcgacaacctgctccaccacggggacaccctcgtcgtcgtccacgtcctgcaccacggcgcggaggagaccaagcacacgctctgggccaagtccggatccccgctgatccctctctccgagttccgggagcccgaggtgatgcagggctacggcgtgcgccccgacgccgaggtgctcgacgcgatcgacacggcagcgcgccagaagcagctgaaggtggtggcgaagctgtactggggcgacgccagggagaagctctgcgacgccgtcgaggacctcaggatcgattccctcgtcatgggtagtcgcggcctcggcccgatccagaggattctcctgggaagcgtgacaaactacgtgctgtcaaacgcatcgtgcccggtgacagtcgtcaaggggaagtagtggcctgggcagcgtgccagtgatatgaatgaagatgctagcgtgcagtttgtgtgggttatagctaaacactatgttccgtcttgttgctgcatttcaataaagcatgtgtcttctagatttc

SEQ ID NO: 16645 - protein, 164 aa, Zea mays subsp. mays
  peptide (1)..(164): Ceres Seq. ID no. 12401849
  misc_feature (8)..(162): Pfam Name: Universal stress protein family Pfam Description: Universal stress protein family
  misc_feature (14)..(164): Homolog of NCBI NO: 30681321 NR Description: ER6 protein -related [Arabidopsis thaliana]
  misc_feature (8)..(162): Homolog of NCBI NO: 15528707 NR Description: P0583G08.8 [Oryza sativa (japonica
  misc_feature (10)..(140): Homolog of NCBI NO: 18396497 NR Description: expressed protein
  misc_feature (9)..(162): Homolog of NCBI NO: 11602749 NR Description: early nodulin ENOD18 [Vicia faba]
  misc_feature (8)..(162): Homolog of NCBI NO: 18401345 NR Description: expressed protein
  misc_feature (9)..(162): Homolog of NCBI NO: 11602747 NR Description: early nodulin ENOD18 [Vicia faba]
  misc_feature (9)..(162): Homolog of NCBI NO: 11602751 NR Description: ENOD18 protein [Vicia faba]
  misc_feature (10)..(162): Homolog of NCBI NO: 30678807 NR Description: expressed protein [Arabidopsis thaliana]
  misc_feature (9)..(162): Homolog of NCBI NO: 30693971 NR Description: expressed protein [Arabidopsis thaliana]
  misc_feature (6)..(164): Homolog of NCBI NO: 20160561 NR Description: P0414E03.3 [Oryza sativa (japonica
MAAAGADGERRIGVAIDYSESAKKALDWAIDNLLHHGDTLVVVHVLHHGAEETKHTLWAKSGSPLIPLSEFREPEVMQGYGVRPDAEVLDAIDTAARQKQLKVVAKLYWGDAREKLCDAVEDLRIDSLVMGSRGLGPIQRILLGSVTNYVLSNASCPVTVVKGK

SEQ ID NO: 16646 - protein, 88 aa, Zea mays subsp. mays
  peptide (1)..(88): Ceres Seq. ID no. 12401850
  misc_feature (1)..(86): Pfam Name: Universal stress protein family Pfam Description: Universal stress protein family
  misc_feature (1)..(88): Homolog of NCBI NO: 30681321 NR Description: ER6 protein -related [Arabidopsis thaliana]
  misc_feature (1)..(86): Homolog of NCBI NO: 15528707 NR Description: P0583G08.8 [Oryza sativa (japonica
  misc_feature (1)..(64): Homolog of NCBI NO: 18396497 NR Description: expressed protein
  misc_feature (1)..(86): Homolog of NCBI NO: 11602749 NR Description: early nodulin ENOD18 [Vicia faba]
  misc_feature (1)..(86): Homolog of NCBI NO: 18401345 NR Description: expressed protein
  misc_feature (1)..(86): Homolog of NCBI NO: 11602747 NR Description: early nodulin ENOD18 [Vicia faba]
  misc_feature (1)..(86): Homolog of NCBI NO: 11602751 NR Description: ENOD18 protein [Vicia faba]
  misc_feature (1)..(86): Homolog of NCBI NO: 30678807 NR Description: expressed protein [Arabidopsis thaliana]
  misc_feature (1)..(86): Homolog of NCBI NO: 30693971 NR Description: expressed protein [Arabidopsis thaliana]
  misc_feature (1)..(88): Homolog of NCBI NO: 20160561 NR Description: P0414E03.3 [Oryza sativa (japonica
MQGYGVRPDAEVLDAIDTAARQKQLKVVAKLYWGDAREKLCDAVEDLRIDSLVMGSRGLGPIQRILLGSVTNYVLSNASCPVTVVKGK

SEQ ID NO: 16647 - DNA, 1106 bp, Zea mays subsp. mays
  misc_feature (1)..(1106): Ceres Seq. ID no. 12367566
  misc_feature: MA Experiment ID: 108527 Result: Down-regulated in Transcription
  misc_feature: MA Experiment 108527 PARAMETER Experiment Name: Zm_5mM_NO_P Parameter: Age (day) Value: 8
  misc_feature: MA Experiment 108527 PARAMETER Experiment Name: Zm_5mM_NO_P Parameter: Organism Value: Zea mays
  misc_feature: MA Experiment 108527 PARAMETER Experiment Name: Zm_5mM_NO_P Parameter: Plant Line Value: 35A19
  misc_feature: MA Experiment 108527 PARAMETER Experiment Name: Zm_5mM_NO_P Parameter: Timepoint (hr) Value: 6
  misc_feature: MA Experiment 108527 PARAMETER Experiment Name: Zm_5mM_NO_P Parameter: Tissue Value: Aerial
  misc_feature: MA Experiment 108527 PARAMETER Experiment Name: Zm_5mM_NO_P Parameter: Treatment Value: 5mM NO vs. No Treatment
  misc_feature: MA Experiment ID: 108535 Result: Down-regulated in Transcription
  misc_feature: MA Experiment 108535 PARAMETER Experiment Name: Zm_Meristem_P Parameter: Age (day) Value: 8
  misc_feature: MA Experiment 108535 PARAMETER Experiment Name: Zm_Meristem_P Parameter: Organism Value: Zea mays
  misc_feature: MA Experiment 108535 PARAMETER Experiment Name: Zm_Meristem_P Parameter: Plant Line Value: 35A19
  misc_feature: MA Experiment 108535 PARAMETER Experiment Name: Zm_Meristem_P Parameter: Tissue Value: Root Meristem vs. Above Root Meristem
  misc_feature: MA Experiment ID: 108536 Result: Up-regulated in Transcription
  misc_feature: MA Experiment 108536 PARAMETER Experiment Name: Zm_Meristem_P Parameter: Age (day) Value: 8
  misc_feature: MA Experiment 108536 PARAMETER Experiment Name: Zm_Meristem_P Parameter: Organism Value: Zea mays
  misc_feature: MA Experiment 108536 PARAMETER Experiment Name: Zm_Meristem_P Parameter: Plant Line Value: 35A19
  misc_feature: MA Experiment 108536 PARAMETER Experiment Name: Zm_Meristem_P Parameter: Tissue Value: Shoot Meristem vs. Above Shoot Meristem
  misc_feature: MA Experiment ID: 108543 Result: Up-regulated in Transcription
  misc_feature: MA Experiment ID: 108556 Result: Down-regulated in Transcription
  misc_feature: MA Experiment 108556 PARAMETER Experiment Name: Zm_Drought_P Parameter: Age (day) Value: 9
  misc_feature: MA Experiment 108556 PARAMETER Experiment Name: Zm_Drought_P Parameter: Organism Value: Zea mays
  misc_feature: MA Experiment 108556 PARAMETER Experiment Name: Zm_Drought_P Parameter: Plant Line Value: 35A19
  misc_feature: MA Experiment 108556 PARAMETER Experiment Name: Zm_Drought_P Parameter: Timepoint (hr) Value: 24
  misc_feature: MA Experiment 108556 PARAMETER Experiment Name: Zm_Drought_P Parameter: Tissue Value: Aerial
  misc_feature: MA Experiment 108556 PARAMETER Experiment Name: Zm_Drought_P Parameter: Treatment Value: Drought vs. No Drought
  misc_feature: MA Experiment ID: 108559 Result: Down-regulated in Transcription
  misc_feature: MA Experiment 108559 PARAMETER Experiment Name: Zm_5mM_NO_P Parameter: Age (day) Value: 8
  misc_feature: MA Experiment 108559 PARAMETER Experiment Name: Zm_5mM_NO_P Parameter: Organism Value: Zea mays
  misc_feature: MA Experiment 108559 PARAMETER Experiment Name: Zm_5mM_NO_P Parameter: Plant Line Value: 35A19
  misc_feature: MA Experiment 108559 PARAMETER Experiment Name: Zm_5mM_NO_P Parameter: Timepoint (hr) Value: 12
  misc_feature: MA Experiment 108559 PARAMETER Experiment Name: Zm_5mM_NO_P Parameter: Tissue Value: Aerial
  misc_feature: MA Experiment 108559 PARAMETER Experiment Name: Zm_5mM_NO_P Parameter: Treatment Value: 5mM NO vs. No Treatment
  misc_feature: MA Experiment ID: 108687 Result: Down-regulated in Transcription
  misc_feature: MA Experiment 108687 PARAMETER Experiment Name: Zm_Embryos-Flowers__P Parameter: Tissue Value: Embryo vs. Aerial+
  misc_feature: MA Experiment ID: 108689 Result: Down-regulated in Transcription
  misc_feature: MA Experiment 108689 PARAMETER Experiment Name: Zm_Drought_Roots_P Parameter: Age (day) Value: 9
  misc_feature: MA Experiment 108689 PARAMETER Experiment Name: Zm_Drought_Roots_P Parameter: Organism Value: Zea mays
  misc_feature: MA Experiment 108689 PARAMETER Experiment Name: Zm_Drought_Roots_P Parameter: Plant Line Value: 35A19
  misc_feature: MA Experiment 108689 PARAMETER Experiment Name: Zm_Drought_Roots_P Parameter: Timepoint (hr) Value: 24
  misc_feature: MA Experiment 108689 PARAMETER Experiment Name: Zm_Drought_Roots_P Parameter: Tissue Value: Roots
  misc_feature: MA Experiment 108689 PARAMETER Experiment Name: Zm_Drought_Roots_P Parameter: Treatment Value: Drought vs. No Drought
  misc_feature: MA Experiment ID: 20000477 Result: Down-regulated in Transcription
  misc_feature: MA Experiment 20000477 PARAMETER Experiment Name: Zm_5mM_SA_P Parameter: Age (day) Value: 10
  misc_feature: MA Experiment 20000477 PARAMETER Experiment Name: Zm_5mM_SA_P Parameter: Organism Value: Zea mays
  misc_feature: MA Experiment 20000477 PARAMETER Experiment Name: Zm_5mM_SA_P Parameter: Plant Line Value: 35A19
  misc_feature: MA Experiment 20000477 PARAMETER Experiment Name: Zm_5mM_SA_P Parameter: Timepoint (hr) Value: 48
  misc_feature: MA Experiment 20000477 PARAMETER Experiment Name: Zm_5mM_SA_P Parameter: Tissue Value: Aerial
  misc_feature: MA Experiment 20000477 PARAMETER Experiment Name: Zm_5mM_SA_P Parameter: Treatment Value: 5mM SA vs. No Treatment
  misc_feature: MA Experiment ID: 20000478 Result: Down-regulated in Transcription
  misc_feature: MA Experiment 20000478 PARAMETER Experiment Name: Zm_5mM_SA_P Parameter: Age (day) Value: 11
  misc_feature: MA Experiment 20000478 PARAMETER Experiment Name: Zm_5mM_SA_P Parameter: Organism Value: Zea mays
  misc_feature: MA Experiment 20000478 PARAMETER Experiment Name: Zm_5mM_SA_P Parameter: Plant Line Value: 35A19
  misc_feature: MA Experiment 20000478 PARAMETER Experiment Name: Zm_5mM_SA_P Parameter: Timepoint (hr) Value: 72
  misc_feature: MA Experiment 20000478 PARAMETER Experiment Name: Zm_5mM_SA_P Parameter: Tissue Value: Aerial
  misc_feature: MA Experiment 20000478 PARAMETER Experiment Name: Zm_5mM_SA_P Parameter: Treatment Value: 5mM SA vs. No Treatment
  misc_feature: MA Experiment ID: 20000479 Result: Down-regulated in Transcription
  misc_feature: MA Experiment 20000479 PARAMETER Experiment Name: Zm_Drought_P Parameter: Age (day) Value: 10
  misc_feature: MA Experiment 20000479 PARAMETER Experiment Name: Zm_Drought_P Parameter: Organism Value: Zea mays
  misc_feature: MA Experiment 20000479 PARAMETER Experiment Name: Zm_Drought_P Parameter: Plant Line Value: 35A19
  misc_feature: MA Experiment 20000479 PARAMETER Experiment Name: Zm_Drought_P Parameter: Timepoint (hr) Value: 48
  misc_feature: MA Experiment 20000479 PARAMETER Experiment Name: Zm_Drought_P Parameter: Tissue Value: Aerial
  misc_feature: MA Experiment 20000479 PARAMETER Experiment Name: Zm_Drought_P Parameter: Treatment Value: Drought vs. No Drought
  misc_feature: MA Experiment ID: 20000535 Result: Down-regulated in Transcription
  misc_feature: MA Experiment 20000535 PARAMETER Experiment Name: Zm_Hybrid_Seed_Dev_P Parameter: DAP Value: 30 vs. 12
  misc_feature: MA Experiment 20000535 PARAMETER Experiment Name: Zm_Hybrid_Seed_Dev_P Parameter: Organism Value: Zea mays
  misc_feature: MA Experiment 20000535 PARAMETER Experiment Name: Zm_Hybrid_Seed_Dev_P Parameter: Plant Line Value: 35A19
  misc_feature: MA Experiment 20000535 PARAMETER Experiment Name: Zm_Hybrid_Seed_Dev_P Parameter: Tissue Value: Embryo vs. Unfert Floret
agaacagcagaggtgagaacgggagagcgaccccagcagacaagagacagacgagagagagcgagcaagccgagcatcgtgacctctctgtttctctctcttcccttctcgtcttctgcaagaagccagtgaccgtctctgtttctctcattccctttcatcactctgctggtctccctcttccacctctggccttggccatggcctccagcgcctcccggttcatcaagtgcgtcacagtgggggacggcgccgtgggaaagacctgcatgctcatctgctacaccagcaacaagttccccactgattacatacccactgtcttcgataacttcagtgcaaacgtggtagtcgacggtaccacggtgaatttgggcctttgggatactgcagggcaggaagattacaacagactgaggccactgagctaccgcggagcagatgtgttcgtgctcgccttctcgcttgtcagccgagctagctacgagaatgttatgaagaagtggctaccggagcttcagcattatgcaccgggtgtccccatagtgttggccggaactaaattggatcttcgtgaagacaggcactacttagttgaccatcctggtgcggtacctgttactacagcacagggggaggaactgcgcaagcacattggcgcaacttgctacatcgaatgcagctcaaaaactcagcagaatgtgaaagctgtgtttgatgctgccatcaaggtagtaatcaggcctccgacgaagcagcgagaaaggaagaaaaagaaagaacggcgaggatgctcaatattctgcagccgtatcatgcacgcaagaagactaggatgcttcaagtgatagaaggccttcttcgacgataacgtaggcttctaagatgaatcgagatcgtgtatagtttgtctccatgttccaaagtgctcgttgcgcttgtgcacttgggctggtaatgtgtatatttagtctttgccaattgatatttaggagaaatattaagcacttcgtttatgtaccattggctcataatgagctgggaagtccaatacatactaagaagtaacaatattttcttccgatgattttattatggtttctcgt

SEQ ID NO: 16648 - protein, 281 aa, Zea mays subsp. mays
  peptide (1)..(281): Ceres Seq. ID no. 12367567
  misc_feature (76)..(247): Pfam Name: Ras family Pfam Description: Ras family
  misc_feature (67)..(264): Homolog of NCBI NO: 7438368 NR Description: GTP-binding protein Arac8 - Arabidopsis thaliana
  misc_feature (67)..(270): Homolog of NCBI NO: 18408564 NR Description: rac GTP-binding protein (Arac8)
  misc_feature (67)..(281): Homolog of NCBI NO: 27527523 NR Description: putative rac protein [Nicotiana tabacum]
  misc_feature (67)..(281): Homolog of NCBI NO: 14030769 NR Description: putative Rop family GTPase ROP8 [Zea mays]
  misc_feature (67)..(281): Homolog of NCBI NO: 38502276 NR Description: RAC-ROP-like G-protein [Hordeum vulgare subsp.
  misc_feature (67)..(281): Homolog of NCBI NO: 11274344 NR Description: RacA protein - maize
  misc_feature (67)..(281): Homolog of NCBI NO: 5902930 NR Description: small GTP-binding protein OsRac3 [Oryza sativa]
  misc_feature (67)..(281): Homolog of NCBI NO: 38524285 NR Description: putative ROP4 protein [Hordeum vulgare subsp.
  misc_feature (67)..(281): Homolog of NCBI NO: 14165241 NR Description: putative Rop family GTPase ROP4 [Oryza sativa]
  misc_feature (67)..(281): Homolog of NCBI NO: 8979884 NR Description: putative Rop family GTPase, ROP4 [Zea mays]
NSRGENGRATPADKRQTRESEQAEHRDLSVSLSSLLVFCKKPVTVSVSLIPFHHSAGLPLPPLALAMASSASRFIKCVTVGDGAVGKTCMLICYTSNKFPTDYIPTVFDNFSANVVVDGTTVNLGLWDTAGQEDYNRLRPLSYRGADVFVLAFSLVSRASYENVMKKWLPELQHYAPGVPIVLAGTKLDLREDRHYLVDHPGAVPVTTAQGEELRKHIGATCYIECSSKTQQNVKAVFDAAIKVVIRPPTKQRERKKKKERRGCSIFCSRIMHARRLGCFK

SEQ ID NO: 16649 - protein, 215 aa, Zea mays subsp. mays
  peptide (1)..(215): Ceres Seq. ID no. 12367568
  misc_feature (10)..(181): Pfam Name: Ras family Pfam Description: Ras family
  misc_feature (1)..(198): Homolog of NCBI NO: 7438368 NR Description: GTP-binding protein Arac8 - Arabidopsis thaliana
  misc_feature (1)..(204): Homolog of NCBI NO: 18408564 NR Description: rac GTP-binding protein (Arac8)
  misc_feature (1)..(215): Homolog of NCBI NO: 27527523 NR Description: putative rac protein [Nicotiana tabacum]
  misc_feature (1)..(215): Homolog of NCBI NO: 14030769 NR Description: putative Rop family GTPase ROP8 [Zea mays]
  misc_feature (1)..(215): Homolog of NCBI NO: 38502276 NR Description: RAC-ROP-like G-protein [Hordeum vulgare subsp.
  misc_feature (1)..(215): Homolog of NCBI NO: 11274344 NR Description: RacA protein - maize
  misc_feature (1)..(215): Homolog of NCBI NO: 5902930 NR Description: small GTP-binding protein OsRac3 [Oryza sativa]
  misc_feature (1)..(215): Homolog of NCBI NO: 38524285 NR Description: putative ROP4 protein [Hordeum vulgare subsp.
  misc_feature (1)..(215): Homolog of NCBI NO: 14165241 NR Description: putative Rop family GTPase ROP4 [Oryza sativa]
  misc_feature (1)..(215): Homolog of NCBI NO: 8979884 NR Description: putative Rop family GTPase, ROP4 [Zea mays]
MASSASRFIKCVTVGDGAVGKTCMLICYTSNKFPTDYIPTVFDNFSANVVVDGTTVNLGLWDTAGQEDYNRLRPLSYRGADVFVLAFSLVSRASYENVMKKWLPELQHYAPGVPIVLAGTKLDLREDRHYLVDHPGAVPVTTAQGEELRKHIGATCYIECSSKTQQNVKAVFDAAIKVVIRPPTKQRERKKKKERRGCSIFCSRIMHARRLGCFK

SEQ ID NO: 16650 - protein, 192 aa, Zea mays subsp. mays
  peptide (1)..(192): Ceres Seq. ID no. 12367569
  misc_feature (1)..(158): Pfam Name: Ras family Pfam Description: Ras family
  misc_feature (1)..(175): Homolog of NCBI NO: 7438368 NR Description: GTP-binding protein Arac8 - Arabidopsis thaliana
  misc_feature (1)..(181): Homolog of NCBI NO: 18408564 NR Description: rac GTP-binding protein (Arac8)
  misc_feature (1)..(192): Homolog of NCBI NO: 27527523 NR Description: putative rac protein [Nicotiana tabacum]
  misc_feature (1)..(192): Homolog of NCBI NO: 14030769 NR Description: putative Rop family GTPase ROP8 [Zea mays]
  misc_feature (1)..(192): Homolog of NCBI NO: 38502276 NR Description: RAC-ROP-like G-protein [Hordeum vulgare subsp.
  misc_feature (1)..(192): Homolog of NCBI NO: 11274344 NR Description: RacA protein - maize
  misc_feature (1)..(192): Homolog of NCBI NO: 5902930 NR Description: small GTP-binding protein OsRac3 [Oryza sativa]
  misc_feature (1)..(192): Homolog of NCBI NO: 38524285 NR Description: putative ROP4 protein [Hordeum vulgare subsp.
  misc_feature (1)..(192): Homolog of NCBI NO: 14165241 NR Description: putative Rop family GTPase ROP4 [Oryza sativa]
  misc_feature (1)..(192): Homolog of NCBI NO: 8979884 NR Description: putative Rop family GTPase, ROP4 [Zea mays]
MLICYTSNKFPTDYIPTVFDNFSANVVVDGTTVNLGLWDTAGQEDYNRLRPLSYRGADVFVLAFSLVSRASYENVMKKWLPELQHYAPGVPIVLAGTKLDLREDRHYLVDHPGAVPVTTAQGEELRKHIGATCYIECSSKTQQNVKAVFDAAIKVVIRPPTKQRERKKKKERRGCSIFCSRIMHARRLGCFK

SEQ ID NO: 16651 - DNA, 1186 bp, Zea mays subsp. mays
  misc_feature (1)..(1186): Ceres Seq. ID no. 12383458
  misc_feature: MA Experiment ID: 108515 Result: Up-regulated in Transcription
  misc_feature: MA Experiment 108515 PARAMETER Experiment Name: Zm_2mM_SA_P Parameter: Age (day) Value: 8
  misc_feature: MA Experiment 108515 PARAMETER Experiment Name: Zm_2mM_SA_P Parameter: Organism Value: Zea mays
  misc_feature: MA Experiment 108515 PARAMETER Experiment Name: Zm_2mM_SA_P Parameter: Plant Line Value: 35A19
  misc_feature: MA Experiment 108515 PARAMETER Experiment Name: Zm_2mM_SA_P Parameter: Timepoint (hr) Value: 12
  misc_feature: MA Experiment 108515 PARAMETER Experiment Name: Zm_2mM_SA_P Parameter: Tissue Value: Aerial
  misc_feature: MA Experiment 108515 PARAMETER Experiment Name: Zm_2mM_SA_P Parameter: Treatment Value: 2mM SA vs. No Treatment
  misc_feature: MA Experiment ID: 108522 Result: Down-regulated in Transcription
  misc_feature: MA Experiment 108522 PARAMETER Experiment Name: Zm_42deg_Heat_P Parameter: Age (day) Value: 8
  misc_feature: MA Experiment 108522 PARAMETER Experiment Name: Zm_42deg_Heat_P Parameter: Organism Value: Zea mays
  misc_feature: MA Experiment 108522 PARAMETER Experiment Name: Zm_42deg_Heat_P Parameter: Plant Line Value: 35A19
  misc_feature: MA Experiment 108522 PARAMETER Experiment Name: Zm_42deg_Heat_P Parameter: Temperature (deg C) Value: 42 vs. 22
  misc_feature: MA Experiment 108522 PARAMETER Experiment Name: Zm_42deg_Heat_P Parameter: Timepoint (hr) Value: 1
  misc_feature: MA Experiment 108522 PARAMETER Experiment Name: Zm_42deg_Heat_P Parameter: Tissue Value: Aerial
  misc_feature: MA Experiment ID: 108527 Result: Up-regulated in Transcription
  misc_feature: MA Experiment 108527 PARAMETER Experiment Name: Zm_5mM_NO_P Parameter: Age (day) Value: 8
  misc_feature: MA Experiment 108527 PARAMETER Experiment Name: Zm_5mM_NO_P Parameter: Organism Value: Zea mays
  misc_feature: MA Experiment 108527 PARAMETER Experiment Name: Zm_5mM_NO_P Parameter: Plant Line Value: 35A19
  misc_feature: MA Experiment 108527 PARAMETER Experiment Name: Zm_5mM_NO_P Parameter: Timepoint (hr) Value: 6
  misc_feature: MA Experiment 108527 PARAMETER Experiment Name: Zm_5mM_NO_P Parameter: Tissue Value: Aerial
  misc_feature: MA Experiment 108527 PARAMETER Experiment Name: Zm_5mM_NO_P Parameter: Treatment Value: 5mM NO vs. No Treatment
  misc_feature: MA Experiment ID: 108528 Result: Up-regulated in Transcription
  misc_feature: MA Experiment 108528 PARAMETER Experiment Name: Zm_Imbibed_Seeds_P Parameter: Age (day) Value: 5 vs. 2
  misc_feature: MA Experiment 108528 PARAMETER Experiment Name: Zm_Imbibed_Seeds_P Parameter: Organism Value: Zea mays
  misc_feature: MA Experiment 108528 PARAMETER Experiment Name: Zm_Imbibed_Seeds_P Parameter: Plant Line Value: 35A19
  misc_feature: MA Experiment 108528 PARAMETER Experiment Name: Zm_Imbibed_Seeds_P Parameter: Tissue Value: Aerial vs. Embryo
  misc_feature: MA Experiment ID: 108529 Result: Down-regulated in Transcription
  misc_feature: MA Experiment 108529 PARAMETER Experiment Name: Zm_Imbibed_Seeds_P Parameter: Age (day) Value: 5 vs. 2
  misc_feature: MA Experiment 108529 PARAMETER Experiment Name: Zm_Imbibed_Seeds_P Parameter: Organism Value: Zea mays
  misc_feature: MA Experiment 108529 PARAMETER Experiment Name: Zm_Imbibed_Seeds_P Parameter: Plant Line Value: 35A19
  misc_feature: MA Experiment 108529 PARAMETER Experiment Name: Zm_Imbibed_Seeds_P Parameter: Tissue Value: Roots vs. Embryo
  misc_feature: MA Experiment ID: 108535 Result: Down-regulated in Transcription
  misc_feature: MA Experiment 108535 PARAMETER Experiment Name: Zm_Meristem_P Parameter: Age (day) Value: 8
  misc_feature: MA Experiment 108535 PARAMETER Experiment Name: Zm_Meristem_P Parameter: Organism Value: Zea mays
  misc_feature: MA Experiment 108535 PARAMETER Experiment Name: Zm_Meristem_P Parameter: Plant Line Value: 35A19
  misc_feature: MA Experiment 108535 PARAMETER Experiment Name: Zm_Meristem_P Parameter: Tissue Value: Root Meristem vs. Above Root Meristem
  misc_feature: MA Experiment ID: 108536 Result: Down-regulated in Transcription
  misc_feature: MA Experiment 108536 PARAMETER Experiment Name: Zm_Meristem_P Parameter: Age (day) Value: 8
  misc_feature: MA Experiment 108536 PARAMETER Experiment Name: Zm_Meristem_P Parameter: Organism Value: Zea mays
  misc_feature: MA Experiment 108536 PARAMETER Experiment Name: Zm_Meristem_P Parameter: Plant Line Value: 35A19
  misc_feature: MA Experiment 108536 PARAMETER Experiment Name: Zm_Meristem_P Parameter: Tissue Value: Shoot Meristem vs. Above Shoot Meristem
  misc_feature: MA Experiment ID: 108543 Result: Down-regulated in Transcription
  misc_feature: MA Experiment ID: 108544 Result: Up-regulated in Transcription
  misc_feature: MA Experiment ID: 108559 Result: Up-regulated in Transcription
  misc_feature: MA Experiment 108559 PARAMETER Experiment Name: Zm_5mM_NO_P Parameter: Age (day) Value: 8
  misc_feature: MA Experiment 108559 PARAMETER Experiment Name: Zm_5mM_NO_P Parameter: Organism Value: Zea mays
  misc_feature: MA Experiment 108559 PARAMETER Experiment Name: Zm_5mM_NO_P Parameter: Plant Line Value: 35A19
  misc_feature: MA Experiment 108559 PARAMETER Experiment Name: Zm_5mM_NO_P Parameter: Timepoint (hr) Value: 12
  misc_feature: MA Experiment 108559 PARAMETER Experiment Name: Zm_5mM_NO_P Parameter: Tissue Value: Aerial
  misc_feature: MA Experiment 108559 PARAMETER Experiment Name: Zm_5mM_NO_P Parameter: Treatment Value: 5mM NO vs. No Treatment
  misc_feature: MA Experiment ID: 20000477 Result: Up-regulated in Transcription
  misc_feature: MA Experiment 20000477 PARAMETER Experiment Name: Zm_5mM_SA_P Parameter: Age (day) Value: 10
  misc_feature: MA Experiment 20000477 PARAMETER Experiment Name: Zm_5mM_SA_P Parameter: Organism Value: Zea mays
  misc_feature: MA Experiment 20000477 PARAMETER Experiment Name: Zm_5mM_SA_P Parameter: Plant Line Value: 35A19
  misc_feature: MA Experiment 20000477 PARAMETER Experiment Name: Zm_5mM_SA_P Parameter: Timepoint (hr) Value: 48
  misc_feature: MA Experiment 20000477 PARAMETER Experiment Name: Zm_5mM_SA_P Parameter: Tissue Value: Aerial
  misc_feature: MA Experiment 20000477 PARAMETER Experiment Name: Zm_5mM_SA_P Parameter: Treatment Value: 5mM SA vs. No Treatment
  misc_feature: MA Experiment ID: 20000479 Result: Up-regulated in Transcription
  misc_feature: MA Experiment 20000479 PARAMETER Experiment Name: Zm_Drought_P Parameter: Age (day) Value: 10
  misc_feature: MA Experiment 20000479 PARAMETER Experiment Name: Zm_Drought_P Parameter: Organism Value: Zea mays
  misc_feature: MA Experiment 20000479 PARAMETER Experiment Name: Zm_Drought_P Parameter: Plant Line Value: 35A19
  misc_feature: MA Experiment 20000479 PARAMETER Experiment Name: Zm_Drought_P Parameter: Timepoint (hr) Value: 48
  misc_feature: MA Experiment 20000479 PARAMETER Experiment Name: Zm_Drought_P Parameter: Tissue Value: Aerial
  misc_feature: MA Experiment 20000479 PARAMETER Experiment Name: Zm_Drought_P Parameter: Treatment Value: Drought vs. No Drought
  misc_feature: MA Experiment ID: 20000532 Result: Up-regulated in Transcription
  misc_feature: MA Experiment 20000532 PARAMETER Experiment Name: Zm_0.001percent_MeJA_P Parameter: Age (day) Value: 10
  misc_feature: MA Experiment 20000532 PARAMETER Experiment Name: Zm_0.001percent_MeJA_P Parameter: Organism Value: Zea mays
  misc_feature: MA Experiment 20000532 PARAMETER Experiment Name: Zm_0.001percent_MeJA_P Parameter: Plant Line Value: 35A19
  misc_feature: MA Experiment 20000532 PARAMETER Experiment Name: Zm_0.001percent_MeJA_P Parameter: Timepoint (hr) Value: 48
  misc_feature: MA Experiment 20000532 PARAMETER Experiment Name: Zm_0.001percent_MeJA_P Parameter: Tissue Value: Aerial
  misc_feature: MA Experiment 20000532 PARAMETER Experiment Name: Zm_0.001percent_MeJA_P Parameter: Treatment Value: 0.001percent MeJA vs. No Treatment
  misc_feature: MA Experiment ID: 20000533 Result: Up-regulated in Transcription
  misc_feature: MA Experiment 20000533 PARAMETER Experiment Name: Zm_0.001percent_MeJA_P Parameter: Age (day) Value: 11
  misc_feature: MA Experiment 20000533 PARAMETER Experiment Name: Zm_0.001percent_MeJA_P Parameter: Organism Value: Zea mays
  misc_feature: MA Experiment 20000533 PARAMETER Experiment Name: Zm_0.001percent_MeJA_P Parameter: Plant Line Value: 35A19
  misc_feature: MA Experiment 20000533 PARAMETER Experiment Name: Zm_0.001percent_MeJA_P Parameter: Timepoint (hr) Value: 72
  misc_feature: MA Experiment 20000533 PARAMETER Experiment Name: Zm_0.001percent_MeJA_P Parameter: Tissue Value: Aerial
  misc_feature: MA Experiment 20000533 PARAMETER Experiment Name: Zm_0.001percent_MeJA_P Parameter: Treatment Value: 0.001percent MeJA vs. No Treatment
  misc_feature: MA Experiment ID: 20000535 Result: Down-regulated in Transcription
  misc_feature: MA Experiment 20000535 PARAMETER Experiment Name: Zm_Hybrid_Seed_Dev_P Parameter: DAP Value: 30 vs. 12
  misc_feature: MA Experiment 20000535 PARAMETER Experiment Name: Zm_Hybrid_Seed_Dev_P Parameter: Organism Value: Zea mays
  misc_feature: MA Experiment 20000535 PARAMETER Experiment Name: Zm_Hybrid_Seed_Dev_P Parameter: Plant Line Value: 35A19
  misc_feature: MA Experiment 20000535 PARAMETER Experiment Name: Zm_Hybrid_Seed_Dev_P Parameter: Tissue Value: Embryo vs. Unfert Floret
  misc_feature: MA Experiment ID: 20000626 Result: Up-regulated in Transcription
  misc_feature: MA Experiment 20000626 PARAMETER Experiment Name: Zm_Herbicide-Treatments_P Parameter: Timepoint (hr) Value: 12
  misc_feature: MA Experiment 20000626 PARAMETER Experiment Name: Zm_Herbicide-Treatments_P Parameter: Tissue Value: Aerial
  misc_feature: MA Experiment 20000626 PARAMETER Experiment Name: Zm_Herbicide-Treatments_P Parameter: Treatment Value: Roundup vs. No Treatment
ctacgccaagcgcgcaattaaccctcactaaagggaacaaaagctggagctccaccgcggtggcggccgctctagaactagtggatcccccgggctgcaggaattcgcacgagaccattacctagaacatcctaatgaaaaaaaaacaagaagcccagaaaacaaaaggagcagcttcgattcgagatcgcggcgccatcgaccatgcagctcaagaatcgccgcgaagccgtgacggcgacagtgctcgtggccgtatcagtcctggcgaccctggcgcgcaccgacggcgccctctgcgacaagtccgacaaggcagccttgcttgccgtgaagtcggcgctgggcaacccactggcgctctccggctggaactccaccgtggcctgctgctcctgggagggcatctcctgcaacgccaccaccggccgcgtcaccgacctgaccgtcttcgcgctcaacatctcggcgccggtcccggccgccatcgccaacctcaccgcgctgcagagcgtcaacctggcctacaaccagctgtacggcagcatcccggcgttcctgggcccgcgcgcgctgccggacctcaccttcctccgcctcgacggcaaccggctctcgggcgccatcccgcccacggcgaccgtcttcaacctcctcctcgtcggcaaccgcctcacggggccgatcccggccgccttcgccggcgcggcgttcggcgacgtggagctctcggacaaccagctcacgggcgacgcgtcggcgctgttcggcgccgagaagccgctgaacgcgctgtccctgtcgcgcaaccggttcaggttcgacctcggccgcgtggagctgccggaggcgatggacatcctggagatcgaccacaacatggtgtacgggagcatcccggccgccgcggcggagaggaagtggctggcgttcgacgtcagctacaaccagctgtgcgggcccataccgcaggggcggtacacgcaccggttcggggccaagcacttcgctggcaacaagtgcctctgcggccgcccgctcccgccgtgcgcttattagaagaaggccggaacagtacattcatactagtataatagctttattattggaataatgatcctccgtgctgctgtactcgaacgttttgtaatcttgaagcgagccattattaagatatcctgtggcg

SEQ ID NO: 16652 - protein, 319 aa, Zea mays subsp. mays
  peptide (1)..(319): Ceres Seq. ID no. 12383459
  misc_feature (98)..(286): Pfam Name: Herpesvirus UL87 family Pfam Description: Herpesvirus UL87 family
MKKKQEAQKTKGAASIRDRGAIDHAAQESPRSRDGDSARGRISPGDPGAHRRRPLRQVRQGSLACREVGAGQPTGALRLELHRGLLLLGGHLLQRHHRPRHRPDRLRAQHLGAGPGRHRQPHRAAERQPGLQPAVRQHPGVPGPARAAGPHLPPPRRQPALGRHPAHGDRLQPPPRRQPPHGADPGRLRRRGVRRRGALGQPAHGRRVGAVRRREAAERAVPVAQPVQVRPRPRGAAGGDGHPGDRPQHGVREHPGRRGGEEVAGVRRQLQPAVRAHTAGAVHAPVRGQALRWQQVPLRPPAPAVRLLEEGRNSTFILV

SEQ ID NO: 16653 - protein, 284 aa, Zea mays subsp. mays
  peptide (1)..(284): Ceres Seq. ID no. 12383460
MQLKNRREAVTATVLVAVSVLATLARTDGALCDKSDKAALLAVKSALGNPLALSGWNSTVACCSWEGISCNATTGRVTDLTVFALNISAPVPAAIANLTALQSVNLAYNQLYGSIPAFLGPRALPDLTFLRLDGNRLSGAIPPTATVFNLLLVGNRLTGPIPAAFAGAAFGDVELSDNQLTGDASALFGAEKPLNALSLSRNRFRFDLGRVELPEAMDILEIDHNMVYGSIPAAAAERKWLAFDVSYNQLCGPIPQGRYTHRFGAKHFAGNKCLCGRPLPPCAY

SEQ ID NO: 16654 - DNA, 838 bp, Zea mays subsp. mays
  misc_feature (1)..(838): Ceres Seq. ID no. 12402762
  misc_feature: MA Experiment ID: 108522 Result: Down-regulated in Transcription
  misc_feature: MA Experiment 108522 PARAMETER Experiment Name: Zm_42deg_Heat_P Parameter: Age (day) Value: 8
  misc_feature: MA Experiment 108522 PARAMETER Experiment Name: Zm_42deg_Heat_P Parameter: Organism Value: Zea mays
  misc_feature: MA Experiment 108522 PARAMETER Experiment Name: Zm_42deg_Heat_P Parameter: Plant Line Value: 35A19
  misc_feature: MA Experiment 108522 PARAMETER Experiment Name: Zm_42deg_Heat_P Parameter: Temperature (deg C) Value: 42 vs. 22
  misc_feature: MA Experiment 108522 PARAMETER Experiment Name: Zm_42deg_Heat_P Parameter: Timepoint (hr) Value: 1
  misc_feature: MA Experiment 108522 PARAMETER Experiment Name: Zm_42deg_Heat_P Parameter: Tissue Value: Aerial
  misc_feature: MA Experiment ID: 108527 Result: Up-regulated in Transcription
  misc_feature: MA Experiment 108527 PARAMETER Experiment Name: Zm_5mM_NO_P Parameter: Age (day) Value: 8
  misc_feature: MA Experiment 108527 PARAMETER Experiment Name: Zm_5mM_NO_P Parameter: Organism Value: Zea mays
  misc_feature: MA Experiment 108527 PARAMETER Experiment Name: Zm_5mM_NO_P Parameter: Plant Line Value: 35A19
  misc_feature: MA Experiment 108527 PARAMETER Experiment Name: Zm_5mM_NO_P Parameter: Timepoint (hr) Value: 6
  misc_feature: MA Experiment 108527 PARAMETER Experiment Name: Zm_5mM_NO_P Parameter: Tissue Value: Aerial
  misc_feature: MA Experiment 108527 PARAMETER Experiment Name: Zm_5mM_NO_P Parameter: Treatment Value: 5mM NO vs. No Treatment
  misc_feature: MA Experiment ID: 108528 Result: Down-regulated in Transcription
  misc_feature: MA Experiment 108528 PARAMETER Experiment Name: Zm_Imbibed_Seeds_P Parameter: Age (day) Value: 5 vs. 2
  misc_feature: MA Experiment 108528 PARAMETER Experiment Name: Zm_Imbibed_Seeds_P Parameter: Organism Value: Zea mays
  misc_feature: MA Experiment 108528 PARAMETER Experiment Name: Zm_Imbibed_Seeds_P Parameter: Plant Line Value: 35A19
  misc_feature: MA Experiment 108528 PARAMETER Experiment Name: Zm_Imbibed_Seeds_P Parameter: Tissue Value: Aerial vs. Embryo
  misc_feature: MA Experiment ID: 108529 Result: Up-regulated in Transcription
  misc_feature: MA Experiment 108529 PARAMETER Experiment Name: Zm_Imbibed_Seeds_P Parameter: Age (day) Value: 5 vs. 2
  misc_feature: MA Experiment 108529 PARAMETER Experiment Name: Zm_Imbibed_Seeds_P Parameter: Organism Value: Zea mays
  misc_feature: MA Experiment 108529 PARAMETER Experiment Name: Zm_Imbibed_Seeds_P Parameter: Plant Line Value: 35A19
  misc_feature: MA Experiment 108529 PARAMETER Experiment Name: Zm_Imbibed_Seeds_P Parameter: Tissue Value: Roots vs. Embryo
  misc_feature: MA Experiment ID: 108530 Result: Down-regulated in Transcription
  misc_feature: MA Experiment 108530 PARAMETER Experiment Name: Zm_Imbibed_Seeds_P Parameter: Age (day) Value: 6 vs. 2
  misc_feature: MA Experiment 108530 PARAMETER Experiment Name: Zm_Imbibed_Seeds_P Parameter: Organism Value: Zea mays
  misc_feature: MA Experiment 108530 PARAMETER Experiment Name: Zm_Imbibed_Seeds_P Parameter: Plant Line Value: 35A19
  misc_feature: MA Experiment 108530 PARAMETER Experiment Name: Zm_Imbibed_Seeds_P Parameter: Tissue Value: Aerial vs. Embryo
  misc_feature: MA Experiment ID: 108535 Result: Down-regulated in Transcription
  misc_feature: MA Experiment 108535 PARAMETER Experiment Name: Zm_Meristem_P Parameter: Age (day) Value: 8
  misc_feature: MA Experiment 108535 PARAMETER Experiment Name: Zm_Meristem_P Parameter: Organism Value: Zea mays
  misc_feature: MA Experiment 108535 PARAMETER Experiment Name: Zm_Meristem_P Parameter: Plant Line Value: 35A19
  misc_feature: MA Experiment 108535 PARAMETER Experiment Name: Zm_Meristem_P Parameter: Tissue Value: Root Meristem vs. Above Root Meristem
  misc_feature: MA Experiment ID: 108544 Result: Down-regulated in Transcription
  misc_feature: MA Experiment ID: 108547 Result: Down-regulated in Transcription
  misc_feature: MA Experiment 108547 PARAMETER Experiment Name: Zm_Imbibed_Seeds_P Parameter: Age (day) Value: 4 vs. 2
  misc_feature: MA Experiment 108547 PARAMETER Experiment Name: Zm_Imbibed_Seeds_P Parameter: Organism Value: Zea mays
  misc_feature: MA Experiment 108547 PARAMETER Experiment Name: Zm_Imbibed_Seeds_P Parameter: Plant Line Value: 35A19
  misc_feature: MA Experiment 108547 PARAMETER Experiment Name: Zm_Imbibed_Seeds_P Parameter: Tissue Value: Aerial vs. Embryo
  misc_feature: MA Experiment ID: 20000108 Result: Down-regulated in Transcription
  misc_feature: MA Experiment 20000108 PARAMETER Experiment Name: Zm_Root-Tips_P Parameter: Age (day) Value: 12
  misc_feature: MA Experiment 20000108 PARAMETER Experiment Name: Zm_Root-Tips_P Parameter: Organism Value: Zea mays
  misc_feature: MA Experiment 20000108 PARAMETER Experiment Name: Zm_Root-Tips_P Parameter: Tissue Value: Root tips vs. Root mid region    35
  misc_feature: MA Experiment 20000108 PARAMETER Experiment Name: Zm_Root-Tips_P Parameter: Tissue Value: Root tips vs. Root mid region   Sequence Listing-Misc Features (4)
  misc_feature: MA Experiment ID: 20000479 Result: Down-regulated in Transcription
  misc_feature: MA Experiment 20000479 PARAMETER Experiment Name: Zm_Drought_P Parameter: Age (day) Value: 10
  misc_feature: MA Experiment 20000479 PARAMETER Experiment Name: Zm_Drought_P Parameter: Organism Value: Zea mays
  misc_feature: MA Experiment 20000479 PARAMETER Experiment Name: Zm_Drought_P Parameter: Plant Line Value: 35A19
  misc_feature: MA Experiment 20000479 PARAMETER Experiment Name: Zm_Drought_P Parameter: Timepoint (hr) Value: 48
  misc_feature: MA Experiment 20000479 PARAMETER Experiment Name: Zm_Drought_P Parameter: Tissue Value: Aerial
  misc_feature: MA Experiment 20000479 PARAMETER Experiment Name: Zm_Drought_P Parameter: Treatment Value: Drought vs. No Drought
  misc_feature: MA Experiment ID: 20000480 Result: Down-regulated in Transcription
  misc_feature: MA Experiment 20000480 PARAMETER Experiment Name: Zm_Drought_P Parameter: Age (day) Value: 11
  misc_feature: MA Experiment 20000480 PARAMETER Experiment Name: Zm_Drought_P Parameter: Organism Value: Zea mays
  misc_feature: MA Experiment 20000480 PARAMETER Experiment Name: Zm_Drought_P Parameter: Plant Line Value: 35A19
  misc_feature: MA Experiment 20000480 PARAMETER Experiment Name: Zm_Drought_P Parameter: Timepoint (hr) Value: 72
  misc_feature: MA Experiment 20000480 PARAMETER Experiment Name: Zm_Drought_P Parameter: Tissue Value: Aerial
  misc_feature: MA Experiment 20000480 PARAMETER Experiment Name: Zm_Drought_P Parameter: Treatment Value: Drought vs. No Drought
  misc_feature: MA Experiment ID: 20000487 Result: Down-regulated in Transcription
  misc_feature: MA Experiment 20000487 PARAMETER Experiment Name: Zm_50mM_NH4NO3_L_to_H_P Parameter: Organism Value: Zea mays
  misc_feature: MA Experiment 20000487 PARAMETER Experiment Name: Zm_50mM_NH4NO3_L_to_H_P Parameter: Timepoint (hr) Value: 4
  misc_feature: MA Experiment 20000487 PARAMETER Experiment Name: Zm_50mM_NH4NO3_L_to_H_P Parameter: Tissue Value: Leaves
  misc_feature: MA Experiment 20000487 PARAMETER Experiment Name: Zm_50mM_NH4NO3_L_to_H_P Parameter: Treatment Value: 50mM NH4NO3 vs. 100mM Mannitol
  misc_feature: MA Experiment ID: 20000488 Result: Down-regulated in Transcription
  misc_feature: MA Experiment 20000488 PARAMETER Experiment Name: Zm_50mM_NH4NO3_L_to_H_P Parameter: Organism Value: Zea mays
  misc_feature: MA Experiment 20000488 PARAMETER Experiment Name: Zm_50mM_NH4NO3_L_to_H_P Parameter: Timepoint (hr) Value: 8
  misc_feature: MA Experiment 20000488 PARAMETER Experiment Name: Zm_50mM_NH4NO3_L_to_H_P Parameter: Tissue Value: Leaves
  misc_feature: MA Experiment 20000488 PARAMETER Experiment Name: Zm_50mM_NH4NO3_L_to_H_P Parameter: Treatment Value: 50mM NH4NO3 vs. 100mM Mannitol
tcctcagcatttcagcacccagttcggcgttgcacatgtgacccgggcacccggcccccagcccccagctcccgaccatttctgcacatctacagctcgcgagctcagcaccagaacacgccaggccagcccaacctctccaagaacccaagcagcagcccccgaccgaccggccatgccaagggccatcggcggtggtgcggcctacaagggcggaatcaagggctactggaagcgccgcggctacgaccggatcgacgcggccgcggcgcagcgccgcccgcgcctccctacagcggagcttggcggcggcgaggcgcatcctcagccagcgggtcgtcggcgccgccgcgggtggcgcgttcgccggcgagcgggcgtcctcggccggcgcctcctccgcgcgctctccccgcggcggctgctggcgcggctccgcgacgcctacgtgaacgccatgctccgcctcgcgtcctccgccgccgtggccggntacggcggcgccgggccctactgcaccgccgccgacccgttcgcccggccgcgcccgctcaccagggagtacgacgagaaggcgctcgtcgagatctacaggtccatcctcgcgcgcggcgaggccgggccagtggtcgccgccgcgcggctgcncgcggtgctctgaggagctgatgacgacggggacggacgggcgctggcacgcacgcgcgctgggagcctggccggccctntggcgcgctccgtctactctccttgcctcatgcaaggctcgtgtacgctagaatctcgctttcatgtagcgcacagaatttgcatgtcggatgaaaagtttcaggtggtc

SEQ ID NO: 16655 - protein, 222 aa, Zea mays subsp. mays
  peptide (1)..(222): Ceres Seq. ID no. 12402763
  misc_feature (79)..(195): Pfam Name: Cupin Pfam Description: Cupin
  misc_feature (7)..(221): Homolog of NCBI NO: 29247944 NR Description: GLP_26_54603_52153 [Giardia lamblia ATCC 50803]
  misc_feature (41)..(221): Homolog of NCBI NO: 29247944 NR Description: GLP_26_54603_52153 [Giardia lamblia ATCC 50803]
  misc_feature (81)..(210): Homolog of NCBI NO: 29247944 NR Description: GLP_26_54603_52153 [Giardia lamblia ATCC 50803]
  misc_feature (80)..(222): Homolog of NCBI NO: 23018055 NR Description: hypothetical protein [Thermobifida fusca]
  misc_feature (165)..(165): Xaa is any aa, unknown or other
  misc_feature (216)..(216): Xaa is any aa, unknown or other
SSAFQHPVRRCTCDPGTRPPAPSSRPFLHIYSSRAQHQNTPGQPNLSKNPSSSPRPTGHAKGHRRWCGLQGRNQGLLEAPRLRPDRRGRGAAPPAPPYSGAWRRRGASSASGSSAPPRVARSPASGRPRPAPPPRALPAAAAGAAPRRLRERHAPPRVLRRRGRXRRRRALLHRRRPVRPAAPAHQGVRREGARRDLQVHPRARRGRASGRRRAAXRGALRS

SEQ ID NO: 16656 - protein, 219 aa, Zea mays subsp. mays
  peptide (1)..(219): Ceres Seq. ID no. 12402764
  misc_feature (72)..(214): Homolog of NCBI NO: 34911698 NR Description: P0707D10.13 [Oryza sativa (japonica
  misc_feature (76)..(204): Homolog of NCBI NO: 7487567 NR Description: probable mitochondrial carrier protein
  misc_feature (74)..(210): Homolog of NCBI NO: 15228820 NR Description: putative protein
  misc_feature (164)..(164): Xaa is any aa, unknown or other
  misc_feature (216)..(216): Xaa is any aa, unknown or other
PQHFSTQFGVAHVTRAPGPQPPAPDHFCTSTARELSTRTRQASPTSPRTQAAAPDRPAMPRAIGGGAAYKGGIKGYWKRRGYDRIDAAAAQRRPRLPTAELGGGEAHPQPAGRRRRRGWRVRRRAGVLGRRLLRALSPRRLLARLRDAYVNAMLRLASSAAVAXYGGAGPYCTAADPFARPRPLTREYDEKALVEIYRSILARGEAGPVVAAARLXAVL

SEQ ID NO: 16657 - protein, 161 aa, Zea mays subsp. mays
  peptide (1)..(161): Ceres Seq. ID no. 12402765
  misc_feature (14)..(156): Homolog of NCBI NO: 34911698 NR Description: P0707D10.13 [Oryza sativa (japonica
  misc_feature (18)..(146): Homolog of NCBI NO: 7487567 NR Description: probable mitochondrial carrier protein
  misc_feature (16)..(152): Homolog of NCBI NO: 15228820 NR Description: putative protein
  misc_feature (106)..(106): Xaa is any aa, unknown or other
  misc_feature (158)..(158): Xaa is any aa, unknown or other
MPRAIGGGAAYKGGIKGYWKRRGYDRIDAAAAQRRPRLPTAELGGGEAHPQPAGRRRRRGWRVRRRAGVLGRRLLRALSPRRLLARLRDAYVNAMLRLASSAAVAXYGGAGPYCTAADPFARPRPLTREYDEKALVEIYRSILARGEAGPVVAAARLXAVL

SEQ ID NO: 16658 - DNA, 754 bp, Zea mays subsp. mays
  misc_feature (1)..(754): Ceres Seq. ID no. 13498134
  misc_feature: MA Experiment ID: 108527 Result: Down-regulated in Transcription
  misc_feature: MA Experiment 108527 PARAMETER Experiment Name: Zm_5mM_NO_P Parameter: Age (day) Value: 8
  misc_feature: MA Experiment 108527 PARAMETER Experiment Name: Zm_5mM_NO_P Parameter: Organism Value: Zea mays
  misc_feature: MA Experiment 108527 PARAMETER Experiment Name: Zm_5mM_NO_P Parameter: Plant Line Value: 35A19
  misc_feature: MA Experiment 108527 PARAMETER Experiment Name: Zm_5mM_NO_P Parameter: Timepoint (hr) Value: 6
  misc_feature: MA Experiment 108527 PARAMETER Experiment Name: Zm_5mM_NO_P Parameter: Tissue Value: Aerial
  misc_feature: MA Experiment 108527 PARAMETER Experiment Name: Zm_5mM_NO_P Parameter: Treatment Value: 5mM NO vs. No Treatment
  misc_feature: MA Experiment ID: 108528 Result: Up-regulated in Transcription
  misc_feature: MA Experiment 108528 PARAMETER Experiment Name: Zm_Imbibed_Seeds_P Parameter: Age (day) Value: 5 vs. 2
  misc_feature: MA Experiment 108528 PARAMETER Experiment Name: Zm_Imbibed_Seeds_P Parameter: Organism Value: Zea mays
  misc_feature: MA Experiment 108528 PARAMETER Experiment Name: Zm_Imbibed_Seeds_P Parameter: Plant Line Value: 35A19
  misc_feature: MA Experiment 108528 PARAMETER Experiment Name: Zm_Imbibed_Seeds_P Parameter: Tissue Value: Aerial vs. Embryo
  misc_feature: MA Experiment ID: 108530 Result: Up-regulated in Transcription
  misc_feature: MA Experiment 108530 PARAMETER Experiment Name: Zm_Imbibed_Seeds_P Parameter: Age (day) Value: 6 vs. 2
  misc_feature: MA Experiment 108530 PARAMETER Experiment Name: Zm_Imbibed_Seeds_P Parameter: Organism Value: Zea mays
  misc_feature: MA Experiment 108530 PARAMETER Experiment Name: Zm_Imbibed_Seeds_P Parameter: Plant Line Value: 35A19
  misc_feature: MA Experiment 108530 PARAMETER Experiment Name: Zm_Imbibed_Seeds_P Parameter: Tissue Value: Aerial vs. Embryo
  misc_feature: MA Experiment ID: 108545 Result: Up-regulated in Transcription
  misc_feature: MA Experiment 108545 PARAMETER Experiment Name: Zm_Imbibed_Seeds_P Parameter: Age (day) Value: 3 vs. 2
  misc_feature: MA Experiment 108545 PARAMETER Experiment Name: Zm_Imbibed_Seeds_P Parameter: Organism Value: Zea mays
  misc_feature: MA Experiment 108545 PARAMETER Experiment Name: Zm_Imbibed_Seeds_P Parameter: Plant Line Value: 35A19
  misc_feature: MA Experiment 108545 PARAMETER Experiment Name: Zm_Imbibed_Seeds_P Parameter: Tissue Value: Aerial vs. Embryo
  misc_feature: MA Experiment ID: 108547 Result: Up-regulated in Transcription
  misc_feature: MA Experiment 108547 PARAMETER Experiment Name: Zm_Imbibed_Seeds_P Parameter: Age (day) Value: 4 vs. 2
  misc_feature: MA Experiment 108547 PARAMETER Experiment Name: Zm_Imbibed_Seeds_P Parameter: Organism Value: Zea mays
  misc_feature: MA Experiment 108547 PARAMETER Experiment Name: Zm_Imbibed_Seeds_P Parameter: Plant Line Value: 35A19
  misc_feature: MA Experiment 108547 PARAMETER Experiment Name: Zm_Imbibed_Seeds_P Parameter: Tissue Value: Aerial vs. Embryo
  misc_feature: MA Experiment ID: 20000480 Result: Down-regulated in Transcription
  misc_feature: MA Experiment 20000480 PARAMETER Experiment Name: Zm_Drought_P Parameter: Age (day) Value: 11
  misc_feature: MA Experiment 20000480 PARAMETER Experiment Name: Zm_Drought_P Parameter: Organism Value: Zea mays
  misc_feature: MA Experiment 20000480 PARAMETER Experiment Name: Zm_Drought_P Parameter: Plant Line Value: 35A19
  misc_feature: MA Experiment 20000480 PARAMETER Experiment Name: Zm_Drought_P Parameter: Timepoint (hr) Value: 72
  misc_feature: MA Experiment 20000480 PARAMETER Experiment Name: Zm_Drought_P Parameter: Tissue Value: Aerial
  misc_feature: MA Experiment 20000480 PARAMETER Experiment Name: Zm_Drought_P Parameter: Treatment Value: Drought vs. No Drought
agcgccaacggccaacctcacgcagtcccgccgcatcgaatggcatccctccggcttgtggcaacgctagcgccctccggtcctccgccgccacctcgacgtaagcagcggagaccgtcctccgcagtccgtctgacaggtgggatgggcctggcggcagctgctgccgtggcggcggccgcggccgcctcaccaccggcgctcgccgcgctgtccgagccggcgaacgcgctctcgctgcccacctgggccgtccacgtctccagcgtcgccgagtgggtgacggcgatgtggctggtttgggactacggcgagaagacggggctcaagggttggaaaggcctctcgtgggggatggttccacttctaggtggagcaatgtgtgcttgcacgtggcatttcttctacaattcagagtctcttgaagttcttgtagcccttcaaggtgctctgacagtgattggtaacataacaatgtgcatagctgcataccgcatcttcaaagcatcccaggaaggctcaaaaacttcgtaggctgcaagattggatcttacagccggtttggcaaggtgatgagatatggagcttgcgtttctctgacatggatgagaatggagaactatttgattgttgtttttttttttggcccattagataaaagtttattggaaaggacaacctttcacagcaatatgcatcctctgctgtagtattatttctcaggggccaagataaaagacaatgtctggaactc

SEQ ID NO: 16659 - protein, 177 aa, Zea mays subsp. mays; identical to SEQ ID NO: 14700
  peptide (1)..(177): Ceres Seq. ID no. 13498135
  misc_feature (76)..(174): Homolog of NCBI NO: 33240381 NR Description: Uncharacterized conserved membrane protein
  misc_feature (76)..(174): Homolog of NCBI NO: 33862961 NR Description: conserved hypothetical protein
  misc_feature (76)..(168): Homolog of NCBI NO: 33865822 NR Description: conserved hypothetical protein [Synechococcus sp.
  misc_feature (78)..(171): Homolog of NCBI NO: 33861461 NR Description: conserved hypothetical protein
  misc_feature (76)..(171): Homolog of NCBI NO: 22298980 NR Description: ORF_ID:tlr1437~hypothetical protein
  misc_feature (77)..(173): Homolog of NCBI NO: 37521445 NR Description: hypothetical protein glr1876 [Gloeobacter
  misc_feature (76)..(172): Homolog of NCBI NO: 23041345 NR Description: hypothetical protein [Trichodesmium erythraeum
  misc_feature (76)..(174): Homolog of NCBI NO: 16331563 NR Description: hypothetical protein [Synechocystis sp. PCC 6803]
  misc_feature (76)..(171): Homolog of NCBI NO: 17232000 NR Description: hypothetical protein [Nostoc sp. PCC 7120]
  misc_feature (18)..(172): Homolog of NCBI NO: 30685952 NR Description: expressed protein [Arabidopsis thaliana]

SEQ ID NO: 16660 - protein, 164 aa, Zea mays subsp. mays; identical to SEQ ID NO: 14701
  peptide (1)..(164): Ceres Seq. ID no. 13498136
  misc_feature (63)..(161): Homolog of NCBI NO: 33240381 NR Description: Uncharacterized conserved membrane protein
  misc_feature (63)..(161): Homolog of NCBI NO: 33862961 NR Description: conserved hypothetical protein
  misc_feature (63)..(155): Homolog of NCBI NO: 33865822 NR Description: conserved hypothetical protein [Synechococcus sp.
  misc_feature (65)..(158): Homolog of NCBI NO: 33861461 NR Description: conserved hypothetical protein
  misc_feature (63)..(158): Homolog of NCBI NO: 22298980 NR Description: ORF_ID:tlr1437~hypothetical protein
  misc_feature (64)..(160): Homolog of NCBI NO: 37521445 NR Description: hypothetical protein glr1876 [Gloeobacter
  misc_feature (63)..(159): Homolog of NCBI NO: 23041345 NR Description: hypothetical protein [Trichodesmium erythraeum
  misc_feature (63)..(161): Homolog of NCBI NO: 16331563 NR Description: hypothetical protein [Synechocystis sp. PCC 6803]
  misc_feature (63)..(158): Homolog of NCBI NO: 17232000 NR Description: hypothetical protein [Nostoc sp. PCC 7120]
  misc_feature (5)..(159): Homolog of NCBI NO: 30685952 NR Description: expressed protein [Arabidopsis thaliana]

SEQ ID NO: 16661 - protein, 129 aa, Zea mays subsp. mays; identical to SEQ ID NO: 14702
  peptide (1)..(129): Ceres Seq. ID no. 13498137
  misc_feature (28)..(126): Homolog of NCBI NO: 33240381 NR Description: Uncharacterized conserved membrane protein
  misc_feature (28)..(126): Homolog of NCBI NO: 33862961 NR Description: conserved hypothetical protein
  misc_feature (28)..(120): Homolog of NCBI NO: 33865822 NR Description: conserved hypothetical protein [Synechococcus sp.
  misc_feature (30)..(123): Homolog of NCBI NO: 33861461 NR Description: conserved hypothetical protein
  misc_feature (28)..(123): Homolog of NCBI NO: 22298980 NR Description: ORF_ID:tlr1437~hypothetical protein
  misc_feature (29)..(125): Homolog of NCBI NO: 37521445 NR Description: hypothetical protein glr1876 [Gloeobacter
  misc_feature (28)..(124): Homolog of NCBI NO: 23041345 NR Description: hypothetical protein [Trichodesmium erythraeum
  misc_feature (28)..(126): Homolog of NCBI NO: 16331563 NR Description: hypothetical protein [Synechocystis sp. PCC 6803]
  misc_feature (28)..(123): Homolog of NCBI NO: 17232000 NR Description: hypothetical protein [Nostoc sp. PCC 7120]
  misc_feature (1)..(124): Homolog of NCBI NO: 30685952 NR Description: expressed protein [Arabidopsis thaliana]

SEQ ID NO: 16662 - DNA, 753 bp, Zea mays subsp. mays
  misc_feature (1)..(753): Ceres Seq. ID no. 12402061
  misc_feature: MA Experiment ID: 108529 Result: Up-regulated in Transcription
  misc_feature: MA Experiment 108529 PARAMETER Experiment Name: Zm_Imbibed_Seeds_P Parameter: Age (day) Value: 5 vs. 2
  misc_feature: MA Experiment 108529 PARAMETER Experiment Name: Zm_Imbibed_Seeds_P Parameter: Organism Value: Zea mays
  misc_feature: MA Experiment 108529 PARAMETER Experiment Name: Zm_Imbibed_Seeds_P Parameter: Plant Line Value: 35A19
  misc_feature: MA Experiment 108529 PARAMETER Experiment Name: Zm_Imbibed_Seeds_P Parameter: Tissue Value: Roots vs. Embryo
acaagcacaaagagaggccccgaccgcgatggatcgtcagcgacagaccgaccgtgacacagccaacaactaacacgcacgcgcgcgagagagaaagagagctgcccgggagagagagagagaggaaatcaaacgaaggcgacgacgtacggagacggcatggccgatcaccaccaccaccaccaccacgggcatccgccggacgggcccggcggcgcgggggaccagctggaggtaatcaaggagcaggaccggctgctgcccatcgccaacgtcggccgcatcatgaagcagatcctgccgcccaacgccaagatctccaaggaggccaaggagacgatgcaggagtgcgtgtccgagttcatcagcttcgtcacgggcgaggcctccgacaagtgccacaaggagaagcgcaagaccgtcaacggcgacgacgtctgctgcgccttcggcgcgctcggcttcgacgactacgtcgaccccatgcgcaggtacctgcacaagtaccgcgagctcgagggcgaccgcgccgcgtcctcccgcggcggaggcggaggcggaccggccggcgccggagaccccgcgtccgcctcggccgccgccggtcccagccccagcgccgcatcagccggtcatttcatgttcggcgccgccatggaccggcccgacaacaactcatccgccggcgccaggcccttttaatccatccttcctcatcttgcttgttattattcatcagattcagatcaacaa

SEQ ID NO: 16663 - protein, 250 aa, Zea mays subsp. mays
  peptide (1)..(250): Ceres Seq. ID no. 12402062
  misc_feature (6)..(231): Pfam Name: HlyD family secretion protein Pfam Description: HlyD family secretion protein
KHKERPRPRWIVSDRPTVTQPTTNTHARERERELPGRERERKSNEGDDVRRRHGRSPPPPPPRASAGRARRRGGPAGGNQGAGPAAAHRQRRPHHEADPAAQRQDLQGGQGDDAGVRVRVHQLRHGRGLRQVPQGEAQDRQRRRRLLRLRRARLRRLRRPHAQVPAQVPRARGRPRRVLPRRRRRRTGRRRRPRVRLGRRRSQPQRRISRSFHVRRRHGPARQQLIRRRQALLIHPSSSCLLLFIRFRST

SEQ ID NO: 16664 - protein, 180 aa, Zea mays subsp. mays
  peptide (1)..(180): Ceres Seq. ID no. 12402063
  misc_feature (32)..(97): Pfam Name: Histone-like transcription factor (CBF/NF-Y) and Pfam Description: Histone-like transcription factor (CBF/NF-Y)
  misc_feature (27)..(160): Homolog of NCBI NO: 15231796 NR Description: transcription factor NF-Y, CCAAT-binding - like
  misc_feature (17)..(155): Homolog of NCBI NO: 30409461 NR Description: NF-YB [Oryza sativa (japonica cultivar-group)]
  misc_feature (9)..(155): Homolog of NCBI NO: 115840 NR Description: CCAAT-BINDING TRANSCRIPTION FACTOR SUBUNIT A (NF-Y PROTEIN CHAIN B) (NF-YB) (CAAT-BOX DNA BINDING PROTEIN
  misc_feature (9)..(155): Homolog of NCBI NO: 22380 NR Description: CAAT-box DNA binding protein subunit B (NF-YB)
  misc_feature (14)..(139): Homolog of NCBI NO: 18404885 NR Description: putative CCAAT-binding transcription factor
  misc_feature (28)..(149): Homolog of NCBI NO: 15233475 NR Description: CCAAT-binding transcription factor subunit
  misc_feature (1)..(172): Homolog of NCBI NO: 34908028 NR Description: putative CAAT-box DNA binding protein
  misc_feature (1)..(149): Homolog of NCBI NO: 30409459 NR Description: NF-YB [Oryza sativa (japonica cultivar-group)]
  misc_feature (2)..(140): Homolog of NCBI NO: 15227134 NR Description: putative CCAAT-box binding trancription factor
  misc_feature (1)..(173): Homolog of NCBI NO: 34907184 NR Description: putative CCAAT-binding transcription factor
MADHHHHHHHGHPPDGPGGAGDQLEVIKEQDRLLPIANVGRIMKQILPPNAKISKEAKETMQECVSEFISFVTGEASDKCHKEKRKTVNGDDVCCAFGALGFDDYVDPMRRYLHKYRELEGDRAASSRGGGGGGPAGAGDPASASAAAGPSPSAASAGHFMFGAAMDRPDNNSSAGARPF

SEQ ID NO: 16665 - protein, 138 aa, Zea mays subsp. mays
  peptide (1)..(138): Ceres Seq. ID no. 12402064
  misc_feature (1)..(55): Pfam Name: Histone-like transcription factor (CBF/NF-Y) and Pfam Description: Histone-like transcription factor (CBF/NF-Y)
  misc_feature (1)..(107): Homolog of NCBI NO: 30409459 NR Description: NF-YB [Oryza sativa (japonica cultivar-group)]
  misc_feature (1)..(98): Homolog of NCBI NO: 15227134 NR Description: putative CCAAT-box binding trancription factor
  misc_feature (1)..(113): Homolog of NCBI NO: 30409461 NR Description: NF-YB [Oryza sativa (japonica cultivar-group)]
  misc_feature (1)..(113): Homolog of NCBI NO: 22380 NR Description: CAAT-box DNA binding protein subunit B (NF-YB)
  misc_feature (1)..(107): Homolog of NCBI NO: 15233475 NR Description: CCAAT-binding transcription factor subunit
  misc_feature (1)..(130): Homolog of NCBI NO: 34908028 NR Description: putative CAAT-box DNA binding protein
  misc_feature (1)..(97): Homolog of NCBI NO: 18404885 NR Description: putative CCAAT-binding transcription factor
  misc_feature (1)..(113): Homolog of NCBI NO: 115840 NR Description: CCAAT-BINDING TRANSCRIPTION FACTOR SUBUNIT A (NF-Y PROTEIN CHAIN B) (NF-YB) (CAAT-BOX DNA BINDING PROTEIN
  misc_feature (1)..(118): Homolog of NCBI NO: 15231796 NR Description: transcription factor NF-Y, CCAAT-binding - like
  misc_feature (1)..(131): Homolog of NCBI NO: 34907184 NR Description: putative CCAAT-binding transcription factor
MKQILPPNAKISKEAKETMQECVSEFISFVTGEASDKCHKEKRKTVNGDDVCCAFGALGFDDYVDPMRRYLHKYRELEGDRAASSRGGGGGGPAGAGDPASASAAAGPSPSAASAGHFMFGAAMDRPDNNSSAGARPF

SEQ ID NO: 16666 - DNA, 854 bp, Zea mays subsp. mays; identical to SEQ ID NO: 6368
  misc_feature (1)..(854): Ceres Seq. ID no. 12409092
  misc_feature: MA Experiment ID: 108534 Result: Down-regulated in Transcription
  misc_feature: MA Experiment 108534 PARAMETER Experiment Name: Zm_4deg_Cold_P Parameter: Age (hr) Value: 8
  misc_feature: MA Experiment 108534 PARAMETER Experiment Name: Zm_4deg_Cold_P Parameter: Organism Value: Zea mays
  misc_feature: MA Experiment 108534 PARAMETER Experiment Name: Zm_4deg_Cold_P Parameter: Plant Line Value: 35A19
  misc_feature: MA Experiment 108534 PARAMETER Experiment Name: Zm_4deg_Cold_P Parameter: Temperature (deg C) Value: 4 vs. 22
  misc_feature: MA Experiment 108534 PARAMETER Experiment Name: Zm_4deg_Cold_P Parameter: Timepoint (hr) Value: 6
  misc_feature: MA Experiment 108534 PARAMETER Experiment Name: Zm_4deg_Cold_P Parameter: Tissue Value: Aerial
  misc_feature: MA Experiment ID: 108535 Result: Up-regulated in Transcription
  misc_feature: MA Experiment 108535 PARAMETER Experiment Name: Zm_Meristem_P Parameter: Age (day) Value: 8
  misc_feature: MA Experiment 108535 PARAMETER Experiment Name: Zm_Meristem_P Parameter: Organism Value: Zea mays
  misc_feature: MA Experiment 108535 PARAMETER Experiment Name: Zm_Meristem_P Parameter: Plant Line Value: 35A19
  misc_feature: MA Experiment 108535 PARAMETER Experiment Name: Zm_Meristem_P Parameter: Tissue Value: Root Meristem vs. Above Root Meristem
  misc_feature: MA Experiment ID: 108544 Result: Down-regulated in Transcription
  misc_feature: MA Experiment ID: 108556 Result: Down-regulated in Transcription
  misc_feature: MA Experiment 108556 PARAMETER Experiment Name: Zm_Drought_P Parameter: Age (day) Value: 9
  misc_feature: MA Experiment 108556 PARAMETER Experiment Name: Zm_Drought_P Parameter: Organism Value: Zea mays
  misc_feature: MA Experiment 108556 PARAMETER Experiment Name: Zm_Drought_P Parameter: Plant Line Value: 35A19
  misc_feature: MA Experiment 108556 PARAMETER Experiment Name: Zm_Drought_P Parameter: Timepoint (hr) Value: 24
  misc_feature: MA Experiment 108556 PARAMETER Experiment Name: Zm_Drought_P Parameter: Tissue Value: Aerial
  misc_feature: MA Experiment 108556 PARAMETER Experiment Name: Zm_Drought_P Parameter: Treatment Value: Drought vs. No Drought
  misc_feature: MA Experiment ID: 20000488 Result: Up-regulated in Transcription
  misc_feature: MA Experiment 20000488 PARAMETER Experiment Name: Zm_50mM_NH4NO3_L_to_H_P Parameter: Organism Value: Zea mays
  misc_feature: MA Experiment 20000488 PARAMETER Experiment Name: Zm_50mM_NH4NO3_L_to_H_P Parameter: Timepoint (hr) Value: 8
  misc_feature: MA Experiment 20000488 PARAMETER Experiment Name: Zm_50mM_NH4NO3_L_to_H_P Parameter: Tissue Value: Leaves
  misc_feature: MA Experiment 20000488 PARAMETER Experiment Name: Zm_50mM_NH4NO3_L_to_H_P Parameter: Treatment Value: 50mM NH4NO3 vs. 100mM Mannitol
  misc_feature: MA Experiment ID: 20000626 Result: Up-regulated in Transcription
  misc_feature: MA Experiment 20000626 PARAMETER Experiment Name: Zm_Herbicide-Treatments_P Parameter: Timepoint (hr) Value: 12
  misc_feature: MA Experiment 20000626 PARAMETER Experiment Name: Zm_Herbicide-Treatments_P Parameter: Tissue Value: Aerial
  misc_feature: MA Experiment 20000626 PARAMETER Experiment Name: Zm_Herbicide-Treatments_P Parameter: Treatment Value: Roundup vs. No Treatment
  misc_feature: MA Experiment ID: 20000632 Result: Down-regulated in Transcription
  misc_feature: MA Experiment 20000632 PARAMETER Experiment Name: Zm_Herbicide-Treatments_P Parameter: Timepoint (hr) Value: 4
  misc_feature: MA Experiment 20000632 PARAMETER Experiment Name: Zm_Herbicide-Treatments_P Parameter: Tissue Value: Aerial
  misc_feature: MA Experiment 20000632 PARAMETER Experiment Name: Zm_Herbicide-Treatments_P Parameter: Treatment Value: Glean vs. No Treatment

SEQ ID NO: 16667 - protein, 156 aa, Zea mays subsp. mays; identical to SEQ ID NO: 6369
  peptide (1)..(156): Ceres Seq. ID no. 12409093
  misc_feature (39)..(110): Pfam Name: RNA recognition motif. (a.k.a. RRM, RBD, or RNP domain) Pfam Description: RNA recognition motif. (a.k.a. RRM, RBD, or RNP
  misc_feature (1)..(149): Homolog of NCBI NO: 34906972 NR Description: putative glycine-rich RNA-binding protein 2
  misc_feature (1)..(150): Homolog of NCBI NO: 15236359 NR Description: glycine-rich RNA-binding protein AtGRP2; protein At4g13850.1, supported by cDNA: 16314., supported by cDNA:
  misc_feature (1)..(150): Homolog of NCBI NO: 30682622 NR Description: glycine-rich RNA-binding protein (AtGRP2)
  misc_feature (1)..(150): Homolog of NCBI NO: 2826811 NR Description: AtGRP2 [Arabidopsis thaliana]
  misc_feature (27)..(150): Homolog of NCBI NO: 322514 NR Description: glycine-rich RNA-binding protein (clone A81) -
  misc_feature (1)..(156): Homolog of NCBI NO: 15239505 NR Description: glycine-rich RNA-binding protein; protein id: supported by cDNA: gi_16974555 [Arabidopsis thaliana] contains similarity to RNA binding protein~gene_id:MAF19.4
  misc_feature (1)..(147): Homolog of NCBI NO: 7439994 NR Description: glycine-rich RNA-binding protein - garden pea
  misc_feature (1)..(137): Homolog of NCBI NO: 7439995 NR Description: RNA binding protein 3 - wood tobacco
  misc_feature (1)..(142): Homolog of NCBI NO: 15229525 NR Description: glycine-rich RNA-binding protein; protein id: supported by cDNA: 18903., supported by cDNA: gi_17979515,
  misc_feature (1)..(142): Homolog of NCBI NO: 21553972 NR Description: glycine-rich RNA binding protein, putative

SEQ ID NO: 16668 - protein, 122 aa, Zea mays subsp. mays; identical to SEQ ID NO: 6370
  peptide (1)..(122): Ceres Seq. ID no. 12409094
  misc_feature (5)..(76): Pfam Name: RNA recognition motif. (a.k.a. RRM, RBD, or RNP domain) Pfam Description: RNA recognition motif. (a.k.a. RRM, RBD, or RNP
  misc_feature (1)..(115): Homolog of NCBI NO: 34906972 NR Description: putative glycine-rich RNA-binding protein 2
  misc_feature (1)..(116): Homolog of NCBI NO: 15236359 NR Description: glycine-rich RNA-binding protein AtGRP2; protein At4g13850.1, supported by cDNA: 16314., supported by cDNA:
  misc_feature (1)..(116): Homolog of NCBI NO: 30682622 NR Description: glycine-rich RNA-binding protein (AtGRP2)
  misc_feature (1)..(116): Homolog of NCBI NO: 2826811 NR Description: AtGRP2 [Arabidopsis thaliana]
  misc_feature (1)..(116): Homolog of NCBI NO: 322514 NR Description: glycine-rich RNA-binding protein (clone A81) -
  misc_feature (1)..(122): Homolog of NCBI NO: 15239505 NR Description: glycine-rich RNA-binding protein; protein id: supported by cDNA: gi_16974555 [Arabidopsis thaliana] contains similarity to RNA binding protein~gene_id:MAF19.4
  misc_feature (1)..(113): Homolog of NCBI NO: 7439994 NR Description: glycine-rich RNA-binding protein - garden pea
  misc_feature (1)..(103): Homolog of NCBI NO: 7439995 NR Description: RNA binding protein 3 - wood tobacco
  misc_feature (1)..(108): Homolog of NCBI NO: 15229525 NR Description: glycine-rich RNA-binding protein; protein id: supported by cDNA: 18903., supported by cDNA: gi_17979515,
  misc_feature (1)..(108): Homolog of NCBI NO: 21553972 NR Description: glycine-rich RNA binding protein, putative

SEQ ID NO: 16669 - protein, 96 aa, Zea mays subsp. mays; identical to SEQ ID NO: 6371
  peptide (1)..(96): Ceres Seq. ID no. 12409095

SEQ ID NO: 16670 - DNA, 842 bp, Zea mays subsp. mays
  misc_feature (1)..(842): Ceres Seq. ID no. 12402057
  misc_feature: MA Experiment ID: 108528 Result: Up-regulated in Transcription
  misc_feature: MA Experiment 108528 PARAMETER Experiment Name: Zm_Imbibed_Seeds_P Parameter: Age (day) Value: 5 vs. 2
  misc_feature: MA Experiment 108528 PARAMETER Experiment Name: Zm_Imbibed_Seeds_P Parameter: Organism Value: Zea mays
  misc_feature: MA Experiment 108528 PARAMETER Experiment Name: Zm_Imbibed_Seeds_P Parameter: Plant Line Value: 35A19
  misc_feature: MA Experiment 108528 PARAMETER Experiment Name: Zm_Imbibed_Seeds_P Parameter: Tissue Value: Aerial vs. Embryo
  misc_feature: MA Experiment ID: 108530 Result: Up-regulated in Transcription
  misc_feature: MA Experiment 108530 PARAMETER Experiment Name: Zm_Imbibed_Seeds_P Parameter: Age (day) Value: 6 vs. 2
  misc_feature: MA Experiment 108530 PARAMETER Experiment Name: Zm_Imbibed_Seeds_P Parameter: Organism Value: Zea mays
  misc_feature: MA Experiment 108530 PARAMETER Experiment Name: Zm_Imbibed_Seeds_P Parameter: Plant Line Value: 35A19
  misc_feature: MA Experiment 108530 PARAMETER Experiment Name: Zm_Imbibed_Seeds_P Parameter: Tissue Value: Aerial vs. Embryo
  misc_feature: MA Experiment ID: 108536 Result: Down-regulated in Transcription
  misc_feature: MA Experiment 108536 PARAMETER Experiment Name: Zm_Meristem_P Parameter: Age (day) Value: 8
  misc_feature: MA Experiment 108536 PARAMETER Experiment Name: Zm_Meristem_P Parameter: Organism Value: Zea mays
  misc_feature: MA Experiment 108536 PARAMETER Experiment Name: Zm_Meristem_P Parameter: Plant Line Value: 35A19
  misc_feature: MA Experiment 108536 PARAMETER Experiment Name: Zm_Meristem_P Parameter: Tissue Value: Shoot Meristem vs. Above Shoot Meristem
  misc_feature: MA Experiment ID: 108545 Result: Up-regulated in Transcription
  misc_feature: MA Experiment 108545 PARAMETER Experiment Name: Zm_Imbibed_Seeds_P Parameter: Age (day) Value: 3 vs. 2
  misc_feature: MA Experiment 108545 PARAMETER Experiment Name: Zm_Imbibed_Seeds_P Parameter: Organism Value: Zea mays
  misc_feature: MA Experiment 108545 PARAMETER Experiment Name: Zm_Imbibed_Seeds_P Parameter: Plant Line Value: 35A19
  misc_feature: MA Experiment 108545 PARAMETER Experiment Name: Zm_Imbibed_Seeds_P Parameter: Tissue Value: Aerial vs. Embryo
  misc_feature: MA Experiment ID: 108547 Result: Up-regulated in Transcription
  misc_feature: MA Experiment 108547 PARAMETER Experiment Name: Zm_Imbibed_Seeds_P Parameter: Age (day) Value: 4 vs. 2
  misc_feature: MA Experiment 108547 PARAMETER Experiment Name: Zm_Imbibed_Seeds_P Parameter: Organism Value: Zea mays
  misc_feature: MA Experiment 108547 PARAMETER Experiment Name: Zm_Imbibed_Seeds_P Parameter: Plant Line Value: 35A19
  misc_feature: MA Experiment 108547 PARAMETER Experiment Name: Zm_Imbibed_Seeds_P Parameter: Tissue Value: Aerial vs. Embryo
  misc_feature: MA Experiment ID: 108559 Result: Down-regulated in Transcription
  misc_feature: MA Experiment 108559 PARAMETER Experiment Name: Zm_5mM_NO_P Parameter: Age (day) Value: 8
  misc_feature: MA Experiment 108559 PARAMETER Experiment Name: Zm_5mM_NO_P Parameter: Organism Value: Zea mays
  misc_feature: MA Experiment 108559 PARAMETER Experiment Name: Zm_5mM_NO_P Parameter: Plant Line Value: 35A19
  misc_feature: MA Experiment 108559 PARAMETER Experiment Name: Zm_5mM_NO_P Parameter: Timepoint (hr) Value: 12
  misc_feature: MA Experiment 108559 PARAMETER Experiment Name: Zm_5mM_NO_P Parameter: Tissue Value: Aerial
  misc_feature: MA Experiment 108559 PARAMETER Experiment Name: Zm_5mM_NO_P Parameter: Treatment Value: 5mM NO vs. No Treatment
  misc_feature: MA Experiment ID: 108687 Result: Down-regulated in Transcription
  misc_feature: MA Experiment 108687 PARAMETER Experiment Name: Zm_Embryos-Flowers__P Parameter: Tissue Value: Embryo vs. Aerial+
  misc_feature: MA Experiment ID: 108688 Result: Down-regulated in Transcription
  misc_feature: MA Experiment 108688 PARAMETER Experiment Name: Zm_Embryos-Flowers__P Parameter: Tissue Value: Immature Flowers vs. Aerial+
acaagccacgctctccgcttgtggctaagctgctgcacgcgcggaccgacaaaaatccagcactagccaaagcacaggcgaagcagcagcagcgagaggccaccacaaacatggcgaccacggcgtttttacccccggccaagctgccgctgcaggggcgtcggttcgctagccccaaaacggcgggacgtatcagtgtcagggtccctccggcgcgagcgcagcaagagcagcaggtgaaggaggaggaggccgaggcggcgagcgtgccgccgccgcaggccgcggagaaggaggcgaggaagggggacgcgcagtccctgccgcggcagcctttggcggagagcaagaacatgagccgcgagtacggcgggcagtggctgagcagcaccacgcggcacgtccgcatctacgctgcgtacatcgacccggtgaccaacgcgttcgaccagacgcagatggacaagctgacgctcatgctcgacccccaggacgagttcgcctggaccgacgaggcctgccagatggtcttcaacgagttccaggacctcgtcgatcactacgagggggctgagctgtcggagtacacacttcggttgatcgggtcagaccttgagcactacatccgcaaactactgtacgacggggtgatcaagtacaacatgaggtccagagtcctcaatttcagcatgggcaaacctcgcatcaagttcaacagcaaccagataccagaaaaaatatagaatgtacttatccaacaccctgaaaagaatggtttctctccattctattaccgagcaagatgtatactctgcagtcccaaatacgatccagagcattcc

SEQ ID NO: 16671 - protein, 246 aa, Zea mays subsp. mays
  peptide (1)..(246): Ceres Seq. ID no. 12402058
  misc_feature (127)..(235): Homolog of NCBI NO: 22297990 NR Description: ORF_ID:tll0447~hypothetical protein
  misc_feature (127)..(234): Homolog of NCBI NO: 33866788 NR Description: conserved hypothetical protein [Synechococcus sp.
  misc_feature (127)..(234): Homolog of NCBI NO: 33239620 NR Description: Uncharacterized protein
  misc_feature (127)..(235): Homolog of NCBI NO: 23039375 NR Description: hypothetical protein [Trichodesmium erythraeum
  misc_feature (127)..(236): Homolog of NCBI NO: 16331024 NR Description: unknown protein [Synechocystis sp. PCC 6803]
  misc_feature (127)..(236): Homolog of NCBI NO: 37521091 NR Description: hypothetical protein glr1522 [Gloeobacter
  misc_feature (127)..(235): Homolog of NCBI NO: 17229224 NR Description: hypothetical protein [Nostoc sp. PCC 7120]
  misc_feature (127)..(242): Homolog of NCBI NO: 23125502 NR Description: hypothetical protein [Nostoc punctiforme]
  misc_feature (188)..(242): Homolog of NCBI NO: 15235742 NR Description: putative protein; protein id: At4g37920.1
  misc_feature (58)..(188): Homolog of NCBI NO: 15235742 NR Description: putative protein; protein id: At4g37920.1
KPRSPLVAKLLHARTDKNPALAKAQAKQQQREATTNMATTAFLPPAKLPLQGRRFASPKTAGRISVRVPPARAQQEQQVKEEEAEAASVPPPQAAEKEARKGDAQSLPRQPLAESKNMSREYGGQWLSSTTRHVRIYAAYIDPVTNAFDQTQMDKLTLMLDPQDEFAWTDEACQMVFNEFQDLVDHYEGAELSEYTLRLIGSDLEHYIRKLLYDGVIKYNMRSRVLNFSMGKPRIKFNSNQIPEKI

SEQ ID NO: 16672 - protein, 210 aa, Zea mays subsp. mays
  peptide (1)..(210): Ceres Seq. ID no. 12402059
  misc_feature (91)..(199): Homolog of NCBI NO: 22297990 NR Description: ORF_ID:tll0447~hypothetical protein
  misc_feature (91)..(198): Homolog of NCBI NO: 33866788 NR Description: conserved hypothetical protein [Synechococcus sp.
  misc_feature (91)..(198): Homolog of NCBI NO: 33239620 NR Description: Uncharacterized protein
  misc_feature (91)..(199): Homolog of NCBI NO: 23039375 NR Description: hypothetical protein [Trichodesmium erythraeum
  misc_feature (91)..(200): Homolog of NCBI NO: 16331024 NR Description: unknown protein [Synechocystis sp. PCC 6803]
  misc_feature (91)..(200): Homolog of NCBI NO: 37521091 NR Description: hypothetical protein glr1522 [Gloeobacter
  misc_feature (91)..(199): Homolog of NCBI NO: 17229224 NR Description: hypothetical protein [Nostoc sp. PCC 7120]
  misc_feature (91)..(206): Homolog of NCBI NO: 23125502 NR Description: hypothetical protein [Nostoc punctiforme]
  misc_feature (152)..(206): Homolog of NCBI NO: 15235742 NR Description: putative protein; protein id: At4g37920.1
  misc_feature (22)..(152): Homolog of NCBI NO: 15235742 NR Description: putative protein; protein id: At4g37920.1
MATTAFLPPAKLPLQGRRFASPKTAGRISVRVPPARAQQEQQVKEEEAEAASVPPPQAAEKEARKGDAQSLPRQPLAESKNMSREYGGQWLSSTTRHVRIYAAYIDPVTNAFDQTQMDKLTLMLDPQDEFAWTDEACQMVFNEFQDLVDHYEGAELSEYTLRLIGSDLEHYIRKLLYDGVIKYNMRSRVLNFSMGKPRIKFNSNQIPEKI

SEQ ID NO: 16673 - protein, 129 aa, Zea mays subsp. mays
  peptide (1)..(129): Ceres Seq. ID no. 12402060
  misc_feature (10)..(118): Homolog of NCBI NO: 22297990 NR Description: ORF_ID:tll0447~hypothetical protein
  misc_feature (10)..(117): Homolog of NCBI NO: 33866788 NR Description: conserved hypothetical protein [Synechococcus sp.
  misc_feature (10)..(117): Homolog of NCBI NO: 33239620 NR Description: Uncharacterized protein
  misc_feature (10)..(118): Homolog of NCBI NO: 23039375 NR Description: hypothetical protein [Trichodesmium erythraeum
  misc_feature (10)..(119): Homolog of NCBI NO: 16331024 NR Description: unknown protein [Synechocystis sp. PCC 6803]
  misc_feature (10)..(119): Homolog of NCBI NO: 37521091 NR Description: hypothetical protein glr1522 [Gloeobacter
  misc_feature (10)..(118): Homolog of NCBI NO: 17229224 NR Description: hypothetical protein [Nostoc sp. PCC 7120]
  misc_feature (10)..(125): Homolog of NCBI NO: 23125502 NR Description: hypothetical protein [Nostoc punctiforme]
  misc_feature (71)..(125): Homolog of NCBI NO: 15235742 NR Description: putative protein; protein id: At4g37920.1
  misc_feature (1)..(71): Homolog of NCBI NO: 15235742 NR Description: putative protein; protein id: At4g37920.1
MSREYGGQWLSSTTRHVRIYAAYIDPVTNAFDQTQMDKLTLMLDPQDEFAWTDEACQMVFNEFQDLVDHYEGAELSEYTLRLIGSDLEHYIRKLLYDGVIKYNMRSRVLNFSMGKPRIKFNSNQIPEKI

SEQ ID NO: 16674 - DNA, 520 bp, Zea mays subsp. mays
  misc_feature (1)..(520): Ceres Seq. ID no. 12588730
  misc_feature: MA Experiment ID: 108523 Result: Up-regulated in Transcription
  misc_feature: MA Experiment 108523 PARAMETER Experiment Name: Zm_42deg_Heat_P Parameter: Age (day) Value: 8
  misc_feature: MA Experiment 108523 PARAMETER Experiment Name: Zm_42deg_Heat_P Parameter: Organism Value: Zea mays
  misc_feature: MA Experiment 108523 PARAMETER Experiment Name: Zm_42deg_Heat_P Parameter: Plant Line Value: 35A19
  misc_feature: MA Experiment 108523 PARAMETER Experiment Name: Zm_42deg_Heat_P Parameter: Temperature (deg C) Value: 42 vs. 22
  misc_feature: MA Experiment 108523 PARAMETER Experiment Name: Zm_42deg_Heat_P Parameter: Timepoint (hr) Value: 6
  misc_feature: MA Experiment 108523 PARAMETER Experiment Name: Zm_42deg_Heat_P Parameter: Tissue Value: Aerial
  misc_feature: MA Experiment ID: 108535 Result: Down-regulated in Transcription
  misc_feature: MA Experiment 108535 PARAMETER Experiment Name: Zm_Meristem_P Parameter: Age (day) Value: 8
  misc_feature: MA Experiment 108535 PARAMETER Experiment Name: Zm_Meristem_P Parameter: Organism Value: Zea mays
  misc_feature: MA Experiment 108535 PARAMETER Experiment Name: Zm_Meristem_P Parameter: Plant Line Value: 35A19
  misc_feature: MA Experiment 108535 PARAMETER Experiment Name: Zm_Meristem_P Parameter: Tissue Value: Root Meristem vs. Above Root Meristem
  misc_feature: MA Experiment ID: 20000487 Result: Up-regulated in Transcription
  misc_feature: MA Experiment 20000487 PARAMETER Experiment Name: Zm_50mM_NH4NO3_L_to_H_P Parameter: Organism Value: Zea mays
  misc_feature: MA Experiment 20000487 PARAMETER Experiment Name: Zm_50mM_NH4NO3_L_to_H_P Parameter: Timepoint (hr) Value: 4
  misc_feature: MA Experiment 20000487 PARAMETER Experiment Name: Zm_50mM_NH4NO3_L_to_H_P Parameter: Tissue Value: Leaves
  misc_feature: MA Experiment 20000487 PARAMETER Experiment Name: Zm_50mM_NH4NO3_L_to_H_P Parameter: Treatment Value: 50mM NH4NO3 vs. 100mM Mannitol
accgagagtggcagtggagtagtggtaggaaaagctcgtcgccgagtcgccgtacgggggctcggctcgggtgagcgagcggcggccggcgggtactgaggcctgagggcgaggcgatgggccgcctccgtgacgggcgagccttcctccaccgcgcgcttgtcctctcgtcgctgctccttctcgcctccggcgaaatcttcttcgaggaacggttcgatgatgggtgggatagccgctgggtgaaatctgattggaagaagagccaaggacaagctggaaccttccgacacacagcgggaacctactctggagaccctgacgataaaggtatacaaacaactggggatgccaaacattttgctatatcagcaaaattcccacaatttagtaacaaggaccggacattggttatccagtactctctaaagattgaacaagatattgaatgcggtggtgcttacatcaaacttatgtctggttaatctcaaccagaagaatttggtggcgacactcctta

SEQ ID NO: 16675 - protein, 122 aa, Zea mays subsp. mays
  peptide (1)..(122): Ceres Seq. ID no. 12588731
  misc_feature (28)..(122): Pfam Name: Calreticulin family Pfam Description: Calreticulin family
  misc_feature (14)..(122): Homolog of NCBI NO: 2052381 NR Description: calreticulin
  misc_feature (14)..(122): Homolog of NCBI NO: 11131904 NR Description: Calreticulin precursor
  misc_feature (14)..(122): Homolog of NCBI NO: 11131745 NR Description: Calreticulin precursor
  misc_feature (72)..(122): Homolog of NCBI NO: 6664320 NR Description: T27G7.13 [Arabidopsis thaliana]
  misc_feature (1)..(72): Homolog of NCBI NO: 6664320 NR Description: T27G7.13 [Arabidopsis thaliana]
  misc_feature (3)..(122): Homolog of NCBI NO: 33517365 NR Description: calreticulin 3 [Brassica rapa subsp. pekinensis]
  misc_feature (1)..(122): Homolog of NCBI NO: 27311777 NR Description: calreticulin, putative [Arabidopsis thaliana]
  misc_feature (1)..(122): Homolog of NCBI NO: 18390896 NR Description: calreticulin, putative
  misc_feature (1)..(122): Homolog of NCBI NO: 12643531 NR Description: Calreticulin 3 precursor
  misc_feature (1)..(122): Homolog of NCBI NO: 34907604 NR Description: putative calreticulin [Oryza sativa (japonica
MGRLRDGRAFLHRALVLSSLLLLASGEIFFEERFDDGWDSRWVKSDWKKSQGQAGTFRHTAGTYSGDPDDKGIQTTGDAKHFAISAKFPQFSNKDRTLVIQYSLKIEQDIECGGAYIKLMSG

SEQ ID NO: 16676 - DNA, 1501 bp, Zea mays subsp. mays
  misc_feature (1)..(1501): Ceres Seq. ID no. 12362343
  misc_feature: MA Experiment ID: 108530 Result: Up-regulated in Transcription
  misc_feature: MA Experiment 108530 PARAMETER Experiment Name: Zm_Imbibed_Seeds_P Parameter: Age (day) Value: 6 vs. 2
  misc_feature: MA Experiment 108530 PARAMETER Experiment Name: Zm_Imbibed_Seeds_P Parameter: Organism Value: Zea mays
  misc_feature: MA Experiment 108530 PARAMETER Experiment Name: Zm_Imbibed_Seeds_P Parameter: Plant Line Value: 35A19
  misc_feature: MA Experiment 108530 PARAMETER Experiment Name: Zm_Imbibed_Seeds_P Parameter: Tissue Value: Aerial vs. Embryo
  misc_feature: MA Experiment ID: 108536 Result: Down-regulated in Transcription
  misc_feature: MA Experiment 108536 PARAMETER Experiment Name: Zm_Meristem_P Parameter: Age (day) Value: 8
  misc_feature: MA Experiment 108536 PARAMETER Experiment Name: Zm_Meristem_P Parameter: Organism Value: Zea mays
  misc_feature: MA Experiment 108536 PARAMETER Experiment Name: Zm_Meristem_P Parameter: Plant Line Value: 35A19
  misc_feature: MA Experiment 108536 PARAMETER Experiment Name: Zm_Meristem_P Parameter: Tissue Value: Shoot Meristem vs. Above Shoot Meristem
  misc_feature: MA Experiment ID: 108545 Result: Up-regulated in Transcription
  misc_feature: MA Experiment 108545 PARAMETER Experiment Name: Zm_Imbibed_Seeds_P Parameter: Age (day) Value: 3 vs. 2
  misc_feature: MA Experiment 108545 PARAMETER Experiment Name: Zm_Imbibed_Seeds_P Parameter: Organism Value: Zea mays
  misc_feature: MA Experiment 108545 PARAMETER Experiment Name: Zm_Imbibed_Seeds_P Parameter: Plant Line Value: 35A19
  misc_feature: MA Experiment 108545 PARAMETER Experiment Name: Zm_Imbibed_Seeds_P Parameter: Tissue Value: Aerial vs. Embryo
  misc_feature: MA Experiment ID: 108687 Result: Down-regulated in Transcription
  misc_feature: MA Experiment 108687 PARAMETER Experiment Name: Zm_Embryos-Flowers__P Parameter: Tissue Value: Embryo vs. Aerial+
aaggtcggcttccacatctctctcattctcgtctccccccactgctagctgctgcagctctcaagctagctggcagctagggtttacaccgatccggggtccggtcgccgccggccggcggaagcgggcaatcgagctccgcgacgtcgagatctgcttaattgctaggtggtcgccgcgccggcagccccggcacagagaaagtcaattgctctttgcaggggttgctgctcgttttaaaagagatcctctagccagcagggacaccgcgagatggcgggcgccgtcgggctaacaagacgatgataaggggcggcaaccaccagcaggcggcggacgtcgaggaggagctagcccggaacagcaggcacgccgccgccgtggcgacgtcgcggcaatggtcggcgcagacggagtcgcgcatcgtgcgcgtctcccgcgtcttcggcggcaaggaccgccacagcaaggtgaagaccgtcaagggcctgcgcgaccggcgggtgcgcctctccgtgccgacggcgatccagctctacgacctgcaggaccgcctcggcctcaaccagcctagcaaggtcgtcgactggctgctcaacgccgcgcgccacgagatcgacaagctgccgccgctgcagttcccgccgcaggacctcatggttgggcacctgacgccccacaacatgccgctgatggtgcacgacgagaagttcggacacctcgccgcggccgcggcgctcgcgagcggcggcggcggcggcgccaaggtcagccagcagggcaacgtcgtcgacgtcgacgggaccggagcccaccacttggtggggaggttccccggcggctaccaccggttcatggagctgaacagcgcgttgggcatggtcagtggcgcaatggcgccgccgtataacaacaactacaccggagaggcatggaataacagcggcggcggcgtgcatgacagcggctcgccgcagatcgtcgccgcagccgctcaccactcgccgttcccatcgttgctctccttggctccacgtccgcatcagctggcgttctactcctcggaagctgatcagcagtttcaggtggagaaccttggctcgcaaagcctgtccttgagctcggcgagggcttaccatgatcaggctagctagcggactgcgtactggaacgactcttcgatcgagattaaggtagcaataatgctcactgatcccaaaattcccaagtacaatatactatctagctgtgcaagagtgtgcatgtcagagtttccaagtgccttttaaggatcggatcggaggcagttaagcttgtgatgatttcataattagtagtagacctgaaacagaataaaatgtgcggggcttgatcttgaagcgtacgtgtgtgtgccatacgaatttgttacttctttcaatacacaaaggagtaatattaatctgtatgctggcttgtagaataacaatatatggtttgctaatattacggttttagttat

SEQ ID NO: 16677 - protein, 283 aa, Zea mays subsp. mays
  peptide (1)..(283): Ceres Seq. ID no. 12362344
  misc_feature (34)..(167): Pfam Name: TCP family transcription factor Pfam Description: TCP family transcription factor
  misc_feature (32)..(117): Homolog of NCBI NO: 7486304 NR Description: hypothetical protein F28J12.50 - Arabidopsis
  misc_feature (31)..(111): Homolog of NCBI NO: 18397402 NR Description: expressed protein
  misc_feature (20)..(115): Homolog of NCBI NO: 15241512 NR Description: putative helix-loop-helix DNA binding protein
  misc_feature (28)..(120): Homolog of NCBI NO: 30678498 NR Description: TCP family transcription factor TFPD [Arabidopsis
  misc_feature (32)..(117): Homolog of NCBI NO: 18415079 NR Description: teosinte branched1 - like protein
  misc_feature (39)..(117): Homolog of NCBI NO: 25369264 NR Description: probable basic helix-loop-helix DNA binding
  misc_feature (28)..(120): Homolog of NCBI NO: 18396089 NR Description: expressed protein
  misc_feature (6)..(114): Homolog of NCBI NO: 15239489 NR Description: DNA binding protein - like; protein id:
  misc_feature (114)..(281): Homolog of NCBI NO: 34909780 NR Description: P0512C01.32 [Oryza sativa (japonica
  misc_feature (10)..(234): Homolog of NCBI NO: 34909780 NR Description: P0512C01.32 [Oryza sativa (japonica
MIRGGNHQQAADVEEELARNSRHAAAVATSRQWSAQTESRIVRVSRVFGGKDRHSKVKTVKGLRDRRVRLSVPTAIQLYDLQDRLGLNQPSKVVDWLLNAARHEIDKLPPLQFPPQDLMVGHLTPHNMPLMVHDEKFGHLAAAAALASGGGGGAKVSQQGNVVDVDGTGAHHLVGRFPGGYHRFMELNSALGMVSGAMAPPYNNNYTGEAWNNSGGGVHDSGSPQIVAAAAHHSPFPSLLSLAPRPHQLAFYSSEADQQFQVENLGSQSLSLSSARAYHDQAS

SEQ ID NO: 16678 - protein, 165 aa, Zea mays subsp. mays
  peptide (1)..(165): Ceres Seq. ID no. 12362345
  misc_feature (1)..(11): Homolog of NCBI NO: 20975255 NR Description: transcription factor PCF6 [Oryza sativa (japonica
  misc_feature (1)..(163): Homolog of NCBI NO: 34909780 NR Description: P0512C01.32 [Oryza sativa (japonica
  misc_feature (1)..(116): Homolog of NCBI NO: 34909780 NR Description: P0512C01.32 [Oryza sativa (japonica
MVGHLTPHNMPLMVHDEKFGHLAAAAALASGGGGGAKVSQQGNVVDVDGTGAHHLVGRFPGGYHRFMELNSALGMVSGAMAPPYNNNYTGEAWNNSGGGVHDSGSPQIVAAAAHHSPFPSLLSLAPRPHQLAFYSSEADQQFQVENLGSQSLSLSSARAYHDQAS

SEQ ID NO: 16679 - protein, 156 aa, Zea mays subsp. mays
  peptide (1)..(156): Ceres Seq. ID no. 12362346
  misc_feature (1)..(154): Homolog of NCBI NO: 34909780 NR Description: P0512C01.32 [Oryza sativa (japonica
  misc_feature (1)..(107): Homolog of NCBI NO: 34909780 NR Description: P0512C01.32 [Oryza sativa (japonica
MPLMVHDEKFGHLAAAAALASGGGGGAKVSQQGNVVDVDGTGAHHLVGRFPGGYHRFMELNSALGMVSGAMAPPYNNNYTGEAWNNSGGGVHDSGSPQIVAAAAHHSPFPSLLSLAPRPHQLAFYSSEADQQFQVENLGSQSLSLSSARAYHDQAS

SEQ ID NO: 16680 - DNA, 1599 bp, Zea mays subsp. mays
  misc_feature (1)..(1599): Ceres Seq. ID no. 12366495
  misc_feature: MA Experiment ID: 108687 Result: Down-regulated in Transcription
  misc_feature: MA Experiment 108687 PARAMETER Experiment Name: Zm_Embryos-Flowers__P Parameter: Tissue Value: Embryo vs. Aerial+
gcacgagaccattacctagaacatcctaatcgaaaaagctcagccgtcctgcatctggcgccggtgcaggcaatgaacacatatcacccccggatcacggacagacagctgaggaaagtgatgcgagggaagactacccggcaatggctactaccacgccagcagaggacgggtacagctggaggaagtacggacagaagcaggtgaagcacagcgagtacccgcgtagctacttcaagtgcacgcatcccaactgcctggtgaagaagaaggtcgagcgctcgcacgaggggcacatcacggagatcatctacaagggcgcgcacaaccacccgaagcccacgcagagccgccgtccaggcgtccagcccgtgcacccgtttggcgacagtgcgcaggcggacgcagccgacaacctggggtcacaggcaaacgcagtggacgccaaccagccgaggcgtgcgggtgttcaggatggcatggacgcgacgtcgtcgccctcagttcccattgagcgctgtgactcgccggcctcgatgcaggtcgactcggcagccccggtttggatcccccgagggcgcggatgtgacgtctgtgtccgacgaggtgggcggggacgacagggtgactcgtggcagtatgtctcagggcggtgccgacgcggagggtgacgagctggaatgtaaacgaaggaagctggagtcgtacgccatcgatatgagcaccgcgtcgagagctgttcgcgagcctcgcgtggtgatccagacgacgagcgaggtggacatcctagatgacggctaccgctggcgcaagtacggccagaaggtcgtcaagggcaacccgaatccaaggagctactacaagtgcacgtacccgggctgcgtggtgcggaagcacgtggagcgcgcgtcgcacgacctcaagtccgtgatcaccacgtacgagggcaggcacaaccacgaggtccccgccgccaggaacagcggccacccgggcaccgcggcggcgacaggcgcgggtggcccgcgcaggctggagcacccgtcgctgcgcgacggcctgatggggcacttgggcggctgcggcgtgccgttcggcctgccgccgcctagggatccgctggcgccgatgggcaattacccgacgtatgcctcctccattccccttggcggcgccggccccacgtcactgccgagcctgccggtgccggcggggaccctcancgccgtcgatgggctgaagctcccgatgctggcgccgtcgtccctgcagcagcacccgctgctgaggcaccggcaggcgatgcaggccgctggcctcgtggcgcccaaggacgacgtgaaggtcgagggcaacgttgccggcggcgctgccccgtcggtgtaccagcagatgatgtgcagcgggctgcggttgcgccagcagatgtagatacataaataaatgtggagaggattagtgattctcaagttattagtttcttaccagtcgtattaggatgagttcgtgataattgttataacgtgggaacaaacacccgttgctttctgtttttttttcacccttccacttcatttttagctcagcaactatttattt

SEQ ID NO: 16681 - protein, 318 aa, Zea mays subsp. mays
  peptide (1)..(318): Ceres Seq. ID no. 12366496
  misc_feature (105)..(164): Pfam Name: WRKY DNA -binding domain Pfam Description: WRKY DNA -binding domain
  misc_feature (162)..(318): Homolog of NCBI NO: 33519190 NR Description: WRKY10 [Oryza sativa (japonica cultivar-group)]
  misc_feature (37)..(308): Homolog of NCBI NO: 15241164 NR Description: WRKY family transcription factor
  misc_feature (29)..(318): Homolog of NCBI NO: 13620220 NR Description: hypothetical protein [Lycopersicon esculentum]
  misc_feature (32)..(127): Homolog of NCBI NO: 33519190 NR Description: WRKY10 [Oryza sativa (japonica cultivar-group)]
  misc_feature (126)..(245): Homolog of NCBI NO: 33519190 NR Description: WRKY10 [Oryza sativa (japonica cultivar-group)]
  misc_feature (29)..(318): Homolog of NCBI NO: 13620227 NR Description: hypothetical protein [Lycopersicon esculentum]
  misc_feature (35)..(308): Homolog of NCBI NO: 6174838 NR Description: transcription factor NtWRKY4 [Nicotiana tabacum]
  misc_feature (35)..(318): Homolog of NCBI NO: 14530687 NR Description: WRKY DNA-binding protein [Nicotiana tabacum]
  misc_feature (32)..(245): Homolog of NCBI NO: 33519174 NR Description: WRKY2 [Oryza sativa (japonica cultivar-group)]
  misc_feature (32)..(245): Homolog of NCBI NO: 38344754 NR Description: OSJNBa0089K21.12 [Oryza sativa (japonica
  misc_feature (250)..(250): Xaa is any aa, unknown or other
MAWTRRRRPQFPLSAVTRRPRCRSTRQPRFGSPEGADVTSVSDEVGGDDRVTRGSMSQGGADAEGDELECKRRKLESYAIDMSTASRAVREPRVVIQTTSEVDILDDGYRWRKYGQKVVKGNPNPRSYYKCTYPGCVVRKHVERASHDLKSVITTYEGRHNHEVPAARNSGHPGTAAATGAGGPRRLEHPSLRDGLMGHLGGCGVPFGLPPPRDPLAPMGNYPTYASSIPLGGAGPTSLPSLPVPAGTLXAVDGLKLPMLAPSSLQQHPLLRHRQAMQAAGLVAPKDDVKVEGNVAGGAAPSVYQQMMCSGLRLRQQM

SEQ ID NO: 16682 - protein, 263 aa, Zea mays subsp. mays
  peptide (1)..(263): Ceres Seq. ID no. 12366497
  misc_feature (50)..(109): Pfam Name: WRKY DNA -binding domain Pfam Description: WRKY DNA -binding domain
  misc_feature (107)..(263): Homolog of NCBI NO: 33519190 NR Description: WRKY10 [Oryza sativa (japonica cultivar-group)]
  misc_feature (1)..(253): Homolog of NCBI NO: 15241164 NR Description: WRKY family transcription factor
  misc_feature (1)..(263): Homolog of NCBI NO: 13620220 NR Description: hypothetical protein [Lycopersicon esculentum]
  misc_feature (1)..(72): Homolog of NCBI NO: 33519190 NR Description: WRKY10 [Oryza sativa (japonica cultivar-group)]
  misc_feature (71)..(190): Homolog of NCBI NO: 33519190 NR Description: WRKY10 [Oryza sativa (japonica cultivar-group)]
  misc_feature (1)..(263): Homolog of NCBI NO: 13620227 NR Description: hypothetical protein [Lycopersicon esculentum]
  misc_feature (1)..(253): Homolog of NCBI NO: 6174838 NR Description: transcription factor NtWRKY4 [Nicotiana tabacum]
  misc_feature (1)..(263): Homolog of NCBI NO: 14530687 NR Description: WRKY DNA-binding protein [Nicotiana tabacum]
  misc_feature (1)..(190): Homolog of NCBI NO: 33519174 NR Description: WRKY2 [Oryza sativa (japonica cultivar-group)]
  misc_feature (1)..(190): Homolog of NCBI NO: 38344754 NR Description: OSJNBa0089K21.12 [Oryza sativa (japonica
  misc_feature (195)..(195): Xaa is any aa, unknown or other
MSQGGADAEGDELECKRRKLESYAIDMSTASRAVREPRVVIQTTSEVDILDDGYRWRKYGQKVVKGNPNPRSYYKCTYPGCVVRKHVERASHDLKSVITTYEGRHNHEVPAARNSGHPGTAAATGAGGPRRLEHPSLRDGLMGHLGGCGVPFGLPPPRDPLAPMGNYPTYASSIPLGGAGPTSLPSLPVPAGTLXAVDGLKLPMLAPSSLQQHPLLRHRQAMQAAGLVAPKDDVKVEGNVAGGAAPSVYQQMMCSGLRLRQQM

SEQ ID NO: 16683 - protein, 237 aa, Zea mays subsp. mays
  peptide (1)..(237): Ceres Seq. ID no. 12366498
  misc_feature (24)..(83): Pfam Name: WRKY DNA -binding domain Pfam Description: WRKY DNA -binding domain
  misc_feature (81)..(237): Homolog of NCBI NO: 33519190 NR Description: WRKY10 [Oryza sativa (japonica cultivar-group)]
  misc_feature (1)..(227): Homolog of NCBI NO: 15241164 NR Description: WRKY family transcription factor
  misc_feature (1)..(237): Homolog of NCBI NO: 13620220 NR Description: hypothetical protein [Lycopersicon esculentum]
  misc_feature (1)..(46): Homolog of NCBI NO: 33519190 NR Description: WRKY10 [Oryza sativa (japonica cultivar-group)]
  misc_feature (45)..(164): Homolog of NCBI NO: 33519190 NR Description: WRKY10 [Oryza sativa (japonica cultivar-group)]
  misc_feature (1)..(237): Homolog of NCBI NO: 13620227 NR Description: hypothetical protein [Lycopersicon esculentum]
  misc_feature (1)..(227): Homolog of NCBI NO: 6174838 NR Description: transcription factor NtWRKY4 [Nicotiana tabacum]
  misc_feature (1)..(237): Homolog of NCBI NO: 14530687 NR Description: WRKY DNA-binding protein [Nicotiana tabacum]
  misc_feature (1)..(164): Homolog of NCBI NO: 33519174 NR Description: WRKY2 [Oryza sativa (japonica cultivar-group)]
  misc_feature (1)..(164): Homolog of NCBI NO: 38344754 NR Description: OSJNBa0089K21.12 [Oryza sativa (japonica
  misc_feature (169)..(169): Xaa is any aa, unknown or other
MSTASRAVREPRVVIQTTSEVDILDDGYRWRKYGQKVVKGNPNPRSYYKCTYPGCVVRKHVERASHDLKSVITTYEGRHNHEVPAARNSGHPGTAAATGAGGPRRLEHPSLRDGLMGHLGGCGVPFGLPPPRDPLAPMGNYPTYASSIPLGGAGPTSLPSLPVPAGTLXAVDGLKLPMLAPSSLQQHPLLRHRQAMQAAGLVAPKDDVKVEGNVAGGAAPSVYQQMMCSGLRLRQQM

SEQ ID NO: 16684 - DNA, 1614 bp, Zea mays subsp. mays
  misc_feature (1)..(1614): Ceres Seq. ID no. 12374652
  misc_feature: MA Experiment ID: 108515 Result: Up-regulated in Transcription
  misc_feature: MA Experiment 108515 PARAMETER Experiment Name: Zm_2mM_SA_P Parameter: Age (day) Value: 8
  misc_feature: MA Experiment 108515 PARAMETER Experiment Name: Zm_2mM_SA_P Parameter: Organism Value: Zea mays
  misc_feature: MA Experiment 108515 PARAMETER Experiment Name: Zm_2mM_SA_P Parameter: Plant Line Value: 35A19
  misc_feature: MA Experiment 108515 PARAMETER Experiment Name: Zm_2mM_SA_P Parameter: Timepoint (hr) Value: 12
  misc_feature: MA Experiment 108515 PARAMETER Experiment Name: Zm_2mM_SA_P Parameter: Tissue Value: Aerial
  misc_feature: MA Experiment 108515 PARAMETER Experiment Name: Zm_2mM_SA_P Parameter: Treatment Value: 2mM SA vs. No Treatment
  misc_feature: MA Experiment ID: 108529 Result: Up-regulated in Transcription
  misc_feature: MA Experiment 108529 PARAMETER Experiment Name: Zm_Imbibed_Seeds_P Parameter: Age (day) Value: 5 vs. 2
  misc_feature: MA Experiment 108529 PARAMETER Experiment Name: Zm_Imbibed_Seeds_P Parameter: Organism Value: Zea mays
  misc_feature: MA Experiment 108529 PARAMETER Experiment Name: Zm_Imbibed_Seeds_P Parameter: Plant Line Value: 35A19
  misc_feature: MA Experiment 108529 PARAMETER Experiment Name: Zm_Imbibed_Seeds_P Parameter: Tissue Value: Roots vs. Embryo
  misc_feature: MA Experiment ID: 108689 Result: Up-regulated in Transcription
  misc_feature: MA Experiment 108689 PARAMETER Experiment Name: Zm_Drought_Roots_P Parameter: Age (day) Value: 9
  misc_feature: MA Experiment 108689 PARAMETER Experiment Name: Zm_Drought_Roots_P Parameter: Organism Value: Zea mays
  misc_feature: MA Experiment 108689 PARAMETER Experiment Name: Zm_Drought_Roots_P Parameter: Plant Line Value: 35A19
  misc_feature: MA Experiment 108689 PARAMETER Experiment Name: Zm_Drought_Roots_P Parameter: Timepoint (hr) Value: 24
  misc_feature: MA Experiment 108689 PARAMETER Experiment Name: Zm_Drought_Roots_P Parameter: Tissue Value: Roots
  misc_feature: MA Experiment 108689 PARAMETER Experiment Name: Zm_Drought_Roots_P Parameter: Treatment Value: Drought vs. No Drought
  misc_feature: MA Experiment ID: 20000477 Result: Up-regulated in Transcription
  misc_feature: MA Experiment 20000477 PARAMETER Experiment Name: Zm_5mM_SA_P Parameter: Age (day) Value: 10
  misc_feature: MA Experiment 20000477 PARAMETER Experiment Name: Zm_5mM_SA_P Parameter: Organism Value: Zea mays
  misc_feature: MA Experiment 20000477 PARAMETER Experiment Name: Zm_5mM_SA_P Parameter: Plant Line Value: 35A19
  misc_feature: MA Experiment 20000477 PARAMETER Experiment Name: Zm_5mM_SA_P Parameter: Timepoint (hr) Value: 48
  misc_feature: MA Experiment 20000477 PARAMETER Experiment Name: Zm_5mM_SA_P Parameter: Tissue Value: Aerial
  misc_feature: MA Experiment 20000477 PARAMETER Experiment Name: Zm_5mM_SA_P Parameter: Treatment Value: 5mM SA vs. No Treatment
  misc_feature: MA Experiment ID: 20000478 Result: Up-regulated in Transcription
  misc_feature: MA Experiment 20000478 PARAMETER Experiment Name: Zm_5mM_SA_P Parameter: Age (day) Value: 11
  misc_feature: MA Experiment 20000478 PARAMETER Experiment Name: Zm_5mM_SA_P Parameter: Organism Value: Zea mays
  misc_feature: MA Experiment 20000478 PARAMETER Experiment Name: Zm_5mM_SA_P Parameter: Plant Line Value: 35A19
  misc_feature: MA Experiment 20000478 PARAMETER Experiment Name: Zm_5mM_SA_P Parameter: Timepoint (hr) Value: 72
  misc_feature: MA Experiment 20000478 PARAMETER Experiment Name: Zm_5mM_SA_P Parameter: Tissue Value: Aerial
  misc_feature: MA Experiment 20000478 PARAMETER Experiment Name: Zm_5mM_SA_P Parameter: Treatment Value: 5mM SA vs. No Treatment
  misc_feature: MA Experiment ID: 20000492 Result: Down-regulated in Transcription
  misc_feature: MA Experiment 20000492 PARAMETER Experiment Name: Zm_Hybrid_Seed_Dev_P Parameter: DAP Value: 12
  misc_feature: MA Experiment 20000492 PARAMETER Experiment Name: Zm_Hybrid_Seed_Dev_P Parameter: Organism Value: Zea mays
  misc_feature: MA Experiment 20000492 PARAMETER Experiment Name: Zm_Hybrid_Seed_Dev_P Parameter: Plant Line Value: 35A19
  misc_feature: MA Experiment 20000492 PARAMETER Experiment Name: Zm_Hybrid_Seed_Dev_P Parameter: Tissue Value: Fert Kernel vs. Unfert Floret
  misc_feature: MA Experiment ID: 20000535 Result: Down-regulated in Transcription
  misc_feature: MA Experiment 20000535 PARAMETER Experiment Name: Zm_Hybrid_Seed_Dev_P Parameter: DAP Value: 30 vs. 12
  misc_feature: MA Experiment 20000535 PARAMETER Experiment Name: Zm_Hybrid_Seed_Dev_P Parameter: Organism Value: Zea mays
  misc_feature: MA Experiment 20000535 PARAMETER Experiment Name: Zm_Hybrid_Seed_Dev_P Parameter: Plant Line Value: 35A19
  misc_feature: MA Experiment 20000535 PARAMETER Experiment Name: Zm_Hybrid_Seed_Dev_P Parameter: Tissue Value: Embryo vs. Unfert Floret
  misc_feature: MA Experiment ID: 20001613 Result: Down-regulated in Transcription
  misc_feature: MA Experiment 20001613 PARAMETER Experiment Name: Zm_50ppm_KNO3_L-to-H_P Parameter: Age (day) Value: 20
  misc_feature: MA Experiment 20001613 PARAMETER Experiment Name: Zm_50ppm_KNO3_L-to-H_P Parameter: Organism Value: Zea mays
  misc_feature: MA Experiment 20001613 PARAMETER Experiment Name: Zm_50ppm_KNO3_L-to-H_P Parameter: Plant Line Value: 35A19
  misc_feature: MA Experiment 20001613 PARAMETER Experiment Name: Zm_50ppm_KNO3_L-to-H_P Parameter: Timepoint (hr) Value: 24
  misc_feature: MA Experiment 20001613 PARAMETER Experiment Name: Zm_50ppm_KNO3_L-to-H_P Parameter: Tissue Value: Roots
  misc_feature: MA Experiment 20001613 PARAMETER Experiment Name: Zm_50ppm_KNO3_L-to-H_P Parameter: Treatment Value: 50ppm KNO3 vs. 50ppm KCl
aaaggccacgggtgcgctgtccactttgcaggcaagctcacggcctcacgtgaggccgacgaagtcgtagcagagatccgatacatgggagaggaagagggcgcgcccaccgtggcagcagcggcagagagcgctccgccgcacctgctcctgatatgcttcccggggcagggccacgtgaacccgatgctccgcctggccaagcgcatcgcggccaagggcctcctggtgaccttctcctcgatctccagagtcggggcgatgctcgccgcgtccgtgggcgtgtcggccggcggtgacggcgtgcctgtgggccggggccgcgtccggttcgagttcatggacgatgaagaccccgggcctgacctggacgacctcttgcggcacctcgcgaaggacggcccgccggcgtttgccgagctgctggagcggcaggcggacgccgggcggcctgtggcgtgcgtggtggtaaacccgttcatgccgtgggcggtcgacgtggccgccgacgcggggatcccttcggcggtgctgtgggtgcagtcgtgcgcggtgttctccctctactaccaccacgtgcacggcctcgtggagttccctcccgaggacgacctggacgcgcggttcacgctgcctggcctccccgagatgtccgtcgccgacgttccgtcgttcctgctcccgtccaacccgtacaagctgctggtggacgcgatcatcgcccagttccacaccatcgaccgcgcgtcgtgggtgctcgtcaactccttcacggagctggaacccgacgtggcggcggcgctcccgggcgtgacgccgcggccgccagagctcatccccgtgggcccgctcatcgaggtcgacgagcagcacgacggcgacggcgacggcgcggggtcgggcgcggtgcgtggcgacctgatgaaggccgcggacgactgcgtggagtggctagacgcgcaggcgccgcgctccatggtgtacgcatcggtgggcagcgtggtacggctcaacgcggaggaggtgggcgagatggcgcacgggctcgcgtccacggggcggcccttcctgtgggttgtccgtcccgatacccgggccgctcctcccagagggattcctggactccgtggccgggcgcggcacggtggtgccgtggagcccccaggaccgcgtgctggcgcacccgtccatcgcctgcttcctgacgcactgcggctggaactctaccctggagaccatcgcagcgggcgtaccagtggtggccttcccgcagtggggcgaccagttgcactgacgccaagttcctggtggaggaactcaggattggggtccgcctccgcgggccgctgcggcgggacgccgtgcgggaggcggtagacgccgccgtggcggggcccgaggccgacgcgatgctcgccaacgccaggaggtggagcgcggcggcgcgggaggccgtggcgctcggcgggtcctcggacgcgcatatccaagcgttcgtggacgaggtggcccggcgagcatgtgtcgtgccgccgtcgtcagagattcctagtcctagttgaggtcgaggagcttcagcagtcaccctcaccggacaaagtgagtcgaaagctg

SEQ ID NO: 16685 - protein, 458 aa, Zea mays subsp. mays
  peptide (1)..(458): Ceres Seq. ID no. 12374653
  misc_feature (46)..(361): Homolog of NCBI NO: 20259348 NR Description: putative UDP-glucose:indole-3-acetate
  misc_feature (46)..(361): Homolog of NCBI NO: 15233091 NR Description: UDP-glucosyltransferase, putative
  misc_feature (43)..(373): Homolog of NCBI NO: 15234619 NR Description: indole-3-acetate beta-glucosyltransferase like
  misc_feature (48)..(362): Homolog of NCBI NO: 21593030 NR Description: indole-3-acetate beta-glucosyltransferase like
  misc_feature (48)..(362): Homolog of NCBI NO: 15234616 NR Description: UDP-glycosyltransferase, putative
  misc_feature (46)..(362): Homolog of NCBI NO: 25082972 NR Description: indole-3-acetate beta-glucosyltransferase like
  misc_feature (46)..(362): Homolog of NCBI NO: 30683281 NR Description: UDP-glycosyltransferase family [Arabidopsis
  misc_feature (46)..(362): Homolog of NCBI NO: 7433899 NR Description: probable indole-3-acetate
  misc_feature (48)..(362): Homolog of NCBI NO: 28628183 NR Description: UDP-glucosyl transferase [Fragaria x ananassa]
  misc_feature (48)..(362): Homolog of NCBI NO: 13431605 NR Description: Limonoid UDP-glucosyltransferase (Limonoid
KGHGCAVHFAGKLTASREADEVVAEIRYMGEEEGAPTVAAAAESAPPHLLLICFPGQGHVNPMLRLAKRIAAKGLLVTFSSISRVGAMLAASVGVSAGGDGVPVGRGRVRFEFMDDEDPGPDLDDLLRHLAKDGPPAFAELLERQADAGRPVACVVVNPFMPWAVDVAADAGIPSAVLWVQSCAVFSLYYHHVHGLVEFPPEDDLDARFTLPGLPEMSVADVPSFLLPSNPYKLLVDAIIAQFHTIDRASWVLVNSFTELEPDVAAALPGVTPRPPELIPVGPLIEVDEQHDGDGDGAGSGAVRGDLMKAADDCVEWLDAQAPRSMVYASVGSVVRLNAEEVGEMAHGLASTGRPFLWVVRPDTRAAPPRGIPGLRGRARHGGAVEPPGPRAGAPVHRLLPDALRLELYPGDHRSGRTSGGLPAVGRPVALTPSSWWRNSGLGSASAGRCGGTPCGRR

SEQ ID NO: 16686 - protein, 430 aa, Zea mays subsp. mays
  peptide (1)..(430): Ceres Seq. ID no. 12374654
  misc_feature (18)..(333): Homolog of NCBI NO: 20259348 NR Description: putative UDP-glucose:indole-3-acetate
  misc_feature (18)..(333): Homolog of NCBI NO: 15233091 NR Description: UDP-glucosyltransferase, putative
  misc_feature (15)..(345): Homolog of NCBI NO: 15234619 NR Description: indole-3-acetate beta-glucosyltransferase like
  misc_feature (20)..(334): Homolog of NCBI NO: 21593030 NR Description: indole-3-acetate beta-glucosyltransferase like
  misc_feature (20)..(334): Homolog of NCBI NO: 15234616 NR Description: UDP-glycosyltransferase, putative
  misc_feature (18)..(334): Homolog of NCBI NO: 25082972 NR Description: indole-3-acetate beta-glucosyltransferase like
  misc_feature (18)..(334): Homolog of NCBI NO: 30683281 NR Description: UDP-glycosyltransferase family [Arabidopsis
  misc_feature (18)..(334): Homolog of NCBI NO: 7433899 NR Description: probable indole-3-acetate
  misc_feature (20)..(334): Homolog of NCBI NO: 28628183 NR Description: UDP-glucosyl transferase [Fragaria x ananassa]
  misc_feature (20)..(334): Homolog of NCBI NO: 13431605 NR Description: Limonoid UDP-glucosyltransferase (Limonoid
MGEEEGAPTVAAAAESAPPHLLLICFPGQGHVNPMLRLAKRIAAKGLLVTFSSISRVGAMLAASVGVSAGGDGVPVGRGRVRFEFMDDEDPGPDLDDLLRHLAKDGPPAFAELLERQADAGRPVACVVVNPFMPWAVDVAADAGIPSAVLWVQSCAVFSLYYHHVHGLVEFPPEDDLDARFTLPGLPEMSVADVPSFLLPSNPYKLLVDAIIAQFHTIDRASWVLVNSFTELEPDVAAALPGVTPRPPELIPVGPLIEVDEQHDGDGDGAGSGAVRGDLMKAADDCVEWLDAQAPRSMVYASVGSVVRLNAEEVGEMAHGLASTGRPFLWVVRPDTRAAPPRGIPGLRGRARHGGAVEPPGPRAGAPVHRLLPDALRLELYPGDHRSGRTSGGLPAVGRPVALTPSSWWRNSGLGSASAGRCGGTPCGRR

SEQ ID NO: 16687 - protein, 396 aa, Zea mays subsp. mays
  peptide (1)..(396): Ceres Seq. ID no. 12374655
  misc_feature (1)..(299): Homolog of NCBI NO: 20259348 NR Description: putative UDP-glucose:indole-3-acetate
  misc_feature (1)..(299): Homolog of NCBI NO: 15233091 NR Description: UDP-glucosyltransferase, putative
  misc_feature (1)..(311): Homolog of NCBI NO: 15234619 NR Description: indole-3-acetate beta-glucosyltransferase like
  misc_feature (1)..(300): Homolog of NCBI NO: 21593030 NR Description: indole-3-acetate beta-glucosyltransferase like
  misc_feature (1)..(300): Homolog of NCBI NO: 15234616 NR Description: UDP-glycosyltransferase, putative
  misc_feature (1)..(300): Homolog of NCBI NO: 25082972 NR Description: indole-3-acetate beta-glucosyltransferase like
  misc_feature (1)..(300): Homolog of NCBI NO: 30683281 NR Description: UDP-glycosyltransferase family [Arabidopsis
  misc_feature (1)..(300): Homolog of NCBI NO: 7433899 NR Description: probable indole-3-acetate
  misc_feature (1)..(300): Homolog of NCBI NO: 28628183 NR Description: UDP-glucosyl transferase [Fragaria x ananassa]
  misc_feature (1)..(300): Homolog of NCBI NO: 13431605 NR Description: Limonoid UDP-glucosyltransferase (Limonoid
MLRLAKRIAAKGLLVTFSSISRVGAMLAASVGVSAGGDGVPVGRGRVRFEFMDDEDPGPDLDDLLRHLAKDGPPAFAELLERQADAGRPVACVVVNPFMPWAVDVAADAGIPSAVLWVQSCAVFSLYYHHVHGLVEFPPEDDLDARFTLPGLPEMSVADVPSFLLPSNPYKLLVDAIIAQFHTIDRASWVLVNSFTELEPDVAAALPGVTPRPPELIPVGPLIEVDEQHDGDGDGAGSGAVRGDLMKAADDCVEWLDAQAPRSMVYASVGSVVRLNAEEVGEMAHGLASTGRPFLWVVRPDTRAAPPRGIPGLRGRARHGGAVEPPGPRAGAPVHRLLPDALRLELYPGDHRSGRTSGGLPAVGRPVALTPSSWWRNSGLGSASAGRCGGTPCGRR

SEQ ID NO: 16688 - DNA, 1108 bp, Zea mays subsp. mays
  misc_feature (1)..(1108): Ceres Seq. ID no. 12374780
  misc_feature: MA Experiment ID: 108530 Result: Down-regulated in Transcription
  misc_feature: MA Experiment 108530 PARAMETER Experiment Name: Zm_Imbibed_Seeds_P Parameter: Age (day) Value: 6 vs. 2
  misc_feature: MA Experiment 108530 PARAMETER Experiment Name: Zm_Imbibed_Seeds_P Parameter: Organism Value: Zea mays
  misc_feature: MA Experiment 108530 PARAMETER Experiment Name: Zm_Imbibed_Seeds_P Parameter: Plant Line Value: 35A19
  misc_feature: MA Experiment 108530 PARAMETER Experiment Name: Zm_Imbibed_Seeds_P Parameter: Tissue Value: Aerial vs. Embryo
  misc_feature: MA Experiment ID: 108535 Result: Up-regulated in Transcription
  misc_feature: MA Experiment 108535 PARAMETER Experiment Name: Zm_Meristem_P Parameter: Age (day) Value: 8
  misc_feature: MA Experiment 108535 PARAMETER Experiment Name: Zm_Meristem_P Parameter: Organism Value: Zea mays
  misc_feature: MA Experiment 108535 PARAMETER Experiment Name: Zm_Meristem_P Parameter: Plant Line Value: 35A19
  misc_feature: MA Experiment 108535 PARAMETER Experiment Name: Zm_Meristem_P Parameter: Tissue Value: Root Meristem vs. Above Root Meristem
  misc_feature: MA Experiment ID: 20000488 Result: Up-regulated in Transcription
  misc_feature: MA Experiment 20000488 PARAMETER Experiment Name: Zm_50mM_NH4NO3_L_to_H_P Parameter: Organism Value: Zea mays
  misc_feature: MA Experiment 20000488 PARAMETER Experiment Name: Zm_50mM_NH4NO3_L_to_H_P Parameter: Timepoint (hr) Value: 8
  misc_feature: MA Experiment 20000488 PARAMETER Experiment Name: Zm_50mM_NH4NO3_L_to_H_P Parameter: Tissue Value: Leaves
  misc_feature: MA Experiment 20000488 PARAMETER Experiment Name: Zm_50mM_NH4NO3_L_to_H_P Parameter: Treatment Value: 50mM NH4NO3 vs. 100mM Mannitol
ccgtctccctcctatcgcactcgcgtctctttcctattcgcgccgccgccgctgctgcaagcgccagctcgccgtcgtccgaatagtacactctaacgccgccatggggcgtatgcacagccgcgggaagggtatctcgtcgtcggcgctgccgtacaagaggacgcctcctacctggctgaagaccgccgcctccgacgtgagagccgtctcctctccttcgactccattccattcggccgtcgtctggttcgttattgttgggaatgcggatttggttcgttgacgtgtgttctcgcctggtaggtggaggagatgatcacaaaggcagcgaagaagggacagatgccgtcgcagatcggcgtcctgctccgtgaccagcacggtatcccccttgtcaagagtgtcaccggcagcaaaatcctccgcatcctcaaggcccatgggctggcacccgaaatcccggaggacctgtacttcctcatcaagaaggcggtggcgataaggaagcaccttgagaggaacaggaaggacaaagactctaaattcaggctcattcttgtcgagagcaggatccaccgccttgcccgctactacaagcgcacaaagaagcttccacccacgtggaagtacgagtcaaccactgcaagcactctggtggcctaagcgaggagctcagcgtacggcgcttgaagccgagggcattgttggaaatcatttttatgtaccgttttaagagtttggagtgaactagagatggtgaatgtccctcctctggaggatgccatggaccctttttgtttacatagaactgccctgctgttaaacctttgctacttggcgaaggcagttgattgcttgcctccattaacacctgctatgcgagaagcttttagccttgggctgtcgggcagagggactcctaaatgtatgatgtcaaaagcgcacccctagatctgtcagttgcttcgtatacatgtacgtggctgtgtagcttgtgcctgcagcagtgttcgtgtgacatcatccagggcaggacctttccgttggacacccctgacatgatcaacagtatttaaaagccatgttgcggcctatgagcctgttt

SEQ ID NO: 16689 - protein, 116 aa, Zea mays subsp. mays
  peptide (1)..(116): Ceres Seq. ID no. 12374781
  misc_feature (1)..(116): Homolog of NCBI NO: 24266981 NR Description: ribosomal protein S13 [Branchiostoma belcheri]
  misc_feature (1)..(116): Homolog of NCBI NO: 34393549 NR Description: putative 40S RIBOSOMAL PROTEIN S13
  misc_feature (1)..(116): Homolog of NCBI NO: 1173198 NR Description: 40S RIBOSOMAL PROTEIN S13
  misc_feature (1)..(116): Homolog of NCBI NO: 11276609 NR Description: ribosomal protein S13-like - Arabidopsis thaliana
  misc_feature (1)..(116): Homolog of NCBI NO: 7440402 NR Description: ribosomal protein S13, cytosolic - Arabidopsis
  misc_feature (1)..(116): Homolog of NCBI NO: 8131699 NR Description: cytoplasmic ribosomal protein S13 [Panax ginseng]
  misc_feature (1)..(116): Homolog of NCBI NO: 14190367 NR Description: AT3g60770/T4C21_180 [Arabidopsis thaliana]
  misc_feature (1)..(116): Homolog of NCBI NO: 18411716 NR Description: ribosomal protein S13 -like
  misc_feature (1)..(116): Homolog of NCBI NO: 18411224 NR Description: putative ribosomal protein S13
  misc_feature (1)..(116): Homolog of NCBI NO: 464705 NR Description: 40S RIBOSOMAL PROTEIN S13
MITKAAKKGQMPSQIGVLLRDQHGIPLVKSVTGSKILRILKAHGLAPEIPEDLYFLIKKAVAIRKHLERNRKDKDSKFRLILVESRIHRLARYYKRTKKLPPTWKYESTTASTLVA

SEQ ID NO: 16690 - protein, 106 aa, Zea mays subsp. mays
  peptide (1)..(106): Ceres Seq. ID no. 12374782
  misc_feature (1)..(106): Homolog of NCBI NO: 24266981 NR Description: ribosomal protein S13 [Branchiostoma belcheri]
  misc_feature (1)..(106): Homolog of NCBI NO: 34393549 NR Description: putative 40S RIBOSOMAL PROTEIN S13
  misc_feature (1)..(106): Homolog of NCBI NO: 1173198 NR Description: 40S RIBOSOMAL PROTEIN S13
  misc_feature (1)..(106): Homolog of NCBI NO: 11276609 NR Description: ribosomal protein S13-like - Arabidopsis thaliana
  misc_feature (1)..(106): Homolog of NCBI NO: 7440402 NR Description: ribosomal protein S13, cytosolic - Arabidopsis
  misc_feature (1)..(106): Homolog of NCBI NO: 8131699 NR Description: cytoplasmic ribosomal protein S13 [Panax ginseng]
  misc_feature (1)..(106): Homolog of NCBI NO: 14190367 NR Description: AT3g60770/T4C21_180 [Arabidopsis thaliana]
  misc_feature (1)..(106): Homolog of NCBI NO: 18411716 NR Description: ribosomal protein S13 -like
  misc_feature (1)..(106): Homolog of NCBI NO: 18411224 NR Description: putative ribosomal protein S13
  misc_feature (1)..(106): Homolog of NCBI NO: 464705 NR Description: 40S RIBOSOMAL PROTEIN S13
MPSQIGVLLRDQHGIPLVKSVTGSKILRILKAHGLAPEIPEDLYFLIKKAVAIRKHLERNRKDKDSKFRLILVESRIHRLARYYKRTKKLPPTWKYESTTASTLVA

SEQ ID NO: 16691 - protein, 94 aa, Zea mays subsp. mays
  peptide (1)..(94): Ceres Seq. ID no. 12374783
  misc_feature (35)..(67): Homolog of NCBI NO: 8131699 NR Description: cytoplasmic ribosomal protein S13 [Panax ginseng]
  misc_feature (35)..(67): Homolog of NCBI NO: 14190367 NR Description: AT3g60770/T4C21_180 [Arabidopsis thaliana]
  misc_feature (35)..(67): Homolog of NCBI NO: 18411716 NR Description: ribosomal protein S13 -like
  misc_feature (35)..(67): Homolog of NCBI NO: 18411224 NR Description: putative ribosomal protein S13
  misc_feature (35)..(67): Homolog of NCBI NO: 464705 NR Description: 40S RIBOSOMAL PROTEIN S13
  misc_feature (35)..(68): Homolog of NCBI NO: 24266981 NR Description: ribosomal protein S13 [Branchiostoma belcheri]
  misc_feature (35)..(67): Homolog of NCBI NO: 34393549 NR Description: putative 40S RIBOSOMAL PROTEIN S13
  misc_feature (35)..(67): Homolog of NCBI NO: 1173198 NR Description: 40S RIBOSOMAL PROTEIN S13
  misc_feature (35)..(67): Homolog of NCBI NO: 11276609 NR Description: ribosomal protein S13-like - Arabidopsis thaliana
  misc_feature (35)..(67): Homolog of NCBI NO: 7440402 NR Description: ribosomal protein S13, cytosolic - Arabidopsis
RLPPIALASLSYSRRRRCCKRQLAVVRIVHSNAAMGRMHSRGKGISSSALPYKRTPPTWLKTAASDVRAVSSPSTPFHSAVVWFVIVGNADLVR

SEQ ID NO: 16692 - DNA, 1428 bp, Zea mays subsp. mays
  misc_feature (1)..(1428): Ceres Seq. ID no. 12415601
  misc_feature: MA Experiment ID: 20000477 Result: Down-regulated in Transcription
  misc_feature: MA Experiment 20000477 PARAMETER Experiment Name: Zm_5mM_SA_P Parameter: Age (day) Value: 10
  misc_feature: MA Experiment 20000477 PARAMETER Experiment Name: Zm_5mM_SA_P Parameter: Organism Value: Zea mays
  misc_feature: MA Experiment 20000477 PARAMETER Experiment Name: Zm_5mM_SA_P Parameter: Plant Line Value: 35A19
  misc_feature: MA Experiment 20000477 PARAMETER Experiment Name: Zm_5mM_SA_P Parameter: Timepoint (hr) Value: 48
  misc_feature: MA Experiment 20000477 PARAMETER Experiment Name: Zm_5mM_SA_P Parameter: Tissue Value: Aerial
  misc_feature: MA Experiment 20000477 PARAMETER Experiment Name: Zm_5mM_SA_P Parameter: Treatment Value: 5mM SA vs. No Treatment
gcacgagaccattacctagaacatcctaatcgaaaaatcgcctcctctcgggctagctccacactcctttgtcctctccaaacgaacgaacaaaaagaggccgcttccccacccagtcacctcgacctcagcccctctcccccctccctatctcgactccgatgccgccgccgctcctcgaggcgcgcgactacatgggcgccggcgccaccccgttgtcctgctcctccagcggcgagggcacggggccgcacctcgcgctgcggctcgggctcccagggtccgactcccccggccgcgacgcggggccggagccggaccacgcccacgtcgacgccgcgctcaccctcggccctgcccccgcccccgcccccgcgcctcccagggtcggcgcaaagcgcgggttcgctgactcccgcgaccggtgcgtgaagcgggacgccactgctgcggatgacgctgctgggggagtgaccggggaggagaagcgggtagctgccggccgctgccggaactccgccggctgccaaggcgcaagttgttggatggccgcctgttaggagctaccggaagaacacactagctatgagtgccacaaagacaaacggggaagatgaaggtaggagtgaggcgggatgctgttatgttaaggtcagcatggatggagccccatacctaaggaaggtggacctcaagaccttttcgagctatgaggcacctttcgcttgctctggagaaaatgttcacctgcttcatcactggccaaagcggttcgtgcaagacttcaagaagggagaggctcactgatggttctagggctgatgcccttcaggaccaagaatatgtccttacttacgaagataaagatgctgactggatgctcgttggtgatctcccctgggacttgttcaccacaatttgtgggaaacttagaatcatgagaggctctgatgctgctggcatggctccaagatcaccggagcagatagttgggaccagaataaggaacgttgcccggcatgcagagtcgtgaactgaaaggaaaggacagagtttacatggcgctgaagggagcggtgtttttacgtgaagtgctccggttaagtctctctctctctctttttaacccccacatgtgcaatgagatgtgtgtggccctactgtaagacaccccattttgcccacgaggttgtcacgcgttattgtagatggtcgcctttgtgttatgaacgatcaaactcggtagtagcttgcttgctgcttcctctacgatactttcctccgtatttggaagctcgtacttcatatggtagaagtaagaaaaaatgcccatgttgcccattaagtttttttctctcgtgatgtgtgtgcgagcgaactaactattcagtggatctagaaagaatctgatcagtgagtctgtgtgcc

SEQ ID NO: 16693 - protein, 143 aa, Zea mays subsp. mays
  peptide (1)..(143): Ceres Seq. ID no. 12415602
  misc_feature (127)..(143): Homolog of NCBI NO: 34906394 NR Description: P0710E05.9 [Oryza sativa (japonica
  misc_feature (68)..(143): Homolog of NCBI NO: 34904314 NR Description: unnamed protein product [Oryza sativa (japonica
  misc_feature (78)..(143): Homolog of NCBI NO: 34911088 NR Description: OJ1117_G01.11 [Oryza sativa (japonica
ARDHYLEHPNRKIASSRASSTLLCPLQTNEQKEAASPPSHLDLSPSPPSLSRLRCRRRSSRRATTWAPAPPRCPAPPAARARGRTSRCGSGSQGPTPPAATRGRSRTTPTSTPRSPSALPPPPPPRLPGSAQSAGSLTPATGA

SEQ ID NO: 16694 - protein, 132 aa, Zea mays subsp. mays
  peptide (1)..(132): Ceres Seq. ID no. 12415603
  misc_feature (1)..(101): Homolog of NCBI NO: 34911088 NR Description: OJ1117_G01.11 [Oryza sativa (japonica
MPPPLLEARDYMGAGATPLSCSSSGEGTGPHLALRLGLPGSDSPGRDAGPEPDHAHVDAALTLGPAPAPAPAPPRVGAKRGFADSRDRCVKRDATAADDAAGGVTGEEKRVAAGRCRNSAGCQGASCWMAAC

SEQ ID NO: 16695 - protein, 121 aa, Zea mays subsp. mays
  peptide (1)..(121): Ceres Seq. ID no. 12415604
  misc_feature (1)..(90): Homolog of NCBI NO: 34911088 NR Description: OJ1117_G01.11 [Oryza sativa (japonica
MGAGATPLSCSSSGEGTGPHLALRLGLPGSDSPGRDAGPEPDHAHVDAALTLGPAPAPAPAPPRVGAKRGFADSRDRCVKRDATAADDAAGGVTGEEKRVAAGRCRNSAGCQGASCWMAAC

SEQ ID NO: 16696 - DNA, 1086 bp, Zea mays subsp. mays; identical to SEQ ID NO: 10089
  misc_feature (1)..(1086): Ceres Seq. ID no. 12358654
  misc_feature: MA Experiment ID: 20000535 Result: Up-regulated in Transcription
  misc_feature: MA Experiment 20000535 PARAMETER Experiment Name: Zm_Hybrid_Seed_Dev_P Parameter: DAP Value: 30 vs. 12
  misc_feature: MA Experiment 20000535 PARAMETER Experiment Name: Zm_Hybrid_Seed_Dev_P Parameter: Organism Value: Zea mays
  misc_feature: MA Experiment 20000535 PARAMETER Experiment Name: Zm_Hybrid_Seed_Dev_P Parameter: Plant Line Value: 35A19
  misc_feature: MA Experiment 20000535 PARAMETER Experiment Name: Zm_Hybrid_Seed_Dev_P Parameter: Tissue Value: Embryo vs. Unfert Floret

SEQ ID NO: 16697 - protein, 216 aa, Zea mays subsp. mays; identical to SEQ ID NO: 10090
  peptide (1)..(216): Ceres Seq. ID no. 12358655
  misc_feature (85)..(215): Pfam Name: Protein kinase domain Pfam Description: Protein kinase domain
  misc_feature (1)..(215): Homolog of NCBI NO: 38344237 NR Description: OJ991113_30.14 [Oryza sativa (japonica
  misc_feature (9)..(215): Homolog of NCBI NO: 15220477 NR Description: putative protein kinase; protein id: At1g67580.1
  misc_feature (9)..(215): Homolog of NCBI NO: 17064846 NR Description: putative protein kinase [Arabidopsis thaliana]
  misc_feature (16)..(215): Homolog of NCBI NO: 15242731 NR Description: protein kinase; protein id: At5g63370.1, by cDNA: gi_16974578, supported by cDNA: gi_17064769, supported cDNA: gi_20259873 [Arabidopsis thaliana]
  misc_feature (8)..(215): Homolog of NCBI NO: 3978441 NR Description: PITSLRE protein kinase alpha SV9 isoform [Homo
  misc_feature (5)..(215): Homolog of NCBI NO: 34879827 NR Description: similar to cell division cycle 2 homolog (S.
  misc_feature (15)..(215): Homolog of NCBI NO: 507158 NR Description: PITSLRE alpha 1
  misc_feature (15)..(215): Homolog of NCBI NO: 507160 NR Description: PITSLRE alpha 2-2
  misc_feature (15)..(215): Homolog of NCBI NO: 507162 NR Description: PITSLRE alpha 2-3
  misc_feature (15)..(215): Homolog of NCBI NO: 507164 NR Description: PITSLRE alpha 2-4

SEQ ID NO: 16698 - protein, 210 aa, Zea mays subsp. mays; identical to SEQ ID NO: 10091
  peptide (1)..(210): Ceres Seq. ID no. 12358656
  misc_feature (79)..(209): Pfam Name: Protein kinase domain Pfam Description: Protein kinase domain
  misc_feature (1)..(209): Homolog of NCBI NO: 38344237 NR Description: OJ991113_30.14 [Oryza sativa (japonica
  misc_feature (3)..(209): Homolog of NCBI NO: 15220477 NR Description: putative protein kinase; protein id: At1g67580.1
  misc_feature (3)..(209): Homolog of NCBI NO: 17064846 NR Description: putative protein kinase [Arabidopsis thaliana]
  misc_feature (10)..(209): Homolog of NCBI NO: 15242731 NR Description: protein kinase; protein id: At5g63370.1, by cDNA: gi_16974578, supported by cDNA: gi_17064769, supported cDNA: gi_20259873 [Arabidopsis thaliana]
  misc_feature (2)..(209): Homolog of NCBI NO: 3978441 NR Description: PITSLRE protein kinase alpha SV9 isoform [Homo
  misc_feature (1)..(209): Homolog of NCBI NO: 34879827 NR Description: similar to cell division cycle 2 homolog (S.
  misc_feature (9)..(209): Homolog of NCBI NO: 507158 NR Description: PITSLRE alpha 1
  misc_feature (9)..(209): Homolog of NCBI NO: 507160 NR Description: PITSLRE alpha 2-2
  misc_feature (9)..(209): Homolog of NCBI NO: 507168 NR Description: PITSLRE alpha 2-1
  misc_feature (9)..(209): Homolog of NCBI NO: 507164 NR Description: PITSLRE alpha 2-4

SEQ ID NO: 16699 - protein, 201 aa, Zea mays subsp. mays; identical to SEQ ID NO: 10092
  peptide (1)..(201): Ceres Seq. ID no. 12358657
  misc_feature (70)..(200): Pfam Name: Protein kinase domain Pfam Description: Protein kinase domain
  misc_feature (1)..(200): Homolog of NCBI NO: 38344237 NR Description: OJ991113_30.14 [Oryza sativa (japonica
  misc_feature (1)..(200): Homolog of NCBI NO: 15220477 NR Description: putative protein kinase; protein id: At1g67580.1
  misc_feature (1)..(200): Homolog of NCBI NO: 17064846 NR Description: putative protein kinase [Arabidopsis thaliana]
  misc_feature (1)..(200): Homolog of NCBI NO: 15242731 NR Description: protein kinase; protein id: At5g63370.1, by cDNA: gi_16974578, supported by cDNA: gi_17064769, supported cDNA: gi_20259873 [Arabidopsis thaliana]
  misc_feature (1)..(200): Homolog of NCBI NO: 3978441 NR Description: PITSLRE protein kinase alpha SV9 isoform [Homo
  misc_feature (1)..(200): Homolog of NCBI NO: 34879827 NR Description: similar to cell division cycle 2 homolog (S.
  misc_feature (1)..(200): Homolog of NCBI NO: 507158 NR Description: PITSLRE alpha 1
  misc_feature (1)..(200): Homolog of NCBI NO: 507160 NR Description: PITSLRE alpha 2-2
  misc_feature (1)..(200): Homolog of NCBI NO: 507164 NR Description: PITSLRE alpha 2-4
  misc_feature (1)..(200): Homolog of NCBI NO: 507168 NR Description: PITSLRE alpha 2-1

SEQ ID NO: 16700 - DNA, 1178 bp, Zea mays subsp. mays
  misc_feature (1)..(1178): Ceres Seq. ID no. 13499179
  misc_feature: MA Experiment ID: 108689 Result: Up-regulated in Transcription
  misc_feature: MA Experiment 108689 PARAMETER Experiment Name: Zm_Drought_Roots_P Parameter: Age (day) Value: 9
  misc_feature: MA Experiment 108689 PARAMETER Experiment Name: Zm_Drought_Roots_P Parameter: Organism Value: Zea mays
  misc_feature: MA Experiment 108689 PARAMETER Experiment Name: Zm_Drought_Roots_P Parameter: Plant Line Value: 35A19
  misc_feature: MA Experiment 108689 PARAMETER Experiment Name: Zm_Drought_Roots_P Parameter: Timepoint (hr) Value: 24
  misc_feature: MA Experiment 108689 PARAMETER Experiment Name: Zm_Drought_Roots_P Parameter: Tissue Value: Roots
  misc_feature: MA Experiment 108689 PARAMETER Experiment Name: Zm_Drought_Roots_P Parameter: Treatment Value: Drought vs. No Drought
gcacgagaccattacctagaacatcctaatcgaaaaaaagaagcgttggatcgtcttcggctagcttccggcgcgatggcggggcaggggcagcgcctgaacgtggtgccgacggtgacgacgctgggcacggtgaaggcgcggctggcgggcgccgcccgcggccacgcgctgctcaagaagaagtcggacgcgctgacggtgcagttccgcgccatcctcaggcgcatcgtgtccgccaaggacgccgtgggcgacgccatgcgcaccgcctcgctctcgctcgccgaggcgctgtacgtggccggcgcgccgctccggccacgctgcgcagcagtccgtgtccggcccggccaggctccgcgtgcgcgcgcaccaggacaacatcgccggcgtccgcctcccgcgcttcgagagcgacgcagcgtcgcctgcaggctctgcagcatcgccggcgtcgctcgccgggctcgccggcggcgggcagcaggtgtcggcctgccgcgcggcgtacgcgcgcgcgctccaggtgctggtggagctggcgtcgctgcagacgtcgttcctcgcgctggacgcgtccatcaagaccaccaaccggcgcgtcaacgcgctggagagcgtggtgaagccgcgcctggagaacaccatcgcctacatcaggggcgagctggacgagcacgagcgggaggagttcttccgcctcaagaagatccaggggtacaagcagcgcgagctcgagcgccagaaggaggccgccagccgctacgccgaggagaaggccgccggcgaggtcgcgctcaagcgcggcgtttccgtcgccactgcggagagcatgctggagaacggcgacagggacgaggaggatatcatcttttgagcctgtggagtgtggagtcctatgagtagagcgtgcagtggctgtgctacacctgcggcgccaaacagcaaccttctgtacacacagcccaataagctcgtagctgcagccggtgagccggagcccggaggctacgcgtatattccatctctgcgttaatccatgcgtgtgttttctcacttttttttgttgactgtcacagtggcgaagaacatcctcagctgaatttcattgaaagcaaccttgtttttggaaaaaagaggcaaaacctatataaaattgtggttgaccacatatt

SEQ ID NO: 16701 - protein, 302 aa, Zea mays subsp. mays
  peptide (1)..(302): Ceres Seq. ID no. 13499180
  misc_feature (40)..(103): Pfam Name: ATP synthase subunit D Pfam Description: ATP synthase subunit D
  misc_feature (26)..(103): Homolog of NCBI NO: 12585447 NR Description: Vacuolar ATP synthase subunit D (V-ATPase D
  misc_feature (26)..(103): Homolog of NCBI NO: 28278870 NR Description: Similar to ATPase, H+ transporting, lysosomal
  misc_feature (26)..(106): Homolog of NCBI NO: 40746132 NR Description: conserved hypothetical protein [Aspergillus
  misc_feature (30)..(103): Homolog of NCBI NO: 6320784 NR Description: vacuolar ATPase V1 domain subunit D; Vma8p
  misc_feature (26)..(103): Homolog of NCBI NO: 3929392 NR Description: Vacuolar ATP synthase subunit D (V-ATPase D
  misc_feature (26)..(103): Homolog of NCBI NO: 28829327 NR Description: similar to Homo sapiens (Human). Vacuolar proton
  misc_feature (26)..(103): Homolog of NCBI NO: 2493133 NR Description: Vacuolar ATP synthase subunit D (V-ATPase D
  misc_feature (26)..(103): Homolog of NCBI NO: 25529226 NR Description: H+-transporting two-sector ATPase (EC 3.6.3.14)
  misc_feature (26)..(103): Homolog of NCBI NO: 15231126 NR Description: v-ATPase subunit D (vATPD) [Arabidopsis thaliana]
  misc_feature (26)..(119): Homolog of NCBI NO: 38344879 NR Description: OSJNBa0033G05.3 [Oryza sativa (japonica
ARDHYLEHPNRKKEALDRLRLASGAMAGQGQRLNVVPTVTTLGTVKARLAGAARGHALLKKKSDALTVQFRAILRRIVSAKDAVGDAMRTASLSLAEALYVAGAPLRPRCAAVRVRPGQAPRARAPGQHRRRPPPALRERRSVACRLCSIAGVARRARRRRAAGVGLPRGVRARAPGAGGAGVAADVVPRAGRVHQDHQPARQRAGERGEAAPGEHHRLHQGRAGRARAGGVLPPQEDPGVQAARARAPEGGRQPLRRGEGRRRGRAQARRFRRHCGEHAGERRQGRGGYHLLSLWSVESYE

SEQ ID NO: 16702 - protein, 277 aa, Zea mays subsp. mays
  peptide (1)..(277): Ceres Seq. ID no. 13499181
  misc_feature (15)..(78): Pfam Name: ATP synthase subunit D Pfam Description: ATP synthase subunit D
  misc_feature (1)..(78): Homolog of NCBI NO: 12585447 NR Description: Vacuolar ATP synthase subunit D (V-ATPase D
  misc_feature (1)..(78): Homolog of NCBI NO: 28278870 NR Description: Similar to ATPase, H+ transporting, lysosomal
  misc_feature (1)..(81): Homolog of NCBI NO: 40746132 NR Description: conserved hypothetical protein [Aspergillus
  misc_feature (5)..(78): Homolog of NCBI NO: 6320784 NR Description: vacuolar ATPase V1 domain subunit D; Vma8p
  misc_feature (1)..(78): Homolog of NCBI NO: 3929392 NR Description: Vacuolar ATP synthase subunit D (V-ATPase D
  misc_feature (1)..(78): Homolog of NCBI NO: 28829327 NR Description: similar to Homo sapiens (Human). Vacuolar proton
  misc_feature (1)..(78): Homolog of NCBI NO: 2493133 NR Description: Vacuolar ATP synthase subunit D (V-ATPase D
  misc_feature (1)..(78): Homolog of NCBI NO: 25529226 NR Description: H+-transporting two-sector ATPase (EC 3.6.3.14)
  misc_feature (1)..(78): Homolog of NCBI NO: 15231126 NR Description: v-ATPase subunit D (vATPD) [Arabidopsis thaliana]
  misc_feature (1)..(94): Homolog of NCBI NO: 38344879 NR Description: OSJNBa0033G05.3 [Oryza sativa (japonica
MAGQGQRLNVVPTVTTLGTVKARLAGAARGHALLKKKSDALTVQFRAILRRIVSAKDAVGDAMRTASLSLAEALYVAGAPLRPRCAAVRVRPGQAPRARAPGQHRRRPPPALRERRSVACRLCSIAGVARRARRRRAAGVGLPRGVRARAPGAGGAGVAADVVPRAGRVHQDHQPARQRAGERGEAAPGEHHRLHQGRAGRARAGGVLPPQEDPGVQAARARAPEGGRQPLRRGEGRRRGRAQARRFRRHCGEHAGERRQGRGGYHLLSLWSVESYE

SEQ ID NO: 16703 - protein, 215 aa, Zea mays subsp. mays
  peptide (1)..(215): Ceres Seq. ID no. 13499182
  misc_feature (1)..(16): Homolog of NCBI NO: 12585447 NR Description: Vacuolar ATP synthase subunit D (V-ATPase D
  misc_feature (1)..(16): Homolog of NCBI NO: 28278870 NR Description: Similar to ATPase, H+ transporting, lysosomal
  misc_feature (1)..(19): Homolog of NCBI NO: 40746132 NR Description: conserved hypothetical protein [Aspergillus
  misc_feature (1)..(16): Homolog of NCBI NO: 6320784 NR Description: vacuolar ATPase V1 domain subunit D; Vma8p
  misc_feature (1)..(16): Homolog of NCBI NO: 3929392 NR Description: Vacuolar ATP synthase subunit D (V-ATPase D
  misc_feature (1)..(16): Homolog of NCBI NO: 28829327 NR Description: similar to Homo sapiens (Human). Vacuolar proton
  misc_feature (1)..(16): Homolog of NCBI NO: 2493133 NR Description: Vacuolar ATP synthase subunit D (V-ATPase D
  misc_feature (1)..(16): Homolog of NCBI NO: 25529226 NR Description: H+-transporting two-sector ATPase (EC 3.6.3.14)
  misc_feature (1)..(16): Homolog of NCBI NO: 15231126 NR Description: v-ATPase subunit D (vATPD) [Arabidopsis thaliana]
  misc_feature (1)..(32): Homolog of NCBI NO: 38344879 NR Description: OSJNBa0033G05.3 [Oryza sativa (japonica
MRTASLSLAEALYVAGAPLRPRCAAVRVRPGQAPRARAPGQHRRRPPPALRERRSVACRLCSIAGVARRARRRRAAGVGLPRGVRARAPGAGGAGVAADVVPRAGRVHQDHQPARQRAGERGEAAPGEHHRLHQGRAGRARAGGVLPPQEDPGVQAARARAPEGGRQPLRRGEGRRRGRAQARRFRRHCGEHAGERRQGRGGYHLLSLWSVESYE

SEQ ID NO: 16704 - DNA, 1993 bp, Zea mays subsp. mays; identical to SEQ ID NO: 16084
  misc_feature (1)..(1993): Ceres Seq. ID no. 13492718
  misc_feature: MA Experiment ID: 108533 Result: Up-regulated in Transcription
  misc_feature: MA Experiment 108533 PARAMETER Experiment Name: Zm_4deg_Cold_P Parameter: Age (hr) Value: 8
  misc_feature: MA Experiment 108533 PARAMETER Experiment Name: Zm_4deg_Cold_P Parameter: Organism Value: Zea mays
  misc_feature: MA Experiment 108533 PARAMETER Experiment Name: Zm_4deg_Cold_P Parameter: Plant Line Value: 35A19
  misc_feature: MA Experiment 108533 PARAMETER Experiment Name: Zm_4deg_Cold_P Parameter: Temperature (deg C) Value: 4 vs. 22
  misc_feature: MA Experiment 108533 PARAMETER Experiment Name: Zm_4deg_Cold_P Parameter: Timepoint (hr) Value: 1
  misc_feature: MA Experiment 108533 PARAMETER Experiment Name: Zm_4deg_Cold_P Parameter: Tissue Value: Aerial
  misc_feature: MA Experiment ID: 108543 Result: Up-regulated in Transcription
  misc_feature: MA Experiment ID: 108544 Result: Down-regulated in Transcription
  misc_feature: MA Experiment ID: 108689 Result: Down-regulated in Transcription
  misc_feature: MA Experiment 108689 PARAMETER Experiment Name: Zm_Drought_Roots_P Parameter: Age (day) Value: 9
  misc_feature: MA Experiment 108689 PARAMETER Experiment Name: Zm_Drought_Roots_P Parameter: Organism Value: Zea mays
  misc_feature: MA Experiment 108689 PARAMETER Experiment Name: Zm_Drought_Roots_P Parameter: Plant Line Value: 35A19
  misc_feature: MA Experiment 108689 PARAMETER Experiment Name: Zm_Drought_Roots_P Parameter: Timepoint (hr) Value: 24
  misc_feature: MA Experiment 108689 PARAMETER Experiment Name: Zm_Drought_Roots_P Parameter: Tissue Value: Roots
  misc_feature: MA Experiment 108689 PARAMETER Experiment Name: Zm_Drought_Roots_P Parameter: Treatment Value: Drought vs. No Drought
  misc_feature: MA Experiment ID: 20000478 Result: Down-regulated in Transcription
  misc_feature: MA Experiment 20000478 PARAMETER Experiment Name: Zm_5mM_SA_P Parameter: Age (day) Value: 11
  misc_feature: MA Experiment 20000478 PARAMETER Experiment Name: Zm_5mM_SA_P Parameter: Organism Value: Zea mays
  misc_feature: MA Experiment 20000478 PARAMETER Experiment Name: Zm_5mM_SA_P Parameter: Plant Line Value: 35A19
  misc_feature: MA Experiment 20000478 PARAMETER Experiment Name: Zm_5mM_SA_P Parameter: Timepoint (hr) Value: 72
  misc_feature: MA Experiment 20000478 PARAMETER Experiment Name: Zm_5mM_SA_P Parameter: Tissue Value: Aerial
  misc_feature: MA Experiment 20000478 PARAMETER Experiment Name: Zm_5mM_SA_P Parameter: Treatment Value: 5mM SA vs. No Treatment
  misc_feature: MA Experiment ID: 20000479 Result: Down-regulated in Transcription
  misc_feature: MA Experiment 20000479 PARAMETER Experiment Name: Zm_Drought_P Parameter: Age (day) Value: 10
  misc_feature: MA Experiment 20000479 PARAMETER Experiment Name: Zm_Drought_P Parameter: Organism Value: Zea mays
  misc_feature: MA Experiment 20000479 PARAMETER Experiment Name: Zm_Drought_P Parameter: Plant Line Value: 35A19
  misc_feature: MA Experiment 20000479 PARAMETER Experiment Name: Zm_Drought_P Parameter: Timepoint (hr) Value: 48
  misc_feature: MA Experiment 20000479 PARAMETER Experiment Name: Zm_Drought_P Parameter: Tissue Value: Aerial
  misc_feature: MA Experiment 20000479 PARAMETER Experiment Name: Zm_Drought_P Parameter: Treatment Value: Drought vs. No Drought
  misc_feature: MA Experiment ID: 20000480 Result: Down-regulated in Transcription
  misc_feature: MA Experiment 20000480 PARAMETER Experiment Name: Zm_Drought_P Parameter: Age (day) Value: 11
  misc_feature: MA Experiment 20000480 PARAMETER Experiment Name: Zm_Drought_P Parameter: Organism Value: Zea mays
  misc_feature: MA Experiment 20000480 PARAMETER Experiment Name: Zm_Drought_P Parameter: Plant Line Value: 35A19
  misc_feature: MA Experiment 20000480 PARAMETER Experiment Name: Zm_Drought_P Parameter: Timepoint (hr) Value: 72
  misc_feature: MA Experiment 20000480 PARAMETER Experiment Name: Zm_Drought_P Parameter: Tissue Value: Aerial
  misc_feature: MA Experiment 20000480 PARAMETER Experiment Name: Zm_Drought_P Parameter: Treatment Value: Drought vs. No Drought
  misc_feature: MA Experiment ID: 20000626 Result: Down-regulated in Transcription
  misc_feature: MA Experiment 20000626 PARAMETER Experiment Name: Zm_Herbicide-Treatments_P Parameter: Timepoint (hr) Value: 12
  misc_feature: MA Experiment 20000626 PARAMETER Experiment Name: Zm_Herbicide-Treatments_P Parameter: Tissue Value: Aerial
  misc_feature: MA Experiment 20000626 PARAMETER Experiment Name: Zm_Herbicide-Treatments_P Parameter: Treatment Value: Roundup vs. No Treatment

SEQ ID NO: 16705 - protein, 444 aa, Zea mays subsp. mays; identical to SEQ ID NO: 16085
  peptide (1)..(444): Ceres Seq. ID no. 15222889
  misc_feature (47)..(295): Pfam Name: Protein phosphatase 2C Pfam Description: Protein phosphatase 2C
  misc_feature (47)..(295): Pfam Name: Protein phosphatase 2C Pfam Description: Protein phosphatase 2C
  misc_feature (37)..(432): Homolog of NCBI NO: 34914644 NR Description: OSJNBa0054L14.21 [Oryza sativa (japonica
  misc_feature (1)..(435): Homolog of NCBI NO: 15217454 NR Description: protein phosphatase 2C (PP2C) -related
  misc_feature (33)..(438): Homolog of NCBI NO: 34394411 NR Description: protein phosphatase 2C-like
  misc_feature (3)..(432): Homolog of NCBI NO: 15221404 NR Description: protein phosphatase 2C (PP2C) -related
  misc_feature (1)..(365): Homolog of NCBI NO: 16930415 NR Description: At1g09160/T12M4_13 [Arabidopsis thaliana]
  misc_feature (1)..(365): Homolog of NCBI NO: 16930415 NR Description: At1g09160/T12M4_13 [Arabidopsis thaliana]
  misc_feature (37)..(432): Homolog of NCBI NO: 34914644 NR Description: OSJNBa0054L14.21 [Oryza sativa (japonica
  misc_feature (33)..(438): Homolog of NCBI NO: 34394411 NR Description: protein phosphatase 2C-like
  misc_feature (1)..(444): Homolog of NCBI NO: 38344839 NR Description: OSJNBa0064H22.20 [Oryza sativa (japonica
  misc_feature (14)..(440): Homolog of NCBI NO: 18401703 NR Description: protein phosphatase 2C (PP2C) -related
  misc_feature (14)..(440): Homolog of NCBI NO: 15292869 NR Description: unknown protein [Arabidopsis thaliana]
  misc_feature (7)..(431): Homolog of NCBI NO: 14029015 NR Description: Unknown protein [Oryza sativa]
  misc_feature (3)..(432): Homolog of NCBI NO: 15221404 NR Description: protein phosphatase 2C (PP2C) -related
  misc_feature (1)..(435): Homolog of NCBI NO: 15217454 NR Description: protein phosphatase 2C (PP2C) -related
  misc_feature (33)..(366): Homolog of NCBI NO: 34898168 NR Description: protein phosphatase 2C-like
  misc_feature (33)..(366): Homolog of NCBI NO: 34898168 NR Description: protein phosphatase 2C-like
  misc_feature (7)..(431): Homolog of NCBI NO: 14029015 NR Description: Unknown protein [Oryza sativa]
  misc_feature (14)..(440): Homolog of NCBI NO: 15292869 NR Description: unknown protein [Arabidopsis thaliana]
  misc_feature (14)..(440): Homolog of NCBI NO: 18401703 NR Description: protein phosphatase 2C (PP2C) -related
  misc_feature (1)..(444): Homolog of NCBI NO: 38344839 NR Description: OSJNBa0064H22.20 [Oryza sativa (japonica
  misc_feature (44)..(44): Xaa is any aa, unknown or other
  misc_feature (86)..(86): Xaa is any aa, unknown or other
  misc_feature (87)..(87): Xaa is any aa, unknown or other

SEQ ID NO: 16706 - DNA, 1921 bp, Zea mays subsp. mays; identical to SEQ ID NO: 11243
  misc_feature (1)..(1921): Ceres Seq. ID no. 12414468
  misc_feature: MA Experiment ID: 108504 Result: Up-regulated in Transcription
  misc_feature: MA Experiment 108504 PARAMETER Experiment Name: Zm_Drought_P Parameter: Age (day) Value: 8
  misc_feature: MA Experiment 108504 PARAMETER Experiment Name: Zm_Drought_P Parameter: Organism Value: Zea mays
  misc_feature: MA Experiment 108504 PARAMETER Experiment Name: Zm_Drought_P Parameter: Plant Line Value: 35A19
  misc_feature: MA Experiment 108504 PARAMETER Experiment Name: Zm_Drought_P Parameter: Timepoint (hr) Value: 12
  misc_feature: MA Experiment 108504 PARAMETER Experiment Name: Zm_Drought_P Parameter: Tissue Value: Aerial
  misc_feature: MA Experiment 108504 PARAMETER Experiment Name: Zm_Drought_P Parameter: Treatment Value: Drought vs. No Drought
  misc_feature: MA Experiment ID: 20000480 Result: Up-regulated in Transcription
  misc_feature: MA Experiment 20000480 PARAMETER Experiment Name: Zm_Drought_P Parameter: Age (day) Value: 11
  misc_feature: MA Experiment 20000480 PARAMETER Experiment Name: Zm_Drought_P Parameter: Organism Value: Zea mays
  misc_feature: MA Experiment 20000480 PARAMETER Experiment Name: Zm_Drought_P Parameter: Plant Line Value: 35A19
  misc_feature: MA Experiment 20000480 PARAMETER Experiment Name: Zm_Drought_P Parameter: Timepoint (hr) Value: 72
  misc_feature: MA Experiment 20000480 PARAMETER Experiment Name: Zm_Drought_P Parameter: Tissue Value: Aerial
  misc_feature: MA Experiment 20000480 PARAMETER Experiment Name: Zm_Drought_P Parameter: Treatment Value: Drought vs. No Drought

SEQ ID NO: 16707 - protein, 504 aa, Zea mays subsp. mays; identical to SEQ ID NO: 11244
  peptide (1)..(504): Ceres Seq. ID no. 12414469
  misc_feature (209)..(407): Pfam Name: Dehydrin Pfam Description: Dehydrin
  misc_feature (127)..(479): Homolog of NCBI NO: 24417262 NR Description: unknown [Arabidopsis thaliana]
  misc_feature (127)..(479): Homolog of NCBI NO: 9758332 NR Description: gene_id:MIJ24.6~ref|NP_013897.1~similar to protein [Arabidopsis thaliana] >gi|16604364|gb|AAL24188.1| [Arabidopsis thaliana] >gi|23308191|gb|AAN18065.1|
  misc_feature (201)..(455): Homolog of NCBI NO: 10954048 NR Description: ovarian fibroin-like substance-1 [Cyprinus carpio]
  misc_feature (162)..(455): Homolog of NCBI NO: 10954048 NR Description: ovarian fibroin-like substance-1 [Cyprinus carpio]
  misc_feature (161)..(483): Homolog of NCBI NO: 161050 NR Description: p48 eggshell protein
  misc_feature (217)..(459): Homolog of NCBI NO: 27881721 NR Description: Unknown (protein for MGC:52724) [Xenopus laevis]
  misc_feature (206)..(458): Homolog of NCBI NO: 37534924 NR Description: putative glycine-rich protein [Oryza sativa
  misc_feature (192)..(468): Homolog of NCBI NO: 26252108 NR Description: Similar to pigpen [Mus musculus]
  misc_feature (166)..(468): Homolog of NCBI NO: 27820115 NR Description: AT02511p [Drosophila melanogaster]
  misc_feature (166)..(464): Homolog of NCBI NO: 24654243 NR Description: CG15920-PA [Drosophila melanogaster]

SEQ ID NO: 16708 - protein, 470 aa, Zea mays subsp. mays; identical to SEQ ID NO: 11245
  peptide (1)..(470): Ceres Seq. ID no. 12414470
  misc_feature (175)..(373): Pfam Name: Dehydrin Pfam Description: Dehydrin
  misc_feature (93)..(445): Homolog of NCBI NO: 24417262 NR Description: unknown [Arabidopsis thaliana]
  misc_feature (93)..(445): Homolog of NCBI NO: 9758332 NR Description: gene_id:MIJ24.6~ref|NP_013897.1~similar to protein [Arabidopsis thaliana] >gi|16604364|gb|AAL24188.1| [Arabidopsis thaliana] >gi|23308191|gb|AAN18065.1|
  misc_feature (167)..(421): Homolog of NCBI NO: 10954048 NR Description: ovarian fibroin-like substance-1 [Cyprinus carpio]
  misc_feature (128)..(421): Homolog of NCBI NO: 10954048 NR Description: ovarian fibroin-like substance-1 [Cyprinus carpio]
  misc_feature (127)..(449): Homolog of NCBI NO: 161050 NR Description: p48 eggshell protein
  misc_feature (183)..(425): Homolog of NCBI NO: 27881721 NR Description: Unknown (protein for MGC:52724) [Xenopus laevis]
  misc_feature (172)..(424): Homolog of NCBI NO: 37534924 NR Description: putative glycine-rich protein [Oryza sativa
  misc_feature (158)..(434): Homolog of NCBI NO: 26252108 NR Description: Similar to pigpen [Mus musculus]
  misc_feature (132)..(434): Homolog of NCBI NO: 27820115 NR Description: AT02511p [Drosophila melanogaster]
  misc_feature (132)..(430): Homolog of NCBI NO: 24654243 NR Description: CG15920-PA [Drosophila melanogaster]

SEQ ID NO: 16709 - protein, 393 aa, Zea mays subsp. mays; identical to SEQ ID NO: 11246
  peptide (1)..(393): Ceres Seq. ID no. 12414471
  misc_feature (98)..(296): Pfam Name: Dehydrin Pfam Description: Dehydrin
  misc_feature (16)..(368): Homolog of NCBI NO: 24417262 NR Description: unknown [Arabidopsis thaliana]
  misc_feature (16)..(368): Homolog of NCBI NO: 9758332 NR Description: gene_id:MIJ24.6~ref|NP_013897.1~similar to protein [Arabidopsis thaliana] >gi|16604364|gb|AAL24188.1| [Arabidopsis thaliana] >gi|23308191|gb|AAN18065.1|
  misc_feature (90)..(344): Homolog of NCBI NO: 10954048 NR Description: ovarian fibroin-like substance-1 [Cyprinus carpio]
  misc_feature (51)..(344): Homolog of NCBI NO: 10954048 NR Description: ovarian fibroin-like substance-1 [Cyprinus carpio]
  misc_feature (50)..(372): Homolog of NCBI NO: 161050 NR Description: p48 eggshell protein
  misc_feature (106)..(348): Homolog of NCBI NO: 27881721 NR Description: Unknown (protein for MGC:52724) [Xenopus laevis]
  misc_feature (95)..(347): Homolog of NCBI NO: 37534924 NR Description: putative glycine-rich protein [Oryza sativa
  misc_feature (81)..(357): Homolog of NCBI NO: 26252108 NR Description: Similar to pigpen [Mus musculus]
  misc_feature (55)..(357): Homolog of NCBI NO: 27820115 NR Description: AT02511p [Drosophila melanogaster]
  misc_feature (55)..(353): Homolog of NCBI NO: 24654243 NR Description: CG15920-PA [Drosophila melanogaster]

SEQ ID NO: 16710 - DNA, 1324 bp, Zea mays subsp. mays
  misc_feature (1)..(1324): Ceres Seq. ID no. 12369302
  misc_feature: MA Experiment ID: 108503 Result: Down-regulated in Transcription
  misc_feature: MA Experiment 108503 PARAMETER Experiment Name: Zm_Drought_P Parameter: Age (day) Value: 8
  misc_feature: MA Experiment 108503 PARAMETER Experiment Name: Zm_Drought_P Parameter: Organism Value: Zea mays
  misc_feature: MA Experiment 108503 PARAMETER Experiment Name: Zm_Drought_P Parameter: Plant Line Value: 35A19
  misc_feature: MA Experiment 108503 PARAMETER Experiment Name: Zm_Drought_P Parameter: Timepoint (hr) Value: 6
  misc_feature: MA Experiment 108503 PARAMETER Experiment Name: Zm_Drought_P Parameter: Tissue Value: Aerial
  misc_feature: MA Experiment 108503 PARAMETER Experiment Name: Zm_Drought_P Parameter: Treatment Value: Drought vs. No Drought
  misc_feature: MA Experiment ID: 108504 Result: Down-regulated in Transcription
  misc_feature: MA Experiment 108504 PARAMETER Experiment Name: Zm_Drought_P Parameter: Age (day) Value: 8
  misc_feature: MA Experiment 108504 PARAMETER Experiment Name: Zm_Drought_P Parameter: Organism Value: Zea mays
  misc_feature: MA Experiment 108504 PARAMETER Experiment Name: Zm_Drought_P Parameter: Plant Line Value: 35A19
  misc_feature: MA Experiment 108504 PARAMETER Experiment Name: Zm_Drought_P Parameter: Timepoint (hr) Value: 12
  misc_feature: MA Experiment 108504 PARAMETER Experiment Name: Zm_Drought_P Parameter: Tissue Value: Aerial
  misc_feature: MA Experiment 108504 PARAMETER Experiment Name: Zm_Drought_P Parameter: Treatment Value: Drought vs. No Drought
  misc_feature: MA Experiment ID: 108513 Result: Down-regulated in Transcription
  misc_feature: MA Experiment 108513 PARAMETER Experiment Name: Zm_100uM_ABA_P Parameter: Age (day) Value: 8
  misc_feature: MA Experiment 108513 PARAMETER Experiment Name: Zm_100uM_ABA_P Parameter: Organism Value: Zea mays
  misc_feature: MA Experiment 108513 PARAMETER Experiment Name: Zm_100uM_ABA_P Parameter: Plant Line Value: 35A19
  misc_feature: MA Experiment 108513 PARAMETER Experiment Name: Zm_100uM_ABA_P Parameter: Timepoint (hr) Value: 6
  misc_feature: MA Experiment 108513 PARAMETER Experiment Name: Zm_100uM_ABA_P Parameter: Tissue Value: Aerial
  misc_feature: MA Experiment 108513 PARAMETER Experiment Name: Zm_100uM_ABA_P Parameter: Treatment Value: 100uM ABA vs. No Treatment
  misc_feature: MA Experiment ID: 108522 Result: Down-regulated in Transcription
  misc_feature: MA Experiment 108522 PARAMETER Experiment Name: Zm_42deg_Heat_P Parameter: Age (day) Value: 8
  misc_feature: MA Experiment 108522 PARAMETER Experiment Name: Zm_42deg_Heat_P Parameter: Organism Value: Zea mays
  misc_feature: MA Experiment 108522 PARAMETER Experiment Name: Zm_42deg_Heat_P Parameter: Plant Line Value: 35A19
  misc_feature: MA Experiment 108522 PARAMETER Experiment Name: Zm_42deg_Heat_P Parameter: Temperature (deg C) Value: 42 vs. 22
  misc_feature: MA Experiment 108522 PARAMETER Experiment Name: Zm_42deg_Heat_P Parameter: Timepoint (hr) Value: 1
  misc_feature: MA Experiment 108522 PARAMETER Experiment Name: Zm_42deg_Heat_P Parameter: Tissue Value: Aerial
  misc_feature: MA Experiment ID: 108523 Result: Down-regulated in Transcription
  misc_feature: MA Experiment 108523 PARAMETER Experiment Name: Zm_42deg_Heat_P Parameter: Age (day) Value: 8
  misc_feature: MA Experiment 108523 PARAMETER Experiment Name: Zm_42deg_Heat_P Parameter: Organism Value: Zea mays
  misc_feature: MA Experiment 108523 PARAMETER Experiment Name: Zm_42deg_Heat_P Parameter: Plant Line Value: 35A19
  misc_feature: MA Experiment 108523 PARAMETER Experiment Name: Zm_42deg_Heat_P Parameter: Temperature (deg C) Value: 42 vs. 22
  misc_feature: MA Experiment 108523 PARAMETER Experiment Name: Zm_42deg_Heat_P Parameter: Timepoint (hr) Value: 6
  misc_feature: MA Experiment 108523 PARAMETER Experiment Name: Zm_42deg_Heat_P Parameter: Tissue Value: Aerial
  misc_feature: MA Experiment ID: 108526 Result: Up-regulated in Transcription
  misc_feature: MA Experiment 108526 PARAMETER Experiment Name: Zm_5mM_NO_P Parameter: Age (day) Value: 8
  misc_feature: MA Experiment 108526 PARAMETER Experiment Name: Zm_5mM_NO_P Parameter: Organism Value: Zea mays
  misc_feature: MA Experiment 108526 PARAMETER Experiment Name: Zm_5mM_NO_P Parameter: Plant Line Value: 35A19
  misc_feature: MA Experiment 108526 PARAMETER Experiment Name: Zm_5mM_NO_P Parameter: Timepoint (hr) Value: 1
  misc_feature: MA Experiment 108526 PARAMETER Experiment Name: Zm_5mM_NO_P Parameter: Tissue Value: Aerial
  misc_feature: MA Experiment 108526 PARAMETER Experiment Name: Zm_5mM_NO_P Parameter: Treatment Value: 5mM NO vs. No Treatment
  misc_feature: MA Experiment ID: 108528 Result: Down-regulated in Transcription
  misc_feature: MA Experiment 108528 PARAMETER Experiment Name: Zm_Imbibed_Seeds_P Parameter: Age (day) Value: 5 vs. 2
  misc_feature: MA Experiment 108528 PARAMETER Experiment Name: Zm_Imbibed_Seeds_P Parameter: Organism Value: Zea mays
  misc_feature: MA Experiment 108528 PARAMETER Experiment Name: Zm_Imbibed_Seeds_P Parameter: Plant Line Value: 35A19
  misc_feature: MA Experiment 108528 PARAMETER Experiment Name: Zm_Imbibed_Seeds_P Parameter: Tissue Value: Aerial vs. Embryo
  misc_feature: MA Experiment ID: 108529 Result: Up-regulated in Transcription
  misc_feature: MA Experiment 108529 PARAMETER Experiment Name: Zm_Imbibed_Seeds_P Parameter: Age (day) Value: 5 vs. 2
  misc_feature: MA Experiment 108529 PARAMETER Experiment Name: Zm_Imbibed_Seeds_P Parameter: Organism Value: Zea mays
  misc_feature: MA Experiment 108529 PARAMETER Experiment Name: Zm_Imbibed_Seeds_P Parameter: Plant Line Value: 35A19
  misc_feature: MA Experiment 108529 PARAMETER Experiment Name: Zm_Imbibed_Seeds_P Parameter: Tissue Value: Roots vs. Embryo
  misc_feature: MA Experiment ID: 108534 Result: Down-regulated in Transcription
  misc_feature: MA Experiment 108534 PARAMETER Experiment Name: Zm_4deg_Cold_P Parameter: Age (hr) Value: 8
  misc_feature: MA Experiment 108534 PARAMETER Experiment Name: Zm_4deg_Cold_P Parameter: Organism Value: Zea mays
  misc_feature: MA Experiment 108534 PARAMETER Experiment Name: Zm_4deg_Cold_P Parameter: Plant Line Value: 35A19
  misc_feature: MA Experiment 108534 PARAMETER Experiment Name: Zm_4deg_Cold_P Parameter: Temperature (deg C) Value: 4 vs. 22
  misc_feature: MA Experiment 108534 PARAMETER Experiment Name: Zm_4deg_Cold_P Parameter: Timepoint (hr) Value: 6
  misc_feature: MA Experiment 108534 PARAMETER Experiment Name: Zm_4deg_Cold_P Parameter: Tissue Value: Aerial
  misc_feature: MA Experiment ID: 108535 Result: Down-regulated in Transcription
  misc_feature: MA Experiment 108535 PARAMETER Experiment Name: Zm_Meristem_P Parameter: Age (day) Value: 8
  misc_feature: MA Experiment 108535 PARAMETER Experiment Name: Zm_Meristem_P Parameter: Organism Value: Zea mays
  misc_feature: MA Experiment 108535 PARAMETER Experiment Name: Zm_Meristem_P Parameter: Plant Line Value: 35A19
  misc_feature: MA Experiment 108535 PARAMETER Experiment Name: Zm_Meristem_P Parameter: Tissue Value: Root Meristem vs. Above Root Meristem
  misc_feature: MA Experiment ID: 108536 Result: Up-regulated in Transcription
  misc_feature: MA Experiment 108536 PARAMETER Experiment Name: Zm_Meristem_P Parameter: Age (day) Value: 8
  misc_feature: MA Experiment 108536 PARAMETER Experiment Name: Zm_Meristem_P Parameter: Organism Value: Zea mays
  misc_feature: MA Experiment 108536 PARAMETER Experiment Name: Zm_Meristem_P Parameter: Plant Line Value: 35A19
  misc_feature: MA Experiment 108536 PARAMETER Experiment Name: Zm_Meristem_P Parameter: Tissue Value: Shoot Meristem vs. Above Shoot Meristem
  misc_feature: MA Experiment ID: 108540 Result: Down-regulated in Transcription
  misc_feature: MA Experiment 108540 PARAMETER Experiment Name: Zm_20percent_PEG_P Parameter: Age (day) Value: 8
  misc_feature: MA Experiment 108540 PARAMETER Experiment Name: Zm_20percent_PEG_P Parameter: Organism Value: Zea mays
  misc_feature: MA Experiment 108540 PARAMETER Experiment Name: Zm_20percent_PEG_P Parameter: Plant Line Value: 35A19
  misc_feature: MA Experiment 108540 PARAMETER Experiment Name: Zm_20percent_PEG_P Parameter: Timepoint (hr) Value: 6
  misc_feature: MA Experiment 108540 PARAMETER Experiment Name: Zm_20percent_PEG_P Parameter: Tissue Value: Aerial
  misc_feature: MA Experiment 108540 PARAMETER Experiment Name: Zm_20percent_PEG_P Parameter: Treatment Value: 20percent PEG vs. No Treatment
  misc_feature: MA Experiment ID: 108542 Result: Down-regulated in Transcription
  misc_feature: MA Experiment 108542 PARAMETER Experiment Name: Zm_150mM_NaCl_P Parameter: Age (day) Value: 8
  misc_feature: MA Experiment 108542 PARAMETER Experiment Name: Zm_150mM_NaCl_P Parameter: Organism Value: Zea mays
  misc_feature: MA Experiment 108542 PARAMETER Experiment Name: Zm_150mM_NaCl_P Parameter: Plant Line Value: 35A19
  misc_feature: MA Experiment 108542 PARAMETER Experiment Name: Zm_150mM_NaCl_P Parameter: Timepoint (hr) Value: 6
  misc_feature: MA Experiment 108542 PARAMETER Experiment Name: Zm_150mM_NaCl_P Parameter: Tissue Value: Aerial
  misc_feature: MA Experiment 108542 PARAMETER Experiment Name: Zm_150mM_NaCl_P Parameter: Treatment Value: 150mM NaCl vs. No Treatment
  misc_feature: MA Experiment ID: 108543 Result: Up-regulated in Transcription
  misc_feature: MA Experiment ID: 108544 Result: Up-regulated in Transcription
  misc_feature: MA Experiment ID: 108546 Result: Up-regulated in Transcription
  misc_feature: MA Experiment 108546 PARAMETER Experiment Name: Zm_Imbibed_Seeds_P Parameter: Age (day) Value: 3 vs. 2
  misc_feature: MA Experiment 108546 PARAMETER Experiment Name: Zm_Imbibed_Seeds_P Parameter: Organism Value: Zea mays
  misc_feature: MA Experiment 108546 PARAMETER Experiment Name: Zm_Imbibed_Seeds_P Parameter: Plant Line Value: 35A19
  misc_feature: MA Experiment 108546 PARAMETER Experiment Name: Zm_Imbibed_Seeds_P Parameter: Tissue Value: Roots vs. Embryo
  misc_feature: MA Experiment ID: 108556 Result: Down-regulated in Transcription
  misc_feature: MA Experiment 108556 PARAMETER Experiment Name: Zm_Drought_P Parameter: Age (day) Value: 9
  misc_feature: MA Experiment 108556 PARAMETER Experiment Name: Zm_Drought_P Parameter: Organism Value: Zea mays
  misc_feature: MA Experiment 108556 PARAMETER Experiment Name: Zm_Drought_P Parameter: Plant Line Value: 35A19
  misc_feature: MA Experiment 108556 PARAMETER Experiment Name: Zm_Drought_P Parameter: Timepoint (hr) Value: 24
  misc_feature: MA Experiment 108556 PARAMETER Experiment Name: Zm_Drought_P Parameter: Tissue Value: Aerial
  misc_feature: MA Experiment 108556 PARAMETER Experiment Name: Zm_Drought_P Parameter: Treatment Value: Drought vs. No Drought
  misc_feature: MA Experiment ID: 108597 Result: Down-regulated in Transcription
  misc_feature: MA Experiment 108597 PARAMETER Experiment Name: Zm_100uM_ABA_P Parameter: Age (day) Value: 9
  misc_feature: MA Experiment 108597 PARAMETER Experiment Name: Zm_100uM_ABA_P Parameter: Organism Value: Zea mays
  misc_feature: MA Experiment 108597 PARAMETER Experiment Name: Zm_100uM_ABA_P Parameter: Plant Line Value: 35A19
  misc_feature: MA Experiment 108597 PARAMETER Experiment Name: Zm_100uM_ABA_P Parameter: Timepoint (hr) Value: 24
  misc_feature: MA Experiment 108597 PARAMETER Experiment Name: Zm_100uM_ABA_P Parameter: Tissue Value: Aerial
  misc_feature: MA Experiment 108597 PARAMETER Experiment Name: Zm_100uM_ABA_P Parameter: Treatment Value: 100uM ABA vs. No Treatment
  misc_feature: MA Experiment ID: 20000477 Result: Down-regulated in Transcription
  misc_feature: MA Experiment 20000477 PARAMETER Experiment Name: Zm_5mM_SA_P Parameter: Age (day) Value: 10
  misc_feature: MA Experiment 20000477 PARAMETER Experiment Name: Zm_5mM_SA_P Parameter: Organism Value: Zea mays
  misc_feature: MA Experiment 20000477 PARAMETER Experiment Name: Zm_5mM_SA_P Parameter: Plant Line Value: 35A19
  misc_feature: MA Experiment 20000477 PARAMETER Experiment Name: Zm_5mM_SA_P Parameter: Timepoint (hr) Value: 48
  misc_feature: MA Experiment 20000477 PARAMETER Experiment Name: Zm_5mM_SA_P Parameter: Tissue Value: Aerial
  misc_feature: MA Experiment 20000477 PARAMETER Experiment Name: Zm_5mM_SA_P Parameter: Treatment Value: 5mM SA vs. No Treatment
  misc_feature: MA Experiment ID: 20000492 Result: Up-regulated in Transcription
  misc_feature: MA Experiment 20000492 PARAMETER Experiment Name: Zm_Hybrid_Seed_Dev_P Parameter: DAP Value: 12
  misc_feature: MA Experiment 20000492 PARAMETER Experiment Name: Zm_Hybrid_Seed_Dev_P Parameter: Organism Value: Zea mays
  misc_feature: MA Experiment 20000492 PARAMETER Experiment Name: Zm_Hybrid_Seed_Dev_P Parameter: Plant Line Value: 35A19
  misc_feature: MA Experiment 20000492 PARAMETER Experiment Name: Zm_Hybrid_Seed_Dev_P Parameter: Tissue Value: Fert Kernel vs. Unfert Floret
  misc_feature: MA Experiment ID: 20000626 Result: Up-regulated in Transcription
  misc_feature: MA Experiment 20000626 PARAMETER Experiment Name: Zm_Herbicide-Treatments_P Parameter: Timepoint (hr) Value: 12
  misc_feature: MA Experiment 20000626 PARAMETER Experiment Name: Zm_Herbicide-Treatments_P Parameter: Tissue Value: Aerial
  misc_feature: MA Experiment 20000626 PARAMETER Experiment Name: Zm_Herbicide-Treatments_P Parameter: Treatment Value: Roundup vs. No Treatment
  misc_feature: MA Experiment ID: 20000629 Result: Up-regulated in Transcription
  misc_feature: MA Experiment 20000629 PARAMETER Experiment Name: Zm_Herbicide-Treatments_P Parameter: Timepoint (hr) Value: 12
  misc_feature: MA Experiment 20000629 PARAMETER Experiment Name: Zm_Herbicide-Treatments_P Parameter: Tissue Value: Aerial
  misc_feature: MA Experiment 20000629 PARAMETER Experiment Name: Zm_Herbicide-Treatments_P Parameter: Treatment Value: Trimec vs. No Treatment
  misc_feature: MA Experiment ID: 20001605 Result: Up-regulated in Transcription
  misc_feature: MA Experiment 20001605 PARAMETER Experiment Name: Zm_50ppm_KNO3_L-to-H_P Parameter: Age (day) Value: 19
  misc_feature: MA Experiment 20001605 PARAMETER Experiment Name: Zm_50ppm_KNO3_L-to-H_P Parameter: Organism Value: Zea mays
  misc_feature: MA Experiment 20001605 PARAMETER Experiment Name: Zm_50ppm_KNO3_L-to-H_P Parameter: Plant Line Value: 35A19
  misc_feature: MA Experiment 20001605 PARAMETER Experiment Name: Zm_50ppm_KNO3_L-to-H_P Parameter: Timepoint (hr) Value: 4
  misc_feature: MA Experiment 20001605 PARAMETER Experiment Name: Zm_50ppm_KNO3_L-to-H_P Parameter: Tissue Value: Shoots
  misc_feature: MA Experiment 20001605 PARAMETER Experiment Name: Zm_50ppm_KNO3_L-to-H_P Parameter: Treatment Value: 50ppm KNO3 vs. 50ppm KCl
  misc_feature: MA Experiment ID: 20001608 Result: Down-regulated in Transcription
  misc_feature: MA Experiment 20001608 PARAMETER Experiment Name: Zm_50ppm_KNO3_L-to-H_P Parameter: Age (day) Value: 21
  misc_feature: MA Experiment 20001608 PARAMETER Experiment Name: Zm_50ppm_KNO3_L-to-H_P Parameter: Organism Value: Zea mays
  misc_feature: MA Experiment 20001608 PARAMETER Experiment Name: Zm_50ppm_KNO3_L-to-H_P Parameter: Plant Line Value: 35A19
  misc_feature: MA Experiment 20001608 PARAMETER Experiment Name: Zm_50ppm_KNO3_L-to-H_P Parameter: Timepoint (hr) Value: 48
  misc_feature: MA Experiment 20001608 PARAMETER Experiment Name: Zm_50ppm_KNO3_L-to-H_P Parameter: Tissue Value: Shoots
  misc_feature: MA Experiment 20001608 PARAMETER Experiment Name: Zm_50ppm_KNO3_L-to-H_P Parameter: Treatment Value: 50ppm KNO3 vs. 50ppm KCl
attggtatcaagaaaaacttgtcgaaaaatacacagggcacaatgtgcggaggcgccatcctcgcggagctgatcccgccgacgcggcgcgtggcgtcgaagccggtgacagaaggccacctctggtcggcgagctccaagaaagccggcagcggcagggacaagaggcaccagcacgaatacgccgacgatgacttcgaggccgccttcgaggacttcgacgacgactttgacgtgcatgaagacgacgaggacggccacttcgtattctcgtccaaatccgccttgtccccagccctgcacgacgggcgcgcggcgagccagaagaagcagcgcgggcgccagttccgcggcatccggcagcggccctggggcaagtgggcggcggagatccgcgacccgcacaagggcacccgcgtctggctcggcaccttcagcaccgccgaggacgccgcccgggcctacgacgtggaggcgcgccgcctccgcggcagcaaggccaaggtcaacttccccgcagccagcggtcgcgctcgcggtcgcgcgcgcccacgccgcggcgacgacggcaacccacgaaccgcgccggaaacgcagcacccagcacagcccgctctgctgcctcgaggagagagagagacgcagaggaaggaagggatcgccgccgtgaagccagaagctacggagtcgttcgacgtgggcggcggtctcttcttcgacatggccttccccaccttcccagcctcgccgccgccgcaggccgtggatacgtccttcgccggcagcaccgccacgtcggagaccgggagccccgcgaagaggccgagatgcgacgaagactcgtccgagggcggcagcggctccgcgctggagctcgctgacgagctggcgttcgacccgtttgtgctgctgcagatgccctactcgggtgggtacgacgacgactcactggacggccttttcgccgcagatgaggccgtgcagcaggacgtgggcaacggcatggacggcgtccgcctgtggagcttcgacgagttccccgccgtcgacggttctgttttctgacgtttgcttactacgtactactactattttctgcctggtggaatcatatgtgatagtgctgcatgtgtctgcctgatcgtcagattgtactccactctggatatttgtgctacgtactcgtctggtatttcctactgtgggtcaatggttcctatgaatttgttcacgtcggcgaaactctgtattgtacggtcgtgattgatgtgccaaattaaataagcctgtgaacctggttctatgtatatatggtatcttgatt

SEQ ID NO: 16711 - protein, 354 aa, Zea mays subsp. mays
  peptide (1)..(354): Ceres Seq. ID no. 12369303
  misc_feature (113)..(173): Pfam Name: AP2 domain Pfam Description: AP2 domain
  misc_feature (15)..(264): Homolog of NCBI NO: 37538128 NR Description: JERF3 [Lycopersicon esculentum]
  misc_feature (15)..(204): Homolog of NCBI NO: 22074046 NR Description: transcription factor JERF1 [Lycopersicon
  misc_feature (15)..(172): Homolog of NCBI NO: 24940524 NR Description: ethylene response element binding protein
  misc_feature (15)..(346): Homolog of NCBI NO: 15217289 NR Description: Putative AP2 domain containing transcription
  misc_feature (15)..(347): Homolog of NCBI NO: 33146866 NR Description: EREB-like protein [Oryza sativa (japonica
  misc_feature (15)..(347): Homolog of NCBI NO: 34906702 NR Description: EREBP(Ethylene-responsive element-binding
  misc_feature (311)..(347): Homolog of NCBI NO: 6176534 NR Description: EREBP-like protein [Oryza sativa]
  misc_feature (15)..(231): Homolog of NCBI NO: 6176534 NR Description: EREBP-like protein [Oryza sativa]
  misc_feature (15)..(345): Homolog of NCBI NO: 15217288 NR Description: Putative EREBP-like protein [Oryza sativa]
  misc_feature (15)..(354): Homolog of NCBI NO: 15217291 NR Description: Putative AP2 domain containing protein [Oryza
IGIKKNLSKNTQGTMCGGAILAELIPPTRRVASKPVTEGHLWSASSKKAGSGRDKRHQHEYADDDFEAAFEDFDDDFDVHEDDEDGHFVFSSKSALSPALHDGRAASQKKQRGRQFRGIRQRPWGKWAAEIRDPHKGTRVWLGTFSTAEDAARAYDVEARRLRGSKAKVNFPAASGRARGRARPRRGDDGNPRTAPETQHPAQPALLPRGERETQRKEGIAAVKPEATESFDVGGGLFFDMAFPTFPASPPPQAVDTSFAGSTATSETGSPAKRPRCDEDSSEGGSGSALELADELAFDPFVLLQMPYSGGYDDDSLDGLFAADEAVQQDVGNGMDGVRLWSFDEFPAVDGSVF

SEQ ID NO: 16712 - protein, 340 aa, Zea mays subsp. mays
  peptide (1)..(340): Ceres Seq. ID no. 12369304
  misc_feature (99)..(159): Pfam Name: AP2 domain Pfam Description: AP2 domain
  misc_feature (1)..(250): Homolog of NCBI NO: 37538128 NR Description: JERF3 [Lycopersicon esculentum]
  misc_feature (1)..(190): Homolog of NCBI NO: 22074046 NR Description: transcription factor JERF1 [Lycopersicon
  misc_feature (1)..(158): Homolog of NCBI NO: 24940524 NR Description: ethylene response element binding protein
  misc_feature (1)..(332): Homolog of NCBI NO: 15217289 NR Description: Putative AP2 domain containing transcription
  misc_feature (1)..(333): Homolog of NCBI NO: 33146866 NR Description: EREB-like protein [Oryza sativa (japonica
  misc_feature (1)..(333): Homolog of NCBI NO: 34906702 NR Description: EREBP(Ethylene-responsive element-binding
  misc_feature (297)..(333): Homolog of NCBI NO: 6176534 NR Description: EREBP-like protein [Oryza sativa]
  misc_feature (1)..(217): Homolog of NCBI NO: 6176534 NR Description: EREBP-like protein [Oryza sativa]
  misc_feature (1)..(331): Homolog of NCBI NO: 15217288 NR Description: Putative EREBP-like protein [Oryza sativa]
  misc_feature (1)..(340): Homolog of NCBI NO: 15217291 NR Description: Putative AP2 domain containing protein [Oryza
MCGGAILAELIPPTRRVASKPVTEGHLWSASSKKAGSGRDKRHQHEYADDDFEAAFEDFDDDFDVHEDDEDGHFVFSSKSALSPALHDGRAASQKKQRGRQFRGIRQRPWGKWAAEIRDPHKGTRVWLGTFSTAEDAARAYDVEARRLRGSKAKVNFPAASGRARGRARPRRGDDGNPRTAPETQHPAQPALLPRGERETQRKEGIAAVKPEATESFDVGGGLFFDMAFPTFPASPPPQAVDTSFAGSTATSETGSPAKRPRCDEDSSEGGSGSALELADELAFDPFVLLQMPYSGGYDDDSLDGLFAADEAVQQDVGNGMDGVRLWSFDEFPAVDGSVF

SEQ ID NO: 16713 - DNA, 931 bp, Zea mays subsp. mays
  misc_feature (1)..(931): Ceres Seq. ID no. 12354601
  misc_feature: MA Experiment ID: 108527 Result: Down-regulated in Transcription
  misc_feature: MA Experiment 108527 PARAMETER Experiment Name: Zm_5mM_NO_P Parameter: Age (day) Value: 8
  misc_feature: MA Experiment 108527 PARAMETER Experiment Name: Zm_5mM_NO_P Parameter: Organism Value: Zea mays
  misc_feature: MA Experiment 108527 PARAMETER Experiment Name: Zm_5mM_NO_P Parameter: Plant Line Value: 35A19
  misc_feature: MA Experiment 108527 PARAMETER Experiment Name: Zm_5mM_NO_P Parameter: Timepoint (hr) Value: 6
  misc_feature: MA Experiment 108527 PARAMETER Experiment Name: Zm_5mM_NO_P Parameter: Tissue Value: Aerial
  misc_feature: MA Experiment 108527 PARAMETER Experiment Name: Zm_5mM_NO_P Parameter: Treatment Value: 5mM NO vs. No Treatment
  misc_feature: MA Experiment ID: 108530 Result: Up-regulated in Transcription
  misc_feature: MA Experiment 108530 PARAMETER Experiment Name: Zm_Imbibed_Seeds_P Parameter: Age (day) Value: 6 vs. 2
  misc_feature: MA Experiment 108530 PARAMETER Experiment Name: Zm_Imbibed_Seeds_P Parameter: Organism Value: Zea mays
  misc_feature: MA Experiment 108530 PARAMETER Experiment Name: Zm_Imbibed_Seeds_P Parameter: Plant Line Value: 35A19
  misc_feature: MA Experiment 108530 PARAMETER Experiment Name: Zm_Imbibed_Seeds_P Parameter: Tissue Value: Aerial vs. Embryo
aatagacagaacgcaccctccagtaaagtccccatggctgctttctggttgctgctgctgttcgtcgccagcgcagtccttgttcttcgtacatggagagctcaaagcttcgtcaacaaggcgcggcaggcagggccgaggtacccgccggggctggagccgtacccgctgatcgggcacctgccacagttcttggctaaccggcaccgcgtgctcgactggatgaccgaggcgctcgcgcgccagacgaccacgtgcacgttcgtgctgcgccggccgggaggcgtgcggggtgcgatcaccgcgaacccggcgaacgtggagcacttcctgcgcaccagcttcgaccactaccccaaggggccccggttcgcgtcgctgctgcacgacttcctcggccggggcatcttcaacgccgacggcgaggcctggcgcgcgcagcggaaggtcgccagccacgagttcaacacgcgctcgctccgagctttcgtggcgcgctgcgtgcacgccgagctacacggccgcctgctcccgctgctgcgccgcgccgcggcgtccggctcccccctcgacctccaggacgtgctcgagcggttcgcgttcgacaatatctgccgcgtcgccttcgaccacgaccctcgccagctcccggacgatggtgacgacactgcggacagcagcttcgccgatgcgttccgcgacgctgcgaatctcagcgcgggccggttccggtacgcggtcccggggttctggaagatcaagaaagcgctgaacttgggttctgagaagcggctgcgggagtccatcgccatggtgcacgacttcgccgatcgcataatccagtcgcgccgggaggagatgttgagcgccggttttgagaagcacgatcttctgtcgcggttcatggcgagccaggacgagacctactccg

SEQ ID NO: 16714 - protein, 310 aa, Zea mays subsp. mays
  peptide (1)..(310): Ceres Seq. ID no. 12354602
  misc_feature (51)..(303): Homolog of NCBI NO: 34909024 NR Description: cytochrome P450-like protein
  misc_feature (26)..(309): Homolog of NCBI NO: 18000070 NR Description: cytochrome P450-dependent fatty acid hydroxylase
  misc_feature (16)..(309): Homolog of NCBI NO: 18000068 NR Description: cytochrome P450-dependent fatty acid hydroxylase
  misc_feature (51)..(308): Homolog of NCBI NO: 34909018 NR Description: cytochrome P450-like protein
  misc_feature (51)..(308): Homolog of NCBI NO: 34909016 NR Description: cytochrome P450-like protein
  misc_feature (23)..(308): Homolog of NCBI NO: 34909030 NR Description: cytochrome P450-like protein
  misc_feature (11)..(308): Homolog of NCBI NO: 34909022 NR Description: cytochrome P450-like protein
  misc_feature (51)..(306): Homolog of NCBI NO: 15218671 NR Description: cytochrome p450, putative; protein id:
  misc_feature (51)..(306): Homolog of NCBI NO: 15228981 NR Description: cytochrome P450, putative; protein id:
  misc_feature (12)..(309): Homolog of NCBI NO: 34902476 NR Description: Putative cytochrome P450 [Oryza sativa (japonica
  misc_feature (51)..(303): Homolog of NCBI NO: 34909024 NR Description: cytochrome P450-like protein
  misc_feature (26)..(309): Homolog of NCBI NO: 18000070 NR Description: cytochrome P450-dependent fatty acid hydroxylase
  misc_feature (16)..(309): Homolog of NCBI NO: 18000068 NR Description: cytochrome P450-dependent fatty acid hydroxylase
  misc_feature (51)..(308): Homolog of NCBI NO: 34909018 NR Description: cytochrome P450-like protein
  misc_feature (51)..(308): Homolog of NCBI NO: 34909016 NR Description: cytochrome P450-like protein
  misc_feature (23)..(308): Homolog of NCBI NO: 34909030 NR Description: cytochrome P450-like protein
  misc_feature (11)..(308): Homolog of NCBI NO: 34909022 NR Description: cytochrome P450-like protein
  misc_feature (51)..(306): Homolog of NCBI NO: 15218671 NR Description: cytochrome p450, putative; protein id:
  misc_feature (51)..(306): Homolog of NCBI NO: 15228981 NR Description: cytochrome P450, putative; protein id:
  misc_feature (12)..(309): Homolog of NCBI NO: 34902476 NR Description: Putative cytochrome P450 [Oryza sativa (japonica
NRQNAPSSKVPMAAFWLLLLFVASAVLVLRTWRAQSFVNKARQAGPRYPPGLEPYPLIGHLPQFLANRHRVLDWMTEALARQTTTCTFVLRRPGGVRGAITANPANVEHFLRTSFDHYPKGPRFASLLHDFLGRGIFNADGEAWRAQRKVASHEFNTRSLRAFVARCVHAELHGRLLPLLRRAAASGSPLDLQDVLERFAFDNICRVAFDHDPRQLPDDGDDTADSSFADAFRDAANLSAGRFRYAVPGFWKIKKALNLGSEKRLRESIAMVHDFADRIIQSRREEMLSAGFEKHDLLSRFMASQDETYS

SEQ ID NO: 16715 - protein, 299 aa, Zea mays subsp. mays
  peptide (1)..(299): Ceres Seq. ID no. 12354603
  misc_feature (40)..(292): Homolog of NCBI NO: 34909024 NR Description: cytochrome P450-like protein
  misc_feature (15)..(298): Homolog of NCBI NO: 18000070 NR Description: cytochrome P450-dependent fatty acid hydroxylase
  misc_feature (5)..(298): Homolog of NCBI NO: 18000068 NR Description: cytochrome P450-dependent fatty acid hydroxylase
  misc_feature (40)..(297): Homolog of NCBI NO: 34909018 NR Description: cytochrome P450-like protein
  misc_feature (40)..(297): Homolog of NCBI NO: 34909016 NR Description: cytochrome P450-like protein
  misc_feature (12)..(297): Homolog of NCBI NO: 34909030 NR Description: cytochrome P450-like protein
  misc_feature (1)..(297): Homolog of NCBI NO: 34909022 NR Description: cytochrome P450-like protein
  misc_feature (40)..(295): Homolog of NCBI NO: 15218671 NR Description: cytochrome p450, putative; protein id:
  misc_feature (40)..(295): Homolog of NCBI NO: 15228981 NR Description: cytochrome P450, putative; protein id:
  misc_feature (1)..(298): Homolog of NCBI NO: 34902476 NR Description: Putative cytochrome P450 [Oryza sativa (japonica
  misc_feature (40)..(292): Homolog of NCBI NO: 34909024 NR Description: cytochrome P450-like protein
  misc_feature (15)..(298): Homolog of NCBI NO: 18000070 NR Description: cytochrome P450-dependent fatty acid hydroxylase
  misc_feature (5)..(298): Homolog of NCBI NO: 18000068 NR Description: cytochrome P450-dependent fatty acid hydroxylase
  misc_feature (40)..(297): Homolog of NCBI NO: 34909018 NR Description: cytochrome P450-like protein
  misc_feature (40)..(297): Homolog of NCBI NO: 34909016 NR Description: cytochrome P450-like protein
  misc_feature (12)..(297): Homolog of NCBI NO: 34909030 NR Description: cytochrome P450-like protein
  misc_feature (1)..(297): Homolog of NCBI NO: 34909022 NR Description: cytochrome P450-like protein
  misc_feature (40)..(295): Homolog of NCBI NO: 15218671 NR Description: cytochrome p450, putative; protein id:
  misc_feature (40)..(295): Homolog of NCBI NO: 15228981 NR Description: cytochrome P450, putative; protein id:
  misc_feature (1)..(298): Homolog of NCBI NO: 34902476 NR Description: Putative cytochrome P450 [Oryza sativa (japonica
MAAFWLLLLFVASAVLVLRTWRAQSFVNKARQAGPRYPPGLEPYPLIGHLPQFLANRHRVLDWMTEALARQTTTCTFVLRRPGGVRGAITANPANVEHFLRTSFDHYPKGPRFASLLHDFLGRGIFNADGEAWRAQRKVASHEFNTRSLRAFVARCVHAELHGRLLPLLRRAAASGSPLDLQDVLERFAFDNICRVAFDHDPRQLPDDGDDTADSSFADAFRDAANLSAGRFRYAVPGFWKIKKALNLGSEKRLRESIAMVHDFADRIIQSRREEMLSAGFEKHDLLSRFMASQDETYS

SEQ ID NO: 16716 - protein, 236 aa, Zea mays subsp. mays
  peptide (1)..(236): Ceres Seq. ID no. 12354604
  misc_feature (1)..(229): Homolog of NCBI NO: 34909024 NR Description: cytochrome P450-like protein
  misc_feature (1)..(235): Homolog of NCBI NO: 18000070 NR Description: cytochrome P450-dependent fatty acid hydroxylase
  misc_feature (1)..(235): Homolog of NCBI NO: 18000068 NR Description: cytochrome P450-dependent fatty acid hydroxylase
  misc_feature (1)..(234): Homolog of NCBI NO: 34909018 NR Description: cytochrome P450-like protein
  misc_feature (1)..(234): Homolog of NCBI NO: 34909016 NR Description: cytochrome P450-like protein
  misc_feature (1)..(234): Homolog of NCBI NO: 34909030 NR Description: cytochrome P450-like protein
  misc_feature (1)..(234): Homolog of NCBI NO: 34909022 NR Description: cytochrome P450-like protein
  misc_feature (1)..(232): Homolog of NCBI NO: 15218671 NR Description: cytochrome p450, putative; protein id:
  misc_feature (1)..(232): Homolog of NCBI NO: 15228981 NR Description: cytochrome P450, putative; protein id:
  misc_feature (1)..(235): Homolog of NCBI NO: 34902476 NR Description: Putative cytochrome P450 [Oryza sativa (japonica
  misc_feature (1)..(229): Homolog of NCBI NO: 34909024 NR Description: cytochrome P450-like protein
  misc_feature (1)..(235): Homolog of NCBI NO: 18000070 NR Description: cytochrome P450-dependent fatty acid hydroxylase
  misc_feature (1)..(235): Homolog of NCBI NO: 18000068 NR Description: cytochrome P450-dependent fatty acid hydroxylase
  misc_feature (1)..(234): Homolog of NCBI NO: 34909018 NR Description: cytochrome P450-like protein
  misc_feature (1)..(234): Homolog of NCBI NO: 34909016 NR Description: cytochrome P450-like protein
  misc_feature (1)..(234): Homolog of NCBI NO: 34909030 NR Description: cytochrome P450-like protein
  misc_feature (1)..(234): Homolog of NCBI NO: 34909022 NR Description: cytochrome P450-like protein
  misc_feature (1)..(232): Homolog of NCBI NO: 15218671 NR Description: cytochrome p450, putative; protein id:
  misc_feature (1)..(232): Homolog of NCBI NO: 15228981 NR Description: cytochrome P450, putative; protein id:
  misc_feature (1)..(235): Homolog of NCBI NO: 34902476 NR Description: Putative cytochrome P450 [Oryza sativa (japonica
MTEALARQTTTCTFVLRRPGGVRGAITANPANVEHFLRTSFDHYPKGPRFASLLHDFLGRGIFNADGEAWRAQRKVASHEFNTRSLRAFVARCVHAELHGRLLPLLRRAAASGSPLDLQDVLERFAFDNICRVAFDHDPRQLPDDGDDTADSSFADAFRDAANLSAGRFRYAVPGFWKIKKALNLGSEKRLRESIAMVHDFADRIIQSRREEMLSAGFEKHDLLSRFMASQDETYS

SEQ ID NO: 16717 - DNA, 1753 bp, Zea mays subsp. mays
  misc_feature (1)..(1753): Ceres Seq. ID no. 12368205
  misc_feature: MA Experiment ID: 108534 Result: Up-regulated in Transcription
  misc_feature: MA Experiment 108534 PARAMETER Experiment Name: Zm_4deg_Cold_P Parameter: Age (hr) Value: 8
  misc_feature: MA Experiment 108534 PARAMETER Experiment Name: Zm_4deg_Cold_P Parameter: Organism Value: Zea mays
  misc_feature: MA Experiment 108534 PARAMETER Experiment Name: Zm_4deg_Cold_P Parameter: Plant Line Value: 35A19
  misc_feature: MA Experiment 108534 PARAMETER Experiment Name: Zm_4deg_Cold_P Parameter: Temperature (deg C) Value: 4 vs. 22
  misc_feature: MA Experiment 108534 PARAMETER Experiment Name: Zm_4deg_Cold_P Parameter: Timepoint (hr) Value: 6
  misc_feature: MA Experiment 108534 PARAMETER Experiment Name: Zm_4deg_Cold_P Parameter: Tissue Value: Aerial
  misc_feature: MA Experiment ID: 108535 Result: Down-regulated in Transcription
  misc_feature: MA Experiment 108535 PARAMETER Experiment Name: Zm_Meristem_P Parameter: Age (day) Value: 8
  misc_feature: MA Experiment 108535 PARAMETER Experiment Name: Zm_Meristem_P Parameter: Organism Value: Zea mays
  misc_feature: MA Experiment 108535 PARAMETER Experiment Name: Zm_Meristem_P Parameter: Plant Line Value: 35A19
  misc_feature: MA Experiment 108535 PARAMETER Experiment Name: Zm_Meristem_P Parameter: Tissue Value: Root Meristem vs. Above Root Meristem
  misc_feature: MA Experiment ID: 108543 Result: Up-regulated in Transcription
  misc_feature: MA Experiment ID: 108597 Result: Down-regulated in Transcription
  misc_feature: MA Experiment 108597 PARAMETER Experiment Name: Zm_100uM_ABA_P Parameter: Age (day) Value: 9
  misc_feature: MA Experiment 108597 PARAMETER Experiment Name: Zm_100uM_ABA_P Parameter: Organism Value: Zea mays
  misc_feature: MA Experiment 108597 PARAMETER Experiment Name: Zm_100uM_ABA_P Parameter: Plant Line Value: 35A19
  misc_feature: MA Experiment 108597 PARAMETER Experiment Name: Zm_100uM_ABA_P Parameter: Timepoint (hr) Value: 24
  misc_feature: MA Experiment 108597 PARAMETER Experiment Name: Zm_100uM_ABA_P Parameter: Tissue Value: Aerial
  misc_feature: MA Experiment 108597 PARAMETER Experiment Name: Zm_100uM_ABA_P Parameter: Treatment Value: 100uM ABA vs. No Treatment
  misc_feature: MA Experiment ID: 108689 Result: Up-regulated in Transcription
  misc_feature: MA Experiment 108689 PARAMETER Experiment Name: Zm_Drought_Roots_P Parameter: Age (day) Value: 9
  misc_feature: MA Experiment 108689 PARAMETER Experiment Name: Zm_Drought_Roots_P Parameter: Organism Value: Zea mays
  misc_feature: MA Experiment 108689 PARAMETER Experiment Name: Zm_Drought_Roots_P Parameter: Plant Line Value: 35A19
  misc_feature: MA Experiment 108689 PARAMETER Experiment Name: Zm_Drought_Roots_P Parameter: Timepoint (hr) Value: 24
  misc_feature: MA Experiment 108689 PARAMETER Experiment Name: Zm_Drought_Roots_P Parameter: Tissue Value: Roots
  misc_feature: MA Experiment 108689 PARAMETER Experiment Name: Zm_Drought_Roots_P Parameter: Treatment Value: Drought vs. No Drought
  misc_feature: MA Experiment ID: 20000108 Result: Down-regulated in Transcription
  misc_feature: MA Experiment 20000108 PARAMETER Experiment Name: Zm_Root-Tips_P Parameter: Age (day) Value: 12
  misc_feature: MA Experiment 20000108 PARAMETER Experiment Name: Zm_Root-Tips_P Parameter: Organism Value: Zea mays
  misc_feature: MA Experiment 20000108 PARAMETER Experiment Name: Zm_Root-Tips_P Parameter: Tissue Value: Root tips vs. Root mid region    35
  misc_feature: MA Experiment 20000108 PARAMETER Experiment Name: Zm_Root-Tips_P Parameter: Tissue Value: Root tips vs. Root mid region   Sequence Listing-Misc Features (4)
  misc_feature: MA Experiment ID: 20000492 Result: Down-regulated in Transcription
  misc_feature: MA Experiment 20000492 PARAMETER Experiment Name: Zm_Hybrid_Seed_Dev_P Parameter: DAP Value: 12
  misc_feature: MA Experiment 20000492 PARAMETER Experiment Name: Zm_Hybrid_Seed_Dev_P Parameter: Organism Value: Zea mays
  misc_feature: MA Experiment 20000492 PARAMETER Experiment Name: Zm_Hybrid_Seed_Dev_P Parameter: Plant Line Value: 35A19
  misc_feature: MA Experiment 20000492 PARAMETER Experiment Name: Zm_Hybrid_Seed_Dev_P Parameter: Tissue Value: Fert Kernel vs. Unfert Floret
  misc_feature: MA Experiment ID: 20000535 Result: Down-regulated in Transcription
  misc_feature: MA Experiment 20000535 PARAMETER Experiment Name: Zm_Hybrid_Seed_Dev_P Parameter: DAP Value: 30 vs. 12
  misc_feature: MA Experiment 20000535 PARAMETER Experiment Name: Zm_Hybrid_Seed_Dev_P Parameter: Organism Value: Zea mays
  misc_feature: MA Experiment 20000535 PARAMETER Experiment Name: Zm_Hybrid_Seed_Dev_P Parameter: Plant Line Value: 35A19
  misc_feature: MA Experiment 20000535 PARAMETER Experiment Name: Zm_Hybrid_Seed_Dev_P Parameter: Tissue Value: Embryo vs. Unfert Floret
  misc_feature: MA Experiment ID: 20000629 Result: Down-regulated in Transcription
  misc_feature: MA Experiment 20000629 PARAMETER Experiment Name: Zm_Herbicide-Treatments_P Parameter: Timepoint (hr) Value: 12
  misc_feature: MA Experiment 20000629 PARAMETER Experiment Name: Zm_Herbicide-Treatments_P Parameter: Tissue Value: Aerial
  misc_feature: MA Experiment 20000629 PARAMETER Experiment Name: Zm_Herbicide-Treatments_P Parameter: Treatment Value: Trimec vs. No Treatment
gacaacctaaaagcagaaagtataactgtataagtaatgccatcagctccgtacttgacgtagaattccaatggaaatggaactagaccctttcctgggcgtcgtgctcgccaccgccgtcctcctcgtcgccgtcctccgccggaagcgcggctccagccgcaagtacaagatgccatccgggcctaggccgtggccggtgatcggcaacctcaacctgatcggcgcgctcccgcaccgctccatccacgcgctctccgcgcggcacggcgcgttcatgtcgctccgcttcggctccgtccccgtcgtcgtcggctcctccgtggaagcggccaggttcttcctcaggaccagcgacacgtcgttcatcgaccgccccaggatggcggccgggaagtacaccgcctacgactactccgacatcgtctggtcgccctgcggggcgtactggcgccaggcgcgcaagctctggaaggcccatctgttcagcgacaggcagctcaggtcgcaggagcacgtccgcagcgaggagctgcgcgtcctgctgcgcgccctgtcgtcgtcgtcctccgcgggcgcggccgggcgcggccggcgggccgtcgcgctcaaggagcacctgctcatgtacagcctcaacgtgatctcgcgcatggcgctgggcgggaagtacgtcggcgagggcggcaccgcgggctcgccgatctcgccggccgagttcagctggatggtcgacgagctcttcctcctcaacggcgtgttctgcgtcggggacttcatcccgtggctcggctggctggacctccagggctacgtcgggaggatgaagaggctgggcaagatgttcgatcgcttcctggagcacgtggtggacgagcacgaccagcggcggcggcgggagggcggcgggttcgtccccgcggacatggtggacctgctgctggagctcgccgacgaccccaaactcgaggtccccatcgaacgggatggcgtcaagggattcgcgctggacctgatcgctggcggcacggactccacggcggtgaccatcgagtgggccatgtcggagctcctgcggaagcccgaggtcctcgccaaggtcaccgaggagctggacggcgtcatcggccacggccgcctggtcaccgagcaggacatcccggacctgccgtacctggaggccgtcgtgaaggagaccctccgcctgcacccggtgacgccgctgctggcgccgcggctgtgccgcgaggacgcgtccacgggcagctacgacatcccgcggggcacgctcgtgttcgtcaacgtctgggccatcggccgcgaccccgccgtgtggggccacgacgcggaggagttccgcccggagaggttcgtcggcagcgccgtggacgtgaagggccacgacctggagctgctcccgttcgggtccggccgccggatgtgcccgggctacgtcctcgggctcaagatggtgcaggtcaccctggccaacctgctgcacgccttctcgtggaggctgcctgatagcgtggcgccggagaagctgaacatgcaggagaagttcgggctcgccgtgccgcgcttggtcccgctcgaggccgtcgccgtgcccaggctgccaccacacctgtatgccgggccatgatgcatgtctatgtttgtttttgtaggcgcatacaactgtctcgtaataaaagatacatatcttttctctgtacatatacacctaataaagagacaaacaatatcgtcg

SEQ ID NO: 16718 - protein, 524 aa, Zea mays subsp. mays
  peptide (1)..(524): Ceres Seq. ID no. 12368206
  misc_feature (36)..(510): Pfam Name: Cytochrome P450 Pfam Description: Cytochrome P450
  misc_feature (13)..(521): Homolog of NCBI NO: 37694931 NR Description: flavonoid 3'-hydroxylase [Ipomoea purpurea]
  misc_feature (12)..(506): Homolog of NCBI NO: 12004682 NR Description: cytochrome P450 [Pisum sativum]
  misc_feature (5)..(522): Homolog of NCBI NO: 7430636 NR Description: probable cytochrome P450,
  misc_feature (3)..(510): Homolog of NCBI NO: 7430637 NR Description: cytochrome P450 - common tobacco
  misc_feature (5)..(522): Homolog of NCBI NO: 14423327 NR Description: elicitor-inducible cytochrome P450 [Nicotiana
  misc_feature (8)..(523): Homolog of NCBI NO: 18377404 NR Description: cytochrome P450 monooxygenase CYP92A1 [Zea mays
MEMELDPFLGVVLATAVLLVAVLRRKRGSSRKYKMPSGPRPWPVIGNLNLIGALPHRSIHALSARHGAFMSLRFGSVPVVVGSSVEAARFFLRTSDTSFIDRPRMAAGKYTAYDYSDIVWSPCGAYWRQARKLWKAHLFSDRQLRSQEHVRSEELRVLLRALSSSSSAGAAGRGRRAVALKEHLLMYSLNVISRMALGGKYVGEGGTAGSPISPAEFSWMVDELFLLNGVFCVGDFIPWLGWLDLQGYVGRMKRLGKMFDRFLEHVVDEHDQRRRREGGGFVPADMVDLLLELADDPKLEVPIERDGVKGFALDLIAGGTDSTAVTIEWAMSELLRKPEVLAKVTEELDGVIGHGRLVTEQDIPDLPYLEAVVKETLRLHPVTPLLAPRLCREDASTGSYDIPRGTLVFVNVWAIGRDPAVWGHDAEEFRPERFVGSAVDVKGHDLELLPFGSGRRMCPGYVLGLKMVQVTLANLLHAFSWRLPDSVAPEKLNMQEKFGLAVPRLVPLEAVAVPRLPPHLYAGP

SEQ ID NO: 16719 - protein, 522 aa, Zea mays subsp. mays
  peptide (1)..(522): Ceres Seq. ID no. 12368207
  misc_feature (34)..(508): Pfam Name: Cytochrome P450 Pfam Description: Cytochrome P450
  misc_feature (11)..(519): Homolog of NCBI NO: 37694931 NR Description: flavonoid 3'-hydroxylase [Ipomoea purpurea]
  misc_feature (10)..(504): Homolog of NCBI NO: 12004682 NR Description: cytochrome P450 [Pisum sativum]
  misc_feature (3)..(520): Homolog of NCBI NO: 7430636 NR Description: probable cytochrome P450,
  misc_feature (1)..(508): Homolog of NCBI NO: 7430637 NR Description: cytochrome P450 - common tobacco
  misc_feature (3)..(520): Homolog of NCBI NO: 14423327 NR Description: elicitor-inducible cytochrome P450 [Nicotiana
  misc_feature (6)..(521): Homolog of NCBI NO: 18377404 NR Description: cytochrome P450 monooxygenase CYP92A1 [Zea mays
MELDPFLGVVLATAVLLVAVLRRKRGSSRKYKMPSGPRPWPVIGNLNLIGALPHRSIHALSARHGAFMSLRFGSVPVVVGSSVEAARFFLRTSDTSFIDRPRMAAGKYTAYDYSDIVWSPCGAYWRQARKLWKAHLFSDRQLRSQEHVRSEELRVLLRALSSSSSAGAAGRGRRAVALKEHLLMYSLNVISRMALGGKYVGEGGTAGSPISPAEFSWMVDELFLLNGVFCVGDFIPWLGWLDLQGYVGRMKRLGKMFDRFLEHVVDEHDQRRRREGGGFVPADMVDLLLELADDPKLEVPIERDGVKGFALDLIAGGTDSTAVTIEWAMSELLRKPEVLAKVTEELDGVIGHGRLVTEQDIPDLPYLEAVVKETLRLHPVTPLLAPRLCREDASTGSYDIPRGTLVFVNVWAIGRDPAVWGHDAEEFRPERFVGSAVDVKGHDLELLPFGSGRRMCPGYVLGLKMVQVTLANLLHAFSWRLPDSVAPEKLNMQEKFGLAVPRLVPLEAVAVPRLPPHLYAGP

SEQ ID NO: 16720 - protein, 490 aa, Zea mays subsp. mays
  peptide (1)..(490): Ceres Seq. ID no. 12368208
  misc_feature (2)..(476): Pfam Name: Cytochrome P450 Pfam Description: Cytochrome P450
  misc_feature (1)..(487): Homolog of NCBI NO: 37694931 NR Description: flavonoid 3'-hydroxylase [Ipomoea purpurea]
  misc_feature (1)..(472): Homolog of NCBI NO: 12004682 NR Description: cytochrome P450 [Pisum sativum]
  misc_feature (1)..(488): Homolog of NCBI NO: 7430636 NR Description: probable cytochrome P450,
  misc_feature (1)..(476): Homolog of NCBI NO: 7430637 NR Description: cytochrome P450 - common tobacco
  misc_feature (1)..(488): Homolog of NCBI NO: 14423327 NR Description: elicitor-inducible cytochrome P450 [Nicotiana
  misc_feature (1)..(489): Homolog of NCBI NO: 18377404 NR Description: cytochrome P450 monooxygenase CYP92A1 [Zea mays
MPSGPRPWPVIGNLNLIGALPHRSIHALSARHGAFMSLRFGSVPVVVGSSVEAARFFLRTSDTSFIDRPRMAAGKYTAYDYSDIVWSPCGAYWRQARKLWKAHLFSDRQLRSQEHVRSEELRVLLRALSSSSSAGAAGRGRRAVALKEHLLMYSLNVISRMALGGKYVGEGGTAGSPISPAEFSWMVDELFLLNGVFCVGDFIPWLGWLDLQGYVGRMKRLGKMFDRFLEHVVDEHDQRRRREGGGFVPADMVDLLLELADDPKLEVPIERDGVKGFALDLIAGGTDSTAVTIEWAMSELLRKPEVLAKVTEELDGVIGHGRLVTEQDIPDLPYLEAVVKETLRLHPVTPLLAPRLCREDASTGSYDIPRGTLVFVNVWAIGRDPAVWGHDAEEFRPERFVGSAVDVKGHDLELLPFGSGRRMCPGYVLGLKMVQVTLANLLHAFSWRLPDSVAPEKLNMQEKFGLAVPRLVPLEAVAVPRLPPHLYAGP

SEQ ID NO: 16721 - DNA, 1496 bp, Zea mays subsp. mays
  misc_feature (1)..(1496): Ceres Seq. ID no. 12357245
  misc_feature: MA Experiment ID: 108535 Result: Up-regulated in Transcription
  misc_feature: MA Experiment 108535 PARAMETER Experiment Name: Zm_Meristem_P Parameter: Age (day) Value: 8
  misc_feature: MA Experiment 108535 PARAMETER Experiment Name: Zm_Meristem_P Parameter: Organism Value: Zea mays
  misc_feature: MA Experiment 108535 PARAMETER Experiment Name: Zm_Meristem_P Parameter: Plant Line Value: 35A19
  misc_feature: MA Experiment 108535 PARAMETER Experiment Name: Zm_Meristem_P Parameter: Tissue Value: Root Meristem vs. Above Root Meristem
caaagatcttatgatgccctgggagactttgttttgtggtgtatagatagcatcatgtctgaattgtcaggctcatcagctggatctaagggttcaaagaaggttgcccaacagtctccaagggcccaggttgcaatctttgttgttcttgccatgactttaagaagaaagcctgatgtacttgtaaatgttatgccaaagataatgggaaacaataaatatcttggacaggaaaagcttcccatcattgtctggtttattgctcaggcatctcaaggtgacctagtgactggcatgttttgctgggctcattttctatttcccacgttatgtgcgaagccaagtgggaatccccttgcaagagatttggttttgcagttgcttgaaagaattttatctgtcaccaaagctcgttctatcttattgaatggtgctgttagaaagggggaacgcctagttccccctgtttcatttgacttgttcatgagagccacatttccggtttctggtgctcgggtgaaggctacagaaaggtttgaagtagcttatcgaacaatcaaggagttggctcttgccggttctcctggctctaaaactgtgaaacaagcatcacagcaacttttacctttgtgtgcaaaagcaatgcaagaaaacaacacagagctcaccagggaggctgttgatgtgttcatttggtgcttgacacaaaatgcagagtccaacaagcagtgggaaagaatttatcctgaaaatactgaagccagtgttgctgtcctgagcaaaattgtgattgattggaaggacgtgtctcctaagctcaattctgaagctctcaaggcaacagtgaagaacttgaaggctaagaatgaggcagcgctggagtcagcaacagatgctggaaagcaggcatctatcaaagaagcagacaagcactgtaaggtgatccttggaaagctgacgcgcggttccacctgcctgaagagcacccttgtgggcatcgccctcgcagttgcagctagtctcgtgctatcatctcctgacatggaccttgcgctcgagtgggagaagatccaggcgatggtctcatcgcacctgtcgttctgaagatacctgtccggaatctccagacgtgggtggatctaagtcatacaagccatccaaaggggatggctgactcagcagtgaagagagctcaaggggtggtgagaataagagggaggggggggggataggtgctagaaccgaaaggttatagttttcatgagtcgccatttttttcccgcgcttcctccagcagcagcggtgccctgataggagggagatgcagtagtcgactttgcagagagttggtttaatcggggtgggtgcgaactgcgaagaaggtttgagtcaaatggctcgaccagaggattaacaccttttgcttttctctttgtgcatctgagatgatgttggcaaacagttttggttatctagaatcttgaatcgtattccgc

SEQ ID NO: 16722 - protein, 367 aa, Zea mays subsp. mays
  peptide (1)..(367): Ceres Seq. ID no. 12357246
  misc_feature (234)..(338): Homolog of NCBI NO: 25518112 NR Description: T26J12.6 protein - Arabidopsis thaliana
  misc_feature (1)..(225): Homolog of NCBI NO: 25518112 NR Description: T26J12.6 protein - Arabidopsis thaliana
  misc_feature (10)..(345): Homolog of NCBI NO: 18399392 NR Description: expressed protein
  misc_feature (10)..(345): Homolog of NCBI NO: 6671944 NR Description: unknown protein [Arabidopsis thaliana]
  misc_feature (1)..(338): Homolog of NCBI NO: 15220663 NR Description: unknown protein; protein id: At1g23170.1
  misc_feature (2)..(367): Homolog of NCBI NO: 15223242 NR Description: unknown protein; protein id: At1g70770.1
  misc_feature (1)..(367): Homolog of NCBI NO: 34895518 NR Description: unnamed protein product [Oryza sativa (japonica
QRSYDALGDFVLWCIDSIMSELSGSSAGSKGSKKVAQQSPRAQVAIFVVLAMTLRRKPDVLVNVMPKIMGNNKYLGQEKLPIIVWFIAQASQGDLVTGMFCWAHFLFPTLCAKPSGNPLARDLVLQLLERILSVTKARSILLNGAVRKGERLVPPVSFDLFMRATFPVSGARVKATERFEVAYRTIKELALAGSPGSKTVKQASQQLLPLCAKAMQENNTELTREAVDVFIWCLTQNAESNKQWERIYPENTEASVAVLSKIVIDWKDVSPKLNSEALKATVKNLKAKNEAALESATDAGKQASIKEADKHCKVILGKLTRGSTCLKSTLVGIALAVAASLVLSSPDMDLALEWEKIQAMVSSHLSF

SEQ ID NO: 16723 - protein, 349 aa, Zea mays subsp. mays
  peptide (1)..(349): Ceres Seq. ID no. 12357247
  misc_feature (216)..(320): Homolog of NCBI NO: 25518112 NR Description: T26J12.6 protein - Arabidopsis thaliana
  misc_feature (1)..(207): Homolog of NCBI NO: 25518112 NR Description: T26J12.6 protein - Arabidopsis thaliana
  misc_feature (1)..(327): Homolog of NCBI NO: 18399392 NR Description: expressed protein
  misc_feature (1)..(327): Homolog of NCBI NO: 6671944 NR Description: unknown protein [Arabidopsis thaliana]
  misc_feature (1)..(320): Homolog of NCBI NO: 15220663 NR Description: unknown protein; protein id: At1g23170.1
  misc_feature (1)..(349): Homolog of NCBI NO: 15223242 NR Description: unknown protein; protein id: At1g70770.1
  misc_feature (1)..(349): Homolog of NCBI NO: 34895518 NR Description: unnamed protein product [Oryza sativa (japonica
MSELSGSSAGSKGSKKVAQQSPRAQVAIFVVLAMTLRRKPDVLVNVMPKIMGNNKYLGQEKLPIIVWFIAQASQGDLVTGMFCWAHFLFPTLCAKPSGNPLARDLVLQLLERILSVTKARSILLNGAVRKGERLVPPVSFDLFMRATFPVSGARVKATERFEVAYRTIKELALAGSPGSKTVKQASQQLLPLCAKAMQENNTELTREAVDVFIWCLTQNAESNKQWERIYPENTEASVAVLSKIVIDWKDVSPKLNSEALKATVKNLKAKNEAALESATDAGKQASIKEADKHCKVILGKLTRGSTCLKSTLVGIALAVAASLVLSSPDMDLALEWEKIQAMVSSHLSF

SEQ ID NO: 16724 - protein, 316 aa, Zea mays subsp. mays
  peptide (1)..(316): Ceres Seq. ID no. 12357248
  misc_feature (183)..(287): Homolog of NCBI NO: 25518112 NR Description: T26J12.6 protein - Arabidopsis thaliana
  misc_feature (1)..(174): Homolog of NCBI NO: 25518112 NR Description: T26J12.6 protein - Arabidopsis thaliana
  misc_feature (1)..(294): Homolog of NCBI NO: 18399392 NR Description: expressed protein
  misc_feature (1)..(294): Homolog of NCBI NO: 6671944 NR Description: unknown protein [Arabidopsis thaliana]
  misc_feature (1)..(287): Homolog of NCBI NO: 15220663 NR Description: unknown protein; protein id: At1g23170.1
  misc_feature (1)..(316): Homolog of NCBI NO: 15223242 NR Description: unknown protein; protein id: At1g70770.1
  misc_feature (1)..(316): Homolog of NCBI NO: 34895518 NR Description: unnamed protein product [Oryza sativa (japonica
MTLRRKPDVLVNVMPKIMGNNKYLGQEKLPIIVWFIAQASQGDLVTGMFCWAHFLFPTLCAKPSGNPLARDLVLQLLERILSVTKARSILLNGAVRKGERLVPPVSFDLFMRATFPVSGARVKATERFEVAYRTIKELALAGSPGSKTVKQASQQLLPLCAKAMQENNTELTREAVDVFIWCLTQNAESNKQWERIYPENTEASVAVLSKIVIDWKDVSPKLNSEALKATVKNLKAKNEAALESATDAGKQASIKEADKHCKVILGKLTRGSTCLKSTLVGIALAVAASLVLSSPDMDLALEWEKIQAMVSSHLSF

SEQ ID NO: 16725 - DNA, 1183 bp, Zea mays subsp. mays
  misc_feature (1)..(1183): Ceres Seq. ID no. 13504973
  misc_feature: MA Experiment ID: 108504 Result: Down-regulated in Transcription
  misc_feature: MA Experiment 108504 PARAMETER Experiment Name: Zm_Drought_P Parameter: Age (day) Value: 8
  misc_feature: MA Experiment 108504 PARAMETER Experiment Name: Zm_Drought_P Parameter: Organism Value: Zea mays
  misc_feature: MA Experiment 108504 PARAMETER Experiment Name: Zm_Drought_P Parameter: Plant Line Value: 35A19
  misc_feature: MA Experiment 108504 PARAMETER Experiment Name: Zm_Drought_P Parameter: Timepoint (hr) Value: 12
  misc_feature: MA Experiment 108504 PARAMETER Experiment Name: Zm_Drought_P Parameter: Tissue Value: Aerial
  misc_feature: MA Experiment 108504 PARAMETER Experiment Name: Zm_Drought_P Parameter: Treatment Value: Drought vs. No Drought
  misc_feature: MA Experiment ID: 108535 Result: Up-regulated in Transcription
  misc_feature: MA Experiment 108535 PARAMETER Experiment Name: Zm_Meristem_P Parameter: Age (day) Value: 8
  misc_feature: MA Experiment 108535 PARAMETER Experiment Name: Zm_Meristem_P Parameter: Organism Value: Zea mays
  misc_feature: MA Experiment 108535 PARAMETER Experiment Name: Zm_Meristem_P Parameter: Plant Line Value: 35A19
  misc_feature: MA Experiment 108535 PARAMETER Experiment Name: Zm_Meristem_P Parameter: Tissue Value: Root Meristem vs. Above Root Meristem
  misc_feature: MA Experiment ID: 108540 Result: Down-regulated in Transcription
  misc_feature: MA Experiment 108540 PARAMETER Experiment Name: Zm_20percent_PEG_P Parameter: Age (day) Value: 8
  misc_feature: MA Experiment 108540 PARAMETER Experiment Name: Zm_20percent_PEG_P Parameter: Organism Value: Zea mays
  misc_feature: MA Experiment 108540 PARAMETER Experiment Name: Zm_20percent_PEG_P Parameter: Plant Line Value: 35A19
  misc_feature: MA Experiment 108540 PARAMETER Experiment Name: Zm_20percent_PEG_P Parameter: Timepoint (hr) Value: 6
  misc_feature: MA Experiment 108540 PARAMETER Experiment Name: Zm_20percent_PEG_P Parameter: Tissue Value: Aerial
  misc_feature: MA Experiment 108540 PARAMETER Experiment Name: Zm_20percent_PEG_P Parameter: Treatment Value: 20percent PEG vs. No Treatment
  misc_feature: MA Experiment ID: 108544 Result: Down-regulated in Transcription
  misc_feature: MA Experiment ID: 108556 Result: Down-regulated in Transcription
  misc_feature: MA Experiment 108556 PARAMETER Experiment Name: Zm_Drought_P Parameter: Age (day) Value: 9
  misc_feature: MA Experiment 108556 PARAMETER Experiment Name: Zm_Drought_P Parameter: Organism Value: Zea mays
  misc_feature: MA Experiment 108556 PARAMETER Experiment Name: Zm_Drought_P Parameter: Plant Line Value: 35A19
  misc_feature: MA Experiment 108556 PARAMETER Experiment Name: Zm_Drought_P Parameter: Timepoint (hr) Value: 24
  misc_feature: MA Experiment 108556 PARAMETER Experiment Name: Zm_Drought_P Parameter: Tissue Value: Aerial
  misc_feature: MA Experiment 108556 PARAMETER Experiment Name: Zm_Drought_P Parameter: Treatment Value: Drought vs. No Drought
  misc_feature: MA Experiment ID: 108687 Result: Down-regulated in Transcription
  misc_feature: MA Experiment 108687 PARAMETER Experiment Name: Zm_Embryos-Flowers__P Parameter: Tissue Value: Embryo vs. Aerial+
  misc_feature: MA Experiment ID: 20000477 Result: Down-regulated in Transcription
  misc_feature: MA Experiment 20000477 PARAMETER Experiment Name: Zm_5mM_SA_P Parameter: Age (day) Value: 10
  misc_feature: MA Experiment 20000477 PARAMETER Experiment Name: Zm_5mM_SA_P Parameter: Organism Value: Zea mays
  misc_feature: MA Experiment 20000477 PARAMETER Experiment Name: Zm_5mM_SA_P Parameter: Plant Line Value: 35A19
  misc_feature: MA Experiment 20000477 PARAMETER Experiment Name: Zm_5mM_SA_P Parameter: Timepoint (hr) Value: 48
  misc_feature: MA Experiment 20000477 PARAMETER Experiment Name: Zm_5mM_SA_P Parameter: Tissue Value: Aerial
  misc_feature: MA Experiment 20000477 PARAMETER Experiment Name: Zm_5mM_SA_P Parameter: Treatment Value: 5mM SA vs. No Treatment
  misc_feature: MA Experiment ID: 20000478 Result: Down-regulated in Transcription
  misc_feature: MA Experiment 20000478 PARAMETER Experiment Name: Zm_5mM_SA_P Parameter: Age (day) Value: 11
  misc_feature: MA Experiment 20000478 PARAMETER Experiment Name: Zm_5mM_SA_P Parameter: Organism Value: Zea mays
  misc_feature: MA Experiment 20000478 PARAMETER Experiment Name: Zm_5mM_SA_P Parameter: Plant Line Value: 35A19
  misc_feature: MA Experiment 20000478 PARAMETER Experiment Name: Zm_5mM_SA_P Parameter: Timepoint (hr) Value: 72
  misc_feature: MA Experiment 20000478 PARAMETER Experiment Name: Zm_5mM_SA_P Parameter: Tissue Value: Aerial
  misc_feature: MA Experiment 20000478 PARAMETER Experiment Name: Zm_5mM_SA_P Parameter: Treatment Value: 5mM SA vs. No Treatment
  misc_feature: MA Experiment ID: 20000479 Result: Down-regulated in Transcription
  misc_feature: MA Experiment 20000479 PARAMETER Experiment Name: Zm_Drought_P Parameter: Age (day) Value: 10
  misc_feature: MA Experiment 20000479 PARAMETER Experiment Name: Zm_Drought_P Parameter: Organism Value: Zea mays
  misc_feature: MA Experiment 20000479 PARAMETER Experiment Name: Zm_Drought_P Parameter: Plant Line Value: 35A19
  misc_feature: MA Experiment 20000479 PARAMETER Experiment Name: Zm_Drought_P Parameter: Timepoint (hr) Value: 48
  misc_feature: MA Experiment 20000479 PARAMETER Experiment Name: Zm_Drought_P Parameter: Tissue Value: Aerial
  misc_feature: MA Experiment 20000479 PARAMETER Experiment Name: Zm_Drought_P Parameter: Treatment Value: Drought vs. No Drought
  misc_feature: MA Experiment ID: 20000492 Result: Up-regulated in Transcription
  misc_feature: MA Experiment 20000492 PARAMETER Experiment Name: Zm_Hybrid_Seed_Dev_P Parameter: DAP Value: 12
  misc_feature: MA Experiment 20000492 PARAMETER Experiment Name: Zm_Hybrid_Seed_Dev_P Parameter: Organism Value: Zea mays
  misc_feature: MA Experiment 20000492 PARAMETER Experiment Name: Zm_Hybrid_Seed_Dev_P Parameter: Plant Line Value: 35A19
  misc_feature: MA Experiment 20000492 PARAMETER Experiment Name: Zm_Hybrid_Seed_Dev_P Parameter: Tissue Value: Fert Kernel vs. Unfert Floret
  misc_feature: MA Experiment ID: 20000534 Result: Down-regulated in Transcription
  misc_feature: MA Experiment 20000534 PARAMETER Experiment Name: Zm_Hybrid_Pollen_P Parameter: Age (day) Value: 8
  misc_feature: MA Experiment 20000534 PARAMETER Experiment Name: Zm_Hybrid_Pollen_P Parameter: Organism Value: Zea mays
  misc_feature: MA Experiment 20000534 PARAMETER Experiment Name: Zm_Hybrid_Pollen_P Parameter: Plant Line Value: 35A19
  misc_feature: MA Experiment 20000534 PARAMETER Experiment Name: Zm_Hybrid_Pollen_P Parameter: Tissue Value: Pollen vs. Aerial
  misc_feature: MA Experiment ID: 20000632 Result: Down-regulated in Transcription
  misc_feature: MA Experiment 20000632 PARAMETER Experiment Name: Zm_Herbicide-Treatments_P Parameter: Timepoint (hr) Value: 4
  misc_feature: MA Experiment 20000632 PARAMETER Experiment Name: Zm_Herbicide-Treatments_P Parameter: Tissue Value: Aerial
  misc_feature: MA Experiment 20000632 PARAMETER Experiment Name: Zm_Herbicide-Treatments_P Parameter: Treatment Value: Glean vs. No Treatment
  misc_feature: MA Experiment ID: 20000633 Result: Down-regulated in Transcription
  misc_feature: MA Experiment 20000633 PARAMETER Experiment Name: Zm_Herbicide-Treatments_P Parameter: Timepoint (hr) Value: 4
  misc_feature: MA Experiment 20000633 PARAMETER Experiment Name: Zm_Herbicide-Treatments_P Parameter: Tissue Value: Aerial
  misc_feature: MA Experiment 20000633 PARAMETER Experiment Name: Zm_Herbicide-Treatments_P Parameter: Treatment Value: Trimec vs. No Treatment
aattaatcccccacgttccccttccctttctctcccgccgccgcacgcccctctcaaacctccgcgctcccgcccagctagggtttccccgatctcccctcctcctcaaccgccgccgtctccgagagcgccgccacgatgttggagctgcggcttgtgcaggggagcctcctcaagaaggtcctggaggcgatccgcgagctggtcaacgacgccaacttcgactgctccggcaccgggttctcgctgcaggccatggactcgagccacgtcgccctcgtcgcgctgctcctccgcgccgaggggttcgagcactaccgctgcgaccgcaacctctccatgggcatgaacctcaacaacatggccaagatgctccggtgcgccggtaacgacgacatcatcaccataaaggccgatgacggttctgacaccgtcacctttatgttcgagtcgcccaagcaagataagattgcggatttcgagatgaaactgatggatattgatagcgagcacctcggaatcccggattccgagtaccaggccatcgtccgcatgccttcttctgagtttatgaggatctgcaaggaccttagcagcatcggagacactgtcgttatctcggtaaccaaggagggcgtgaagttctccacatctggagaaattgggagtgcgaacattgtttgcaggcagaaccaaactattgacaagccagaagaggctaccattatagagatgcaagagccggtttccctgacctttgccctaaggtacatgaactcgttcaccaaggcgtcttcactgtccgaacaagtcacgatcagcctgtcgtccgagctaccagtggtggtcgagtacaagatcgctgagatgggttacattagattttacctggcgccaaagatcgaggacgatgaggagatgaagccatgattgccatcagtgctcgtgctgccgactttttctcgtcttccatccatggtttgcttattagctattatttgcacgcaaaggaaaaaaaagatgttatgttttatatcttaggccagactgctttagctacttatttgtgactgctgtgtgtccatggatttatagtgaatctagattagtgggcttgtgctttgtgcatgccgctgctgtctgcccatttttctattcagacatgaaattctttgttgggatc

SEQ ID NO: 16726 - protein, 263 aa, Zea mays subsp. mays
  peptide (1)..(263): Ceres Seq. ID no. 13504974
  misc_feature (1)..(125): Pfam Name: Proliferating cell nuclear antigen, N-terminal domain Pfam Description: Proliferating cell nuclear antigen, N-terminal
  misc_feature (1)..(263): Homolog of NCBI NO: 100160 NR Description: proliferating cell nuclear antigen (clone 4.10) -
  misc_feature (1)..(263): Homolog of NCBI NO: 3947727 NR Description: proliferating cell nuclear antigen [Nicotiana
  misc_feature (1)..(263): Homolog of NCBI NO: 129692 NR Description: PROLIFERATING CELL NUCLEAR ANTIGEN (PCNA) (CYCLIN)
  misc_feature (1)..(263): Homolog of NCBI NO: 6225836 NR Description: Proliferating cell nuclear antigen (PCNA)
  misc_feature (1)..(263): Homolog of NCBI NO: 3608175 NR Description: proliferating cell nuclear antigen [Pisum
  misc_feature (1)..(263): Homolog of NCBI NO: 25005275 NR Description: proliferating cell nuclear antigen [Lycopersicon
  misc_feature (1)..(263): Homolog of NCBI NO: 10946427 NR Description: proliferating cell nuclear antigen [Nicotiana
  misc_feature (1)..(262): Homolog of NCBI NO: 129697 NR Description: PROLIFERATING CELL NUCLEAR ANTIGEN (PCNA)
  misc_feature (1)..(263): Homolog of NCBI NO: 4099508 NR Description: proliferating cell nuclear antigen [Zea mays]
  misc_feature (1)..(263): Homolog of NCBI NO: 2499442 NR Description: PROLIFERATING CELL NUCLEAR ANTIGEN (PCNA)
MLELRLVQGSLLKKVLEAIRELVNDANFDCSGTGFSLQAMDSSHVALVALLLRAEGFEHYRCDRNLSMGMNLNNMAKMLRCAGNDDIITIKADDGSDTVTFMFESPKQDKIADFEMKLMDIDSEHLGIPDSEYQAIVRMPSSEFMRICKDLSSIGDTVVISVTKEGVKFSTSGEIGSANIVCRQNQTIDKPEEATIIEMQEPVSLTFALRYMNSFTKASSLSEQVTISLSSELPVVVEYKIAEMGYIRFYLAPKIEDDEEMKP

SEQ ID NO: 16727 - protein, 224 aa, Zea mays subsp. mays
  peptide (1)..(224): Ceres Seq. ID no. 13504975
  misc_feature (1)..(86): Pfam Name: Proliferating cell nuclear antigen, N-terminal domain Pfam Description: Proliferating cell nuclear antigen, N-terminal
  misc_feature (1)..(224): Homolog of NCBI NO: 100160 NR Description: proliferating cell nuclear antigen (clone 4.10) -
  misc_feature (1)..(224): Homolog of NCBI NO: 3947727 NR Description: proliferating cell nuclear antigen [Nicotiana
  misc_feature (1)..(224): Homolog of NCBI NO: 129692 NR Description: PROLIFERATING CELL NUCLEAR ANTIGEN (PCNA) (CYCLIN)
  misc_feature (1)..(224): Homolog of NCBI NO: 6225836 NR Description: Proliferating cell nuclear antigen (PCNA)
  misc_feature (1)..(224): Homolog of NCBI NO: 3608175 NR Description: proliferating cell nuclear antigen [Pisum
  misc_feature (1)..(224): Homolog of NCBI NO: 25005275 NR Description: proliferating cell nuclear antigen [Lycopersicon
  misc_feature (1)..(224): Homolog of NCBI NO: 10946427 NR Description: proliferating cell nuclear antigen [Nicotiana
  misc_feature (1)..(223): Homolog of NCBI NO: 129697 NR Description: PROLIFERATING CELL NUCLEAR ANTIGEN (PCNA)
  misc_feature (1)..(224): Homolog of NCBI NO: 4099508 NR Description: proliferating cell nuclear antigen [Zea mays]
  misc_feature (1)..(224): Homolog of NCBI NO: 2499442 NR Description: PROLIFERATING CELL NUCLEAR ANTIGEN (PCNA)
MDSSHVALVALLLRAEGFEHYRCDRNLSMGMNLNNMAKMLRCAGNDDIITIKADDGSDTVTFMFESPKQDKIADFEMKLMDIDSEHLGIPDSEYQAIVRMPSSEFMRICKDLSSIGDTVVISVTKEGVKFSTSGEIGSANIVCRQNQTIDKPEEATIIEMQEPVSLTFALRYMNSFTKASSLSEQVTISLSSELPVVVEYKIAEMGYIRFYLAPKIEDDEEMKP

SEQ ID NO: 16728 - protein, 196 aa, Zea mays subsp. mays
  peptide (1)..(196): Ceres Seq. ID no. 13504976
  misc_feature (1)..(58): Pfam Name: Proliferating cell nuclear antigen, N-terminal domain Pfam Description: Proliferating cell nuclear antigen, N-terminal
  misc_feature (1)..(196): Homolog of NCBI NO: 100160 NR Description: proliferating cell nuclear antigen (clone 4.10) -
  misc_feature (1)..(196): Homolog of NCBI NO: 3947727 NR Description: proliferating cell nuclear antigen [Nicotiana
  misc_feature (1)..(196): Homolog of NCBI NO: 129692 NR Description: PROLIFERATING CELL NUCLEAR ANTIGEN (PCNA) (CYCLIN)
  misc_feature (1)..(196): Homolog of NCBI NO: 6225836 NR Description: Proliferating cell nuclear antigen (PCNA)
  misc_feature (1)..(196): Homolog of NCBI NO: 3608175 NR Description: proliferating cell nuclear antigen [Pisum
  misc_feature (1)..(196): Homolog of NCBI NO: 25005275 NR Description: proliferating cell nuclear antigen [Lycopersicon
  misc_feature (1)..(196): Homolog of NCBI NO: 10946427 NR Description: proliferating cell nuclear antigen [Nicotiana
  misc_feature (1)..(195): Homolog of NCBI NO: 129697 NR Description: PROLIFERATING CELL NUCLEAR ANTIGEN (PCNA)
  misc_feature (1)..(196): Homolog of NCBI NO: 4099508 NR Description: proliferating cell nuclear antigen [Zea mays]
  misc_feature (1)..(196): Homolog of NCBI NO: 2499442 NR Description: PROLIFERATING CELL NUCLEAR ANTIGEN (PCNA)
MGMNLNNMAKMLRCAGNDDIITIKADDGSDTVTFMFESPKQDKIADFEMKLMDIDSEHLGIPDSEYQAIVRMPSSEFMRICKDLSSIGDTVVISVTKEGVKFSTSGEIGSANIVCRQNQTIDKPEEATIIEMQEPVSLTFALRYMNSFTKASSLSEQVTISLSSELPVVVEYKIAEMGYIRFYLAPKIEDDEEMKP

SEQ ID NO: 16729 - DNA, 894 bp, Zea mays subsp. mays
  misc_feature (1)..(894): Ceres Seq. ID no. 13499157
  misc_feature: MA Experiment ID: 108527 Result: Up-regulated in Transcription
  misc_feature: MA Experiment 108527 PARAMETER Experiment Name: Zm_5mM_NO_P Parameter: Age (day) Value: 8
  misc_feature: MA Experiment 108527 PARAMETER Experiment Name: Zm_5mM_NO_P Parameter: Organism Value: Zea mays
  misc_feature: MA Experiment 108527 PARAMETER Experiment Name: Zm_5mM_NO_P Parameter: Plant Line Value: 35A19
  misc_feature: MA Experiment 108527 PARAMETER Experiment Name: Zm_5mM_NO_P Parameter: Timepoint (hr) Value: 6
  misc_feature: MA Experiment 108527 PARAMETER Experiment Name: Zm_5mM_NO_P Parameter: Tissue Value: Aerial
  misc_feature: MA Experiment 108527 PARAMETER Experiment Name: Zm_5mM_NO_P Parameter: Treatment Value: 5mM NO vs. No Treatment
  misc_feature: MA Experiment ID: 108528 Result: Down-regulated in Transcription
  misc_feature: MA Experiment 108528 PARAMETER Experiment Name: Zm_Imbibed_Seeds_P Parameter: Age (day) Value: 5 vs. 2
  misc_feature: MA Experiment 108528 PARAMETER Experiment Name: Zm_Imbibed_Seeds_P Parameter: Organism Value: Zea mays
  misc_feature: MA Experiment 108528 PARAMETER Experiment Name: Zm_Imbibed_Seeds_P Parameter: Plant Line Value: 35A19
  misc_feature: MA Experiment 108528 PARAMETER Experiment Name: Zm_Imbibed_Seeds_P Parameter: Tissue Value: Aerial vs. Embryo
  misc_feature: MA Experiment ID: 108529 Result: Up-regulated in Transcription
  misc_feature: MA Experiment 108529 PARAMETER Experiment Name: Zm_Imbibed_Seeds_P Parameter: Age (day) Value: 5 vs. 2
  misc_feature: MA Experiment 108529 PARAMETER Experiment Name: Zm_Imbibed_Seeds_P Parameter: Organism Value: Zea mays
  misc_feature: MA Experiment 108529 PARAMETER Experiment Name: Zm_Imbibed_Seeds_P Parameter: Plant Line Value: 35A19
  misc_feature: MA Experiment 108529 PARAMETER Experiment Name: Zm_Imbibed_Seeds_P Parameter: Tissue Value: Roots vs. Embryo
  misc_feature: MA Experiment ID: 108543 Result: Up-regulated in Transcription
  misc_feature: MA Experiment ID: 108544 Result: Down-regulated in Transcription
  misc_feature: MA Experiment ID: 108597 Result: Down-regulated in Transcription
  misc_feature: MA Experiment 108597 PARAMETER Experiment Name: Zm_100uM_ABA_P Parameter: Age (day) Value: 9
  misc_feature: MA Experiment 108597 PARAMETER Experiment Name: Zm_100uM_ABA_P Parameter: Organism Value: Zea mays
  misc_feature: MA Experiment 108597 PARAMETER Experiment Name: Zm_100uM_ABA_P Parameter: Plant Line Value: 35A19
  misc_feature: MA Experiment 108597 PARAMETER Experiment Name: Zm_100uM_ABA_P Parameter: Timepoint (hr) Value: 24
  misc_feature: MA Experiment 108597 PARAMETER Experiment Name: Zm_100uM_ABA_P Parameter: Tissue Value: Aerial
  misc_feature: MA Experiment 108597 PARAMETER Experiment Name: Zm_100uM_ABA_P Parameter: Treatment Value: 100uM ABA vs. No Treatment
  misc_feature: MA Experiment ID: 20000479 Result: Down-regulated in Transcription
  misc_feature: MA Experiment 20000479 PARAMETER Experiment Name: Zm_Drought_P Parameter: Age (day) Value: 10
  misc_feature: MA Experiment 20000479 PARAMETER Experiment Name: Zm_Drought_P Parameter: Organism Value: Zea mays
  misc_feature: MA Experiment 20000479 PARAMETER Experiment Name: Zm_Drought_P Parameter: Plant Line Value: 35A19
  misc_feature: MA Experiment 20000479 PARAMETER Experiment Name: Zm_Drought_P Parameter: Timepoint (hr) Value: 48
  misc_feature: MA Experiment 20000479 PARAMETER Experiment Name: Zm_Drought_P Parameter: Tissue Value: Aerial
  misc_feature: MA Experiment 20000479 PARAMETER Experiment Name: Zm_Drought_P Parameter: Treatment Value: Drought vs. No Drought
  misc_feature: MA Experiment ID: 20000480 Result: Down-regulated in Transcription
  misc_feature: MA Experiment 20000480 PARAMETER Experiment Name: Zm_Drought_P Parameter: Age (day) Value: 11
  misc_feature: MA Experiment 20000480 PARAMETER Experiment Name: Zm_Drought_P Parameter: Organism Value: Zea mays
  misc_feature: MA Experiment 20000480 PARAMETER Experiment Name: Zm_Drought_P Parameter: Plant Line Value: 35A19
  misc_feature: MA Experiment 20000480 PARAMETER Experiment Name: Zm_Drought_P Parameter: Timepoint (hr) Value: 72
  misc_feature: MA Experiment 20000480 PARAMETER Experiment Name: Zm_Drought_P Parameter: Tissue Value: Aerial
  misc_feature: MA Experiment 20000480 PARAMETER Experiment Name: Zm_Drought_P Parameter: Treatment Value: Drought vs. No Drought
  misc_feature: MA Experiment ID: 20000492 Result: Down-regulated in Transcription
  misc_feature: MA Experiment 20000492 PARAMETER Experiment Name: Zm_Hybrid_Seed_Dev_P Parameter: DAP Value: 12
  misc_feature: MA Experiment 20000492 PARAMETER Experiment Name: Zm_Hybrid_Seed_Dev_P Parameter: Organism Value: Zea mays
  misc_feature: MA Experiment 20000492 PARAMETER Experiment Name: Zm_Hybrid_Seed_Dev_P Parameter: Plant Line Value: 35A19
  misc_feature: MA Experiment 20000492 PARAMETER Experiment Name: Zm_Hybrid_Seed_Dev_P Parameter: Tissue Value: Fert Kernel vs. Unfert Floret
  misc_feature: MA Experiment ID: 20000534 Result: Down-regulated in Transcription
  misc_feature: MA Experiment 20000534 PARAMETER Experiment Name: Zm_Hybrid_Pollen_P Parameter: Age (day) Value: 8
  misc_feature: MA Experiment 20000534 PARAMETER Experiment Name: Zm_Hybrid_Pollen_P Parameter: Organism Value: Zea mays
  misc_feature: MA Experiment 20000534 PARAMETER Experiment Name: Zm_Hybrid_Pollen_P Parameter: Plant Line Value: 35A19
  misc_feature: MA Experiment 20000534 PARAMETER Experiment Name: Zm_Hybrid_Pollen_P Parameter: Tissue Value: Pollen vs. Aerial
  misc_feature: MA Experiment ID: 20000535 Result: Down-regulated in Transcription
  misc_feature: MA Experiment 20000535 PARAMETER Experiment Name: Zm_Hybrid_Seed_Dev_P Parameter: DAP Value: 30 vs. 12
  misc_feature: MA Experiment 20000535 PARAMETER Experiment Name: Zm_Hybrid_Seed_Dev_P Parameter: Organism Value: Zea mays
  misc_feature: MA Experiment 20000535 PARAMETER Experiment Name: Zm_Hybrid_Seed_Dev_P Parameter: Plant Line Value: 35A19
  misc_feature: MA Experiment 20000535 PARAMETER Experiment Name: Zm_Hybrid_Seed_Dev_P Parameter: Tissue Value: Embryo vs. Unfert Floret
  misc_feature: MA Experiment ID: 20000626 Result: Down-regulated in Transcription
  misc_feature: MA Experiment 20000626 PARAMETER Experiment Name: Zm_Herbicide-Treatments_P Parameter: Timepoint (hr) Value: 12
  misc_feature: MA Experiment 20000626 PARAMETER Experiment Name: Zm_Herbicide-Treatments_P Parameter: Tissue Value: Aerial
  misc_feature: MA Experiment 20000626 PARAMETER Experiment Name: Zm_Herbicide-Treatments_P Parameter: Treatment Value: Roundup vs. No Treatment
gcacgagaccattacctagaacatcctaatcaaaaagcaccgggtccttgctttgcgcgttgctgttcgcataaacaagagatcctagttctactcccaagcaatgtatccgtcagcccctccggacgcgtataacaagttcagcgccggggctccgccaacggcgccgccgccgccggcagcgtaccaccagcagcagcagcagcacggagcgaacatggacacttcacgccccggcggcgggctgaggaaatggtccaccggcctcttccactgcatggacgacccggggaactgtctcatcacatgcctgtgcccctgcgtcacgttcgggcaggtcgctgacatcgtggacaaggggcacctgcccatgtatcgcgagcggactggtgtacgggctcatctgcgcgtcgacggggatggggtgcctgtactcgtgcctctaccggtccaagctgagggccgagtacgacctggacgaaggggagtgcccggacatcctggtgcactgctgctgcgagcacctggctctgtgccaagagtaccgcgagctcaagaaccgcggcttcgacctggggatcggttgggaggctaacatggaccggcanaggcgaggagttgccggcggcggcgcggtgatgggggcgccgccggccataccgctgggcatgattaggtagatgattgattgatgcgaaatggcagaacttgctttcgtggttcttttgtttgactatgtaatgtatcttcgtttccatcgattctatgtaatttaactgtccctttttttttggctctctattgtggaggtcgctgggtgtgaatagcactgttttggatgggtttgtgattggtctagatgacttatataaggtgattgtanagcggagtttt

SEQ ID NO: 16730 - protein, 163 aa, Zea mays subsp. mays
  peptide (1)..(163): Ceres Seq. ID no. 13499158
  misc_feature (51)..(86): Homolog of NCBI NO: 34897268 NR Description: unknown protein [Oryza sativa (japonica
  misc_feature (18)..(133): Homolog of NCBI NO: 15229653 NR Description: hypothetical protein [Arabidopsis thaliana]
  misc_feature (47)..(163): Homolog of NCBI NO: 34897272 NR Description: hypothetical protein [Oryza sativa (japonica
  misc_feature (33)..(86): Homolog of NCBI NO: 15217930 NR Description: hypothetical protein [Arabidopsis thaliana]
  misc_feature (50)..(86): Homolog of NCBI NO: 15223920 NR Description: expressed protein [Arabidopsis thaliana]
  misc_feature (42)..(86): Homolog of NCBI NO: 27414003 NR Description: fw2.2 [Lycopersicon cheesmanii]
  misc_feature (42)..(86): Homolog of NCBI NO: 27414017 NR Description: fw2.2 [Lycopersicon pennellii]
  misc_feature (42)..(86): Homolog of NCBI NO: 27414005 NR Description: fw2.2 [Lycopersicon pimpinellifolium]
  misc_feature (42)..(86): Homolog of NCBI NO: 8272628 NR Description: ORFX [Lycopersicon pennellii]
  misc_feature (42)..(86): Homolog of NCBI NO: 8272626 NR Description: ORFX [Lycopersicon esculentum]
MYPSAPPDAYNKFSAGAPPTAPPPPAAYHQQQQQHGANMDTSRPGGGLRKWSTGLFHCMDDPGNCLITCLCPCVTFGQVADIVDKGHLPMYRERTGVRAHLRVDGDGVPVLVPLPVQAEGRVRPGRRGVPGHPGALLLRAPGSVPRVPRAQEPRLRPGDRLGG

SEQ ID NO: 16731 - protein, 125 aa, Zea mays subsp. mays
  peptide (1)..(125): Ceres Seq. ID no. 13499159
  misc_feature (13)..(48): Homolog of NCBI NO: 34897268 NR Description: unknown protein [Oryza sativa (japonica
  misc_feature (1)..(95): Homolog of NCBI NO: 15229653 NR Description: hypothetical protein [Arabidopsis thaliana]
  misc_feature (9)..(125): Homolog of NCBI NO: 34897272 NR Description: hypothetical protein [Oryza sativa (japonica
  misc_feature (1)..(48): Homolog of NCBI NO: 15217930 NR Description: hypothetical protein [Arabidopsis thaliana]
  misc_feature (12)..(48): Homolog of NCBI NO: 15223920 NR Description: expressed protein [Arabidopsis thaliana]
  misc_feature (4)..(48): Homolog of NCBI NO: 27414003 NR Description: fw2.2 [Lycopersicon cheesmanii]
  misc_feature (4)..(48): Homolog of NCBI NO: 27414005 NR Description: fw2.2 [Lycopersicon pimpinellifolium]
  misc_feature (4)..(48): Homolog of NCBI NO: 27414017 NR Description: fw2.2 [Lycopersicon pennellii]
  misc_feature (4)..(48): Homolog of NCBI NO: 8272628 NR Description: ORFX [Lycopersicon pennellii]
  misc_feature (4)..(48): Homolog of NCBI NO: 8272626 NR Description: ORFX [Lycopersicon esculentum]
MDTSRPGGGLRKWSTGLFHCMDDPGNCLITCLCPCVTFGQVADIVDKGHLPMYRERTGVRAHLRVDGDGVPVLVPLPVQAEGRVRPGRRGVPGHPGALLLRAPGSVPRVPRAQEPRLRPGDRLGG
